(19) United States
(12) Patent Application Publication
(10) Pub. No.: US 2018/0142298 A1
(43) Pub. Date: May 24, 2018

(54) SYSTEMS AND METHODS TO PREDICT AUTISM BEFORE ONSET OF BEHAVIORAL SYMPTOMS AND/OR TO DIAGNOSE AUTISM

(71) Applicant: Bioscreening & Diagnostics LLC, Detroit, MI (US)

(72) Inventor: Ray Bahado-Singh, Grosse Pointe Shores, MI (US)

(73) Assignee: Bioscreening & Diagnostics LLC, Detroit, MI (US)

(21) Appl. No.: 15/573,726

(22) PCT Filed: May 5, 2016
(86) PCT No.: PCT/US16/30913

§ 371 Date: Nov. 13, 2017

Related U.S. Application Data
(60) Provisional application No. 62/161,630, filed on May 14, 2015.

(51) Int. Cl. C12Q 1/6883; A61B 5/16

(52) U.S. Cl. CPC C12Q 1/6883; C12Q 2600/154; C12Q 2600/118; A61B 5/16

(57) ABSTRACT

Systems and methods to predict or diagnose autism are described. Using markers, the systems and methods can predict or diagnose autism based on significant differences in methylation of cytosine bases in many loci throughout the genome. Therapeutic interventions can then be initiated at an earlier time in development, decreasing severity of the disorder.

### FIELD OF THE DISCLOSURE

[0001] The current disclosure provides systems and methods to predict autism before the onset of behavioral symptoms and/or to diagnose autism. Therapeutic interventions can then be initiated at an earlier time in development, decreasing severity of the disorder. Among other markers, the systems and methods can predict or diagnose autism based on significant differences in methylation of cytosine bases in many loci throughout the genome.

### BACKGROUND OF THE DISCLOSURE

[0002] Autism is defined as a neurodevelopmental disorder, characterized by repetitive behaviors, social withdrawal, and communication deficits. The disease has variable cognitive manifestations, ranging non-verbal individuals with cognitive deficits to those with an above-average IQ and social impairments. Population reports from developed countries show consistent, secular increases in autism prevalence. The prevalence of autism in the United States and other countries has increased since the 1970s, and particularly since the late 1990s. Overall, there is tremendous public, clinical, and scientific interest in the etiology of this disorder, its pathophysiology, and ultimately in development of targeted therapies.

### SUMMARY OF THE DISCLOSURE

[0003] The present disclosure provides systems and methods to predict autism in a subject before the development of behavioral symptoms. Additionally, systems and methods to diagnose autism are described. The systems and methods include predictive and/or diagnostic kits.

[0004] The systems and methods predict or diagnose autism based on significant differences in methylation of cytosine bases in many loci throughout the genome. The systems and methods can predict or diagnose autism in subjects of all ages including embryos, fetuses, newborns, infants, children, adolescents, and adults.

### DETAILED DESCRIPTION

[0005] Autism is defined as a neurodevelopmental disorder, characterized by repetitive behaviors, social withdrawal, and communication deficits. The prevalence of autism in the United States and other countries has increased since the 1970s, and particularly since the late 1990s. Overall, there is tremendous public, clinical, and scientific interest in the etiology of this disorder, its pathophysiology and ultimately in development of targeted therapies.

[0006] “Autism” refers to a neurodevelopmental disorder characterized by impaired social interaction, impaired verbal and non-verbal communication, and restricted and repetitive behavior. Autism includes autism spectrum disorders and/or autism spectrum disorder as defined by the Diagnostic and Statistical Manual of Mental Disorders (DSM)-IV and DSM-V, respectively.

[0007] In 1994, the American Psychiatric Association included several subtypes of autism spectrum disorders in the DSM-IV: autistic disorder, Asperger syndrome, Rett disorder, childhood disintegrative disorder (CDD), and pervasive developmental disorder not otherwise specified (PDD-NOS). (Association AP. Diagnostic and Statistical Manual of Mental Disorders. 4th ed. Washington, DC. 1994.). However, with the DSM-V in 2013, a single diagnosis, “autism spectrum disorder” has replaced previous subtypes (e.g. autistic disorder, Asperger disorder, etc.) and the clinical heterogeneity is indicated with specifiers for severity and associated conditions (e.g., intellectual impairment, language impairment).

[0008] The present disclosure provides systems and methods to predict autism in a subject before the development of behavioral symptoms or to diagnose autism following the onset of behavioral symptoms. The systems and methods include predictive or diagnostic kits.

[0009] Diagnosis of autism traditionally includes a complete history, physical examination, neurologic examination, and direct assessment of the subject's social, language, and cognitive development. If possible, sufficient time should be set aside for standardized parent interviews regarding current concerns and behavioral history, as well as structured observation of social and communicative behavior and play.

[0010] The diagnosis of autism currently is made clinically, based upon the history, examinations, and observations of behavior. It should be suspected in subjects who have abnormalities in social communication and interaction, as well as restricted, repetitive patterns of behavior, interests, and activities. Accurate and appropriate diagnosis previously required a clinician experienced in the diagnosis and treatment of autism. Reliance was placed on clinical judgment, aided by guides to diagnosis. At a minimum, the diagnostic evaluation included documentation of whether the subject's symptoms met the following DSM-V criteria for autism:
[0011] 1. Persistent deficits in social communication and social interaction in multiple settings; demonstrated by deficits in all three of the following (either currently or by history):
   [0012] Social-emotional reciprocity (e.g., failure of back-and-forth conversation; and reduced sharing of interests and emotions);
   [0013] Nonverbal communicative behaviors used for social interaction (e.g., poorly integrated verbal and nonverbal communication; abnormal eye contact or body language; and poor understanding of gestures); and
   [0014] Developing, maintaining, and understanding relationships (e.g., difficulty adjusting behavior to social setting; difficulty making friends; and lack of interest in peers).
[0015] 2. Restricted, repetitive patterns of behavior, interests, or activities; demonstrated by two or more of the following (either currently or by history):
   [0016] Stereotyped or repetitive movements, use of objects, or speech (e.g., stereotypes; echolalia; ordering toys; etc.);
   [0017] Insistence on sameness, unwavering adherence to routines, or ritualized patterns of behavior (verbal or nonverbal);
   [0018] Highly restricted, fixated interests that are abnormal in strength or focus (e.g., preoccupation with certain objects; perseverative interests); and
   [0019] Increased or decreased response to sensory input or unusual interest in sensory aspects of the environment (e.g., adverse response to particular sounds; apparent indifference to temperature; excessive touching/smelling of objects).
[0020] 3. The symptoms must be present in the early developmental period. However, they may become apparent only after social demands exceed limited capacity. In later life, symptoms may be masked by learned strategies.
[0021] 4. Symptoms together limit and impair everyday functioning.
[0022] 5. The symptoms are not better explained by intellectual disability or global developmental delay

[0023] The DSM-V recommends that clinicians specify the severity level of autism, recognizing that severity may vary with context and over time. According to the DSM-V, severity should be assessed separately for social communication/interaction and repetitive/restricted behavior, and be determined by levels (Level I, II, III) depending on the support requirement.

[0024] In assessing DSM-V criteria, diagnostic evaluations should include the use of a diagnostic instrument with at least moderate sensitivity and high specificity for autism. The American Academy of Child and Adolescent Psychiatry, the American Academy of Neurology, and the American Academy of Pediatrics have recommended several such diagnostic instruments. For example, The Childhood Autism Rating Scale (CARS) and the Autism Diagnostic Observation Schedule (ADOS)-Generic (ADOS-2) can be used to measure symptoms using direct observation. For a parent of a subject, the Autism Behavior Checklist (ABC), Gilliam Autism Rating Scale, 2^{nd} edition (GARS-2), and the Autism Diagnostic Interview-Revised (ADI-R) systems can be used.

[0025] The ADOS can be used for diagnosis of autism in research studies and in clinical settings (Falkmer, et al., European J. Child and Adolescent Psychiatry 2013; 22:329-40; Lord et al., J. Autism Dev. Disorders 2000: 30:205-23.). The second edition (ADOS-2) was published in 2012. It is available for use with subjects aged one year through adulthood. The ADOS is meant to be used as one facet of an evaluation, with results to be considered in conjunction with other clinical information and the examiner's clinical expertise. The ADOS is a semi-structured assessment of social interaction, play, communication, and imaginative use of materials. It provides scores for social interaction and communication and an overall score. There are four modules based upon the child's expressive language abilities, which take 40 to 60 minutes to administer. Substantial training is required for administration and scoring. In a systematic review, the average sensitivity and specificity of the first edition of the generic ADOS were 87 and 78 percent, respectively, for autism (Falkmer, et al., European J. Child and Adolescent Psychiatry 2013; 22:329-40).

[0026] The ADOS-Toddler Module is a standardized research tool for use in children aged 12 to 30 months (or until phrase speech is acquired). It targets communication, reciprocal social interaction, emerging object use, and play skills. The Toddler Module classifies children as autistic or non-spectrum. Similar to the ADOS-2, results must be considered in conjunction with other clinical information and the examiner's clinical expertise.

[0027] The Autism Behavior Checklist (ABC) is a list of 57 questions to be completed by a parent or teacher (Krug, et al., J. Child Psychology and Psychiatry and Allied Disciplines 1980;21:221-9). The questions are divided into five categories: sensory, relating, body and object use, language, and social and self-help. It was designed primarily to identify children with autism from a population of school-age children with severe disabilities. However, it has been used with children as young as three years. The reported sensitivity and specificity of the ABC in referral samples range from 38 to 58 percent and 76 to 97 percent, respectively (Johnson, et al., Pediatr. 2007;120: 1183-215).

[0028] The third version of Gilliam Autism Rating Scale (GARS-3) was published in 2013 and is based on the DSM-V. The GARS-3 includes 56 clearly stated items describing the characteristic behaviors of persons with autism. The items are grouped into six subscales: Restrictive/Repetitive Behaviors, Social Interaction, Social Communication, Emotional Responses, Cognitive Style, and Maladaptive Speech. Testing time ranges from five to ten minutes. Internal consistency (content sampling) reliability coefficients for the subscales exceed 85% and the Autism Indexes exceed 93%. Binary classification studies indicate that the GARS-3 is able to accurately discriminate children with autism from children without autism (i.e., sensitivity=97%, specificity=97%, ROC/AUC=93%.). However, more studies of its diagnostic accuracy are required.

[0029] The Autism Diagnostic Interview-Revised (ADI-R) is a two- to three-hour clinical interview that probes for autistic symptoms. It has excellent psychometric properties (average sensitivity of 82 percent in children under three years of age and 91 percent in children over three years of age in a systematic review). The ADI-R is typically used in research settings, often combined with the ADOS-2. However, the ADI-R is not always practical for use in clinical settings because of the time required for administration.

[0030] The CARS is a 15-item direct-observation instrument designed to facilitate the diagnosis of autism in children two years of age and older. (Falkmer, et al., European J. Child and Adolescent Psychiatry 2013; 22: 329-40). Each of the items is scored on a seven-point rating scale. The CARS is well correlated with the DSM-IV criteria and discriminates ASD from other developmental disorders better than the ABC. The CARS is intended for use by a trained clinician and takes 20 to 30 minutes to administer. In a systematic review, the average sensitivity and specificity were 82 and 80 percent, respectively, for ASD (Falkmer, et al., European J. Child and Adolescent Psychiatry 2013; 22:329-40).

[0031] The foregoing description of methods to diagnose autism indicates that currently-available methods are time-consuming and subjective. Because they are subjective, uncertainty following an evaluation or diagnosis can remain. Further, none of the described methods is able to predict autism in a subject before the onset of behavioral symptoms.

[0032] The cause of autism remains unknown, and a number of potential causes are currently being assessed. Potential causes under investigation include environmental factors; immune system perturbations (e.g. maternal immunoglobulin reactivity against fetal brain proteins; altered pro-inflammatory cytokine profiles in the brain; auto-immune disorders (e.g., autistic children have serum antibody reactivity against human cortical and cerebellar brain regions)); the use of acetaminophen; folic acid metabolism deficiencies; vitamin D deficiencies; and heavy metal (e.g., mercury) toxicity. Risk factors leading to a heightened risk of autism include gestational age at birth (e.g., <35 weeks or >42 weeks), low birth weight (e.g., <2500 grams), and gender (e.g., males have a higher prevalence of autism than females).

[0033] Autism is a highly heterogeneous and complex disorder. It has proven very difficult to elucidate single-gene factors that contribute to the disorder. Much of genetic research in autism has yielded inconsistent results that suggest a wide variety of susceptibility loci and potential candidate genes, as well as a complex myriad of gene-gene and gene-environment interactions. In light of these difficulties and inconsistencies in genetic research, some insight into the genes and pathways involved in autism may be found by gaining a better understanding of epigenetic mechanisms and how they relate to the development of autism (Mbadiwe, et al., Autism Res. Treat. 2013; 2013:826156. Epub 2013 Sep. 15.).

[0034] Epigenetics refers to heritable changes in gene expression that are not due to mutations (i.e. changes in the sequence, such as loss or gain of nucleotides, of a gene) and is an important mechanism for controlling gene function. In other words, epigenetics is a reversible regulation of gene expression by several mechanisms other than mutation. For example, epigenetic modification is the mechanism by which cells which contain identical DNA are able to activate different genes and result in the differentiation into unique tissues (e.g. heart or intestines).

[0035] One example of an epigenetic mechanism is DNA methylation. Other mechanisms include changes to the three dimensional structure of DNA, histone protein modification, micro-RNA inhibitory activity, imprinting, X-inactivation, and long-distance chromosomal interaction.

[0036] Epigenetic alterations result in part from the effects of the environment, thus the environment plays a role in the phenotype by modulating gene expression. Epigenetic processes and their interaction with environmental conditions could explain the differences in gene expression within subjects with autism despite minimal consistent evidence of specific gene mutations. (Persico, et al., Trends in Neurosciences 2006; 29:349-58). Although epigenetic mechanisms involved in autism are not fully understood, there is evidence for genome-wide methylation dysregulation in autism. (Nguyen, FASEB 2010; 24:3036-51).

[0037] Methionine synthase is an important enzyme in the folate metabolism pathway. Inhibition of methionine synthase affects methylation activity, and reduced DNA methylation interferes with normal development and proper gene silencing. Impaired phospholipid methylation leads to disruption of neuronal networks, consequently leading to attention and cognitive deficits.

[0038] The systems and methods disclosed herein predict or diagnose autism based on the methylation status of cytosine at various loci in the genome.

[0039] Cytosine is one of a group of four building blocks (i.e., nucleotides) from which DNA is constructed (i.e. cytosine (C), thiamine (T), adenine (A), and guanosine (G)). The chemical structure of cytosine is in the form of a six-sided hexagon or pyrimidine ring. Cytosine is usually paired with guanosine in a linear sequence along the single DNA strand to form CpG pairs. “CpG” refers to a cytosine-phosphate-guanosine chemical bond in which the phosphate binds the two nucleotides together. In mammals, in 70-80% of these CpG pairs the cytosine is methylated. (Chatterjee, et al., Biochemica et Biophisica Acta 2012; 1819:763-70).

[0040] The term “CpG island” refers to regions in the genome with a high concentration of CG dinucleotide pairs or CpG sites. The length of DNA occupied by the CpG island is usually 300-3000 base pairs. The CpG island is defined by various criteria including the length of recurrent CG dinucleotide pairs occupying at least 200 base pair (bp) of DNA, a CG content of the segment of at least 50%, and that the observed/expected CpG ratio is greater than 60%.

[0041] Forty percent of promoter region of mammalian genes have associated CpG islands and three quarters of these promoter-regions have high CpG concentrations. (Fatemi, et al., Nucleic Acids Res. 2005; 33:e176). In humans 70% of the promoter regions of genes have high CG content. The CG dinucleotide pairs may exist elsewhere in the gene or outside of the gene and are not known to be associated with any particular genes.

[0042] In most CpG sites scattered throughout the DNA the cytosine nucleotide is methylated. In contrast, the cytosine is more often unmethylated in CpG sites located in the CpG islands of the promoter regions of genes, suggesting a role of methylation status of cytosine in CpG Islands in gene transcriptional activity.

[0043] Methylation of cytosine refers to the enzymatic addition of a “methyl group” or single carbon atom to position #5 of the pyrimidine ring of cytosine, which leads to the conversion of cytosine to 5-methyl-cytosine. The methylation of cytosine can be accomplished by a family of enzymes called DNA methyltransferases (DNMT's). The 5-methyl-cytosine, when formed, is prone to mutation or the chemical transformation of the original cytosine to form thymine. Five-methyl-cytosines account for 1% of the nucleotide bases overall in the normal genome.

[0044] As indicated previously, the methylation status of cytosine throughout the DNA can be said to indirectly indicate the relative expression status of multiple genes throughout the genome. The methylation of cytosine nucleotides within a gene, particularly in the promoter region of the gene, is known to be a mechanism of controlling overall gene activity, i.e. mRNA and protein synthesis. Classically, the methylation of cytosine is associated with inhibition of gene transcription. However, in certain genes, methylation of cytosine is known to have the reverse effect and instead promotes gene transcription.

[0045] Disclosed herein is that highly statistically significant differences exist in the percentage or level of methylation of individual cytosine nucleotides distributed throughout the genome when autistic subjects are compared to non-autistic subjects. Cytosines demonstrating methylation differences are distributed both inside and outside of CpG islands and genes. Disclosed herein are methylation markers within and outside of genes for distinguishing a subject with autism from unaffected subjects.

[0046] A collection of genes that are involved in epigenetic pathways of autism has been identified. Specifically, the GABRB3, UBE3A, and MECP23 genes have been consistently shown to be epigenetically dysregulated in autism. There is also a growing body of literature to support the epigenetic role of other genes in autism, such as the RELN gene (Flashner, et al., Neuromolecular Med. 2013; 15:339-50), which plays a role in neuronal migration and synaptogenesis; the oxytocin receptor (OXTR) gene (Gregory, et al., BMC Medicine 2009; 7:62.), which is involved in social behavior; and the engrailed-2 gene (EN-2), which is responsible for Purkinje cell maturation (James, et al., Translational Psychiatry 2013; 3:e232). Recently, methylation profiling revealed differential methylation patterns between subjects with autism and their non-autistic siblings, identifying the retinoic acid-related orphan receptor alpha (RORA) gene as an epigenetically dysregulated gene in autism (Nguyen, et al., FASEB 2010; 24:3036-51).

[0047] Various embodiments relate to the measurements of cytosine methylation and its use in predicting and/or diagnosing autism. In addition, assaying the concentrations of mRNA and/or proteins that are the products of the differentially expressed genes (due to differences in cytosine methylation) in order to predict and/or diagnose autism are disclosed. Additionally, in various embodiments, systems and methods disclosed herein use statistical algorithms to predict or diagnose autism based on methylation levels at informative cytosine loci.

[0048] In various embodiments, autism is predicted and/or diagnosed in a subject by assaying the methylation of a genetic loci and/or the up- or down-regulation of cDNA, mRNA, and/or proteins associated with the gene's expression and/or methylation status. Particular markers are selected from BCOR (BCL6 co-repressor; chromosome X), C8orf75 (long intergenic non-protein coding RNA 589; chromosome 8), CLCN1 (chloride channel, voltage-sensitive chloride channel 1), CLCN4 (chloride channel, voltage-sensitive 4; chromosome X), DIP2C (DIP2 disco-interacting protein 2 homolog 0; chromosome 10), GPM6B (glycoprotein M613, chromosome X), ITGAX (integrin, alpha X (complement component 3 receptor 4 subunit); chromosome 16), LOC284412 (chromosome 2), LOC285375 (long intergenic non-protein coding RNA 620; chromosome 3), MAMLD1 (mastermind-like domain containing 1; chromosome X), MGC16121 (MIR503 host gene; chromosome X), NDUFA10 (NADH dehydrogenase (ubiquinone) 1 alpha subcomplex, 10; chromosome 2), PDE9A (phosphodiesterase 9A; chromosome 21), PPAPDC1A (phosphatidic acid phosphatase type 2 domain containing 1A; chromosome 10), PTPRN2 (protein tyrosine phosphatase, receptor type, N polypeptide 2; chromosome 7), RAP1GAP2 (RAP1 GTPase activating protein 2; chromosome 17), RPS4Y2 (ribosomal protein S4, Y-linked 2; chromosome Y), TUBA3D (tubulin, alpha 3d; chromosome 2), and UBTD1 (ubiquitin domain containing 1; chromosome 10).

[0049] In particular embodiments, the systems and methods predict or diagnose autism by assaying a sample obtained from a subject for the methylation status, up- or down-regulation of two or more; three or more; four or more; five or more; six or more; seven or more; eight or more; nine or more or ten or more markers associated with autism disclosed herein. In further embodiments, the systems and methods predict or diagnose autism by assaying a sample obtained from a subject for the methylation status, up- or down-regulation of two, three, four, five, six, seven, eight, nine, or ten markers associated with autism disclosed herein.

[0050] In particular embodiments, the markers include (hereafter referred to by gene abbreviations for brevity) BCOR, PTPRN2, TUBA3D, PDE9A, and LOC284412. In particular embodiments, the markers include PTPRN2, TUBA3D, PDE9A, and LOC284412. In particular embodiments, the markers include BCOR, TUBA3D, PDE9A, and LOC284412. In particular embodiments, the markers include BCOR, PTPRN2, PDE9A, and LOC284412. In particular embodiments, the markers include BCOR, PTPRN2, TUBA3D, and LOC284412. In particular embodiments, the markers include BCOR, PTPRN2, TUBA3D, and PDE9A. In particular embodiments, the markers include TUBA3D, PDE9A, and LOC284412; PTPRN2, PDE9A, and LOC284412; PTPRN2, TUBA3D, and LOC284412; PTPRN2, TUBA3D, and PDE9A; BCOR, PDE9A, and LOC284412; BCOR, TUBA3D, and LOC284412; BCOR, TUBA3D, and PDE9A; BCOR, PTPRN2, and LOC284412; BCOR, PTPRN2, and PDE9A; or BCOR, PTPRN2, and TUBA3D.

[0051] In particular embodiments, the markers include GPM6B, NDUFA10, PDE9A, and LOC284412. In particular embodiments, the markers include GPM6B, NDUFA10, and PDE9A. In particular embodiments, the markers include GPM6B, NDUFA10, and LOC284412. In particular embodiments, the markers include GPM6B, PDE9A, and LOC284412. In particular embodiments, the markers include NDUFA10, PDE9A, and LOC284412.

[0052] In particular embodiments, the markers include BCOR, UBTD1, LOC285375, RPS4Y2, PPAPDC1A, ITGAX, DIP2C, MGC16121, PTPRN2, and CLCN4. In particular embodiments, the markers include UBTD1, LOC285375, RPS4Y2, PPAPDC1A, ITGAX, DIP2C, MGC16121, PTPRN2, and CLCN4. In particular embodiments, the markers include BCOR, LOC285375, RPS4Y2, PPAPDC1A, ITGAX, DIP2C, MGC16121, PTPRN2, and CLCN4. In particular embodiments, the markers include BCOR, UBTD1, RPS4Y2, PPAPDC1A, ITGAX, DIP2C, MGC16121, PTPRN2, and CLCN4. In particular embodiments, the markers include BCOR, UBTD1, LOC285375, PPAPDC1A, ITGAX, DIP2C, MGC16121, PTPRN2, and CLCN4. In particular embodiments, the markers include BCOR, UBTD1, LOC285375, RPS4Y2, ITGAX, DIP2C, MGC16121, PTPRN2, and CLCN4. In particular embodiments, the markers include BCOR, UBTD1, LOC285375, RPS4Y2, PPAPDC1A, DIP2C, MGC16121, PTPRN2, and CLCN4. In particular embodiments, the markers include BCOR, UBTD1, LOC285375, RPS4Y2, PPAPDC1A, ITGAX, MGC16121, PTPRN2, and CLCN4. In particular embodiments, the markers include BCOR, UBTD1, LOC285375, RPS4Y2, PPAPDC1A, ITGAX, DIP2C, PTPRN2, and CLCN4. In particular embodiments, the markers include BCOR, UBTD1, LOC285375, RPS4Y2, PPAPDC1A, ITGAX, DIP2C, MGC16121, and CLCN4. In particular embodiments, the markers include BCOR, UBTD1, LOC285375, RPS4Y2, PPAPDC1A, ITGAX, DIP2C, MGC16121, and PTPRN2. In particular embodiments, the markers include LOC285375, RPS4Y2, PPAPDC1A, ITGAX, DIP2C, MGC16121, PTPRN2, and CLCN4; UBTD1, RPS4Y2, PPAPDC1A, ITGAX, DIP2C, MGC16121, PTPRN2, and CLCN4; UBTD1, LOC285375, PPAPDC1A, ITGAX, DIP2C, MGC16121, PTPRN2, and CLCN4; UBTD1, LOC285375, RPS4Y2, ITGAX, DIP2C, MGC16121, PTPRN2, and CLCN4; UBTD1, LOC285375, RPS4Y2, PPAPDC1A, DIP2C, MGC16121, PTPRN2, and CLCN4; UBTD1, LOC285375, RPS4Y2, PPAPDC1A, ITGAX, MGC16121, PTPRN2, and CLCN4; UBTD1, LOC285375, RPS4Y2, PPAPDC1A, ITGAX, DIP2C, PTPRN2, and CLCN4; UBTD1, LOC285375, RPS4Y2, PPAPDC1A, ITGAX, DIP2C, MGC16121, and CLCN4; UBTD1, LOC285375, RPS4Y2, PPAPDC1A, ITGAX, DIP2C, MGC16121, and PTPRN2; BCOR, RPS4Y2, PPAPDC1A, ITGAX, DIP2C, MGC16121, PTPRN2, and CLCN4; BCOR, LOC285375, PPAPDC1A, ITGAX, DIP2C, MGC16121, PTPRN2, and CLCN4; BCOR, LOC285375, RPS4Y2, ITGAX, DIP2C, MGC16121, PTPRN2, and CLCN4; BCOR, LOC285375, RPS4Y2, PPAPDC1A, DIP2C, MGC16121, PTPRN2, and CLCN4; BCOR, LOC285375, RPS4Y2, PPAPDC1A, ITGAX, MGC16121, PTPRN2, and CLCN4; BCOR, LOC285375, RPS4Y2, PPAPDC1A, ITGAX, DIP2C, PTPRN2, and CLCN4; BCOR, LOC285375, RPS4Y2, PPAPDC1A, ITGAX, DIP2C, MGC16121, and CLCN4; BCOR, LOC285375, RPS4Y2, PPAPDC1A, ITGAX, DIP2C, MGC16121, and PTPRN2; BCOR, UBTD1, PPAPDC1A, ITGAX, DIP2C, MGC16121, PTPRN2, and CLCN4; BCOR, UBTD1, RPS4Y2, ITGAX, DIP2C, MGC16121, PTPRN2, and CLCN4; BCOR, UBTD1, RPS4Y2, PPAPDC1A, DIP2C, MGC16121, PTPRN2, and CLCN4; BCOR, UBTD1, RPS4Y2, PPAPDC1A, ITGAX, MGC16121, PTPRN2, and CLCN4; BCOR, UBTD1, RPS4Y2, PPAPDC1A, ITGAX, DIP2C, PTPRN2, and CLCN4; BCOR, UBTD1, RPS4Y2, PPAPDC1A, ITGAX, DIP2C, MGC16121, and CLCN4; BCOR, UBTD1, RPS4Y2, PPAPDC1A, ITGAX, DIP2C, MGC16121, and PTPRN2; BCOR, UBTD1, LOC285375, ITGAX, DIP2C, MGC16121, PTPRN2, and CLCN4; BCOR, UBTD1, LOC285375, PPAPDC1A, DIP2C, MGC16121, PTPRN2, and CLCN4; BCOR, UBTD1, LOC285375, PPAPDC1A, ITGAX, MGC16121, PTPRN2, and CLCN4; BCOR, UBTD1, LOC285375, PPAPDC1A, ITGAX, DIP2C, PTPRN2, and CLCN4; BCOR, UBTD1, LOC285375, PPAPDC1A, ITGAX, DIP2C, MGC16121, and CLCN4; BCOR, UBTD1, LOC285375, PPAPDC1A, ITGAX, DIP2C, MGC16121, and PTPRN2; BCOR, UBTD1, LOC285375, RPS4Y2, DIP2C, MGC16121, PTPRN2, and CLCN4; BCOR, UBTD1, LOC285375, RPS4Y2, ITGAX, MGC16121, PTPRN2, and CLCN4; BCOR, UBTD1, LOC285375, RPS4Y2, ITGAX, DIP2C, PTPRN2, and CLCN4; BCOR, UBTD1, LOC285375, RPS4Y2, ITGAX, DIP2C, MGC16121, and CLCN4; BCOR, UBTD1, LOC285375, RPS4Y2, ITGAX, DIP2C, MGC16121, and PTPRN2; BCOR, UBTD1, LOC285375, RPS4Y2, PPAPDC1A, MGC16121, PTPRN2, and CLCN4; BCOR, UBTD1, LOC285375, RPS4Y2, PPAPDC1A, DIP2C, PTPRN2, and CLCN4; BCOR, UBTD1, LOC285375, RPS4Y2, PPAPDC1A, DIP2C, MGC16121, and CLCN4; BCOR, UBTD1, LOC285375, RPS4Y2, PPAPDC1A, DIP2C, MGC16121, and PTPRN2; BCOR, UBTD1, LOC285375, RPS4Y2, PPAPDC1A, ITGAX, PTPRN2, and CLCN4; BCOR, UBTD1, LOC285375, RPS4Y2, PPAPDC1A, ITGAX, MGC16121, and CLCN4; BCOR, UBTD1, LOC285375, RPS4Y2, PPAPDC1A, ITGAX, MGC16121, and PTPRN2; BCOR, UBTD1, LOC285375, RPS4Y2, PPAPDC1A, ITGAX, DIP2C, and CLCN4; BCOR, UBTD1, LOC285375, RPS4Y2, PPAPDC1A, ITGAX, DIP2C, and PTPRN2; or BCOR, UBTD1, LOC285375, RPS4Y2, PPAPDC1A, ITGAX, DIP2C, and MGC16121. In particular embodiments, the markers include RPS4Y2, PPAPDC1A, ITGAX, DIP2C, MGC16121, PTPRN2, and CLCN4; LOC285375, PPAPDC1A, ITGAX, DIP2C, MGC16121, PTPRN2, and CLCN4; LOC285375, RPS4Y2, ITGAX, DIP2C, MGC16121, PTPRN2, and CLCN4; LOC285375, RPS4Y2, PPAPDC1A, DIP2C, MGC16121, PTPRN2, and CLCN4; LOC285375, RPS4Y2, PPAPDC1A, ITGAX, MGC16121, PTPRN2, and CLCN4; LOC285375, RPS4Y2, PPAPDC1A, ITGAX, DIP2C, PTPRN2, and CLCN4; LOC285375, RPS4Y2, PPAPDC1A, ITGAX, DIP2C, MGC16121, and CLCN4; LOC285375, RPS4Y2, PPAPDC1A, ITGAX, DIP2C, MGC16121, PTPRN2; UBTD1,PPAPDC1A, ITGAX, DIP2C, MGC16121, PTPRN2, and CLCN4; UBTD1, RPS4Y2, ITGAX, DIP2C, MGC16121, PTPRN2, and CLCN4; UBTD1, RPS4Y2, PPAPDC1A, DIP2C, MGC16121, PTPRN2, and CLCN4; UBTD1, RPS4Y2, PPAPDC1A, ITGAX, MGC16121, PTPRN2, and CLCN4; UBTD1, RPS4Y2, PPAPDC1A, ITGAX, DIP2C, PTPRN2, and CLCN4; UBTD1, RPS4Y2, PPAPDC1A, ITGAX, DIP2C, MGC16121, and CLCN4; UBTD1, RPS4Y2, PPAPDC1A, ITGAX, DIP2C, MGC16121, PTPRN2; UBTD1, LOC285375, ITGAX, DIP2C, MGC16121, PTPRN2, and CLCN4; UBTD1, LOC285375, PPAPDC1A, DIP2C, MGC16121, PTPRN2, and CLCN4; UBTD1, LOC285375, PPAPDC1A, ITGAX, MGC16121, PTPRN2, and CLCN4; UBTD1, LOC285375, PPAPDC1A, ITGAX, DIP2C, PTPRN2, and CLCN4; UBTD1, LOC285375, PPAPDC1A, ITGAX, DIP2C, MGC16121, and CLCN4; UBTD1, LOC285375, PPAPDC1A, ITGAX, DIP2C, MGC16121, PTPRN2; UBTD1, LOC285375, RPS4Y2, DIP2C, MGC16121, PTPRN2, and CLCN4; UBTD1, LOC285375, RPS4Y2, ITGAX, MGC16121, PTPRN2, and CLCN4; UBTD1, LOC285375, RPS4Y2, ITGAX, DIP2C, PTPRN2, and CLCN4; UBTD1, LOC285375, RPS4Y2, ITGAX, DIP2C, MGC16121,and CLCN4; UBTD1, LOC285375, RPS4Y2, ITGAX, DIP2C, MGC16121, PTPRN2; UBTD1, LOC285375, RPS4Y2, PPAPDC1A, MGC16121, PTPRN2, and CLCN4; UBTD1, LOC285375, RPS4Y2, PPAPDC1A, DIP2C, PTPRN2, and CLCN4; UBTD1, LOC285375, RPS4Y2, PPAPDC1A, DIP2C, MGC16121, and CLCN4; UBTD1, LOC285375, RPS4Y2, PPAPDC1A, DIP2C, MGC16121, PTPRN2; UBTD1, LOC285375, RPS4Y2, PPAPDC1A, ITGAX, PTPRN2, and CLCN4; UBTD1, LOC285375, RPS4Y2, PPAPDC1A, ITGAX, MGC16121, and CLCN4; UBTD1, LOC285375, RPS4Y2, PPAPDC1A, ITGAX, MGC16121, PTPRN2; UBTD1, LOC285375, RPS4Y2, PPAPDC1A, ITGAX, DIP2C, and CLCN4; UBTD1, LOC285375, RPS4Y2, PPAPDC1A, ITGAX, DIP2C, PTPRN2; UBTD1, LOC285375, RPS4Y2, PPAPDC1A, ITGAX, DIP2C, MGC16121,; BCOR, PPAPDC1A, ITGAX, DIP2C, MGC16121, PTPRN2, and CLCN4; BCOR, RPS4Y2,ITGAX, DIP2C, MGC16121, PTPRN2, and CLCN4; BCOR, RPS4Y2, PPAPDC1A, DIP2C, MGC16121, PTPRN2, and CLCN4; BCOR, RPS4Y2, PPAPDC1A, ITGAX, MGC16121, PTPRN2, and CLCN4; BCOR, RPS4Y2, PPAPDC1A, ITGAX, DIP2C, PTPRN2, and CLCN4; BCOR, RPS4Y2, PPAPDC1A, ITGAX, DIP2C, MGC16121, and CLCN4; BCOR, RPS4Y2, PPAPDC1A, ITGAX, DIP2C, MGC16121, PTPRN2; BCOR, LOC285375, ITGAX, DIP2C, MGC16121, PTPRN2, and CLCN4; BCOR, LOC285375, PPAPDC1A, DIP2C, MGC16121, PTPRN2, and CLCN4; BCOR, LOC285375, PPAPDC1A, ITGAX, MGC16121, PTPRN2, and CLCN4; BCOR, LOC285375, PPAPDC1A, ITGAX, DIP2C, PTPRN2, and CLCN4; BCOR, LOC285375, PPAPDC1A, ITGAX, DIP2C, MGC16121, and CLCN4; BCOR, LOC285375, PPAPDC1A, ITGAX, DIP2C, MGC16121, PTPRN2; BCOR, LOC285375, RPS4Y2, DIP2C, MGC16121, PTPRN2, and CLCN4; BCOR, LOC285375, RPS4Y2, ITGAX, MGC16121, PTPRN2, and CLCN4; BCOR, LOC285375, RPS4Y2, ITGAX, DIP2C, PTPRN2, and CLCN4; BCOR, LOC285375, RPS4Y2, ITGAX, DIP2C, MGC16121, and CLCN4; BCOR, LOC285375, RPS4Y2, ITGAX, DIP2C, MGC16121, PTPRN2; BCOR, LOC285375, RPS4Y2, PPAPDC1A, MGC16121, PTPRN2, and CLCN4; BCOR, LOC285375, RPS4Y2, PPAPDC1A, DIP2C, PTPRN2, and CLCN4; BCOR, LOC285375, RPS4Y2, PPAPDC1A, DIP2C, MGC16121, and CLCN4; BCOR, LOC285375, RPS4Y2, PPAPDC1A, DIP2C, MGC16121, PTPRN2; BCOR, LOC285375, RPS4Y2, PPAPDC1A, ITGAX, PTPRN2, and CLCN4; BCOR, LOC285375, RPS4Y2, PPAPDC1A, ITGAX, MGC16121, and CLCN4; BCOR, LOC285375, RPS4Y2, PPAPDC1A, ITGAX, MGC16121, PTPRN2; BCOR, LOC285375, RPS4Y2, PPAPDC1A, ITGAX, DIP2C, and CLCN4; BCOR, LOC285375, RPS4Y2, PPAPDC1A, ITGAX, DIP2C, PTPRN2; BCOR, LOC285375, RPS4Y2, PPAPDC1A, ITGAX, DIP2C, MGC16121,; BCOR, UBTD1, ITGAX, DIP2C, MGC16121, PTPRN2, and CLCN4; BCOR, UBTD1, PPAPDC1A, DIP2C, MGC16121, PTPRN2, and CLCN4; BCOR, UBTD1, PPAPDC1A, ITGAX, MGC16121, PTPRN2, and CLCN4; BCOR, UBTD1, PPAPDC1A, ITGAX, DIP2C, PTPRN2, and CLCN4; BCOR, UBTD1, PPAPDC1A, ITGAX, DIP2C, MGC16121, and CLCN4; BCOR, UBTD1, PPAPDC1A, ITGAX, DIP2C, MGC16121, PTPRN2; BCOR, UBTD1, RPS4Y2, DIP2C, MGC16121, PTPRN2, and CLCN4; BCOR, UBTD1, RPS4Y2, ITGAX, MGC16121, PTPRN2, and CLCN4; BCOR, UBTD1, RPS4Y2, ITGAX, DIP2C, PTPRN2, and CLCN4; BCOR, UBTD1, RPS4Y2, ITGAX, DIP2C, MGC16121, and CLCN4; BCOR, UBTD1, RPS4Y2, ITGAX, DIP2C, MGC16121, PTPRN2; BCOR, UBTD1, RPS4Y2, PPAPDC1A, MGC16121, PTPRN2, and CLCN4; BCOR, UBTD1, RPS4Y2, PPAPDC1A, DIP2C, PTPRN2, and CLCN4; BCOR, UBTD1, RPS4Y2, PPAPDC1A, DIP2C, MGC16121, and CLCN4; BCOR, UBTD1, RPS4Y2, PPAPDC1A, DIP2C, MGC16121, PTPRN2; BCOR, UBTD1, RPS4Y2, PPAPDC1A, ITGAX, PTPRN2, and CLCN4; BCOR, UBTD1, RPS4Y2, PPAPDC1A, ITGAX, MGC16121, and CLCN4; BCOR, UBTD1, RPS4Y2, PPAPDC1A, ITGAX, MGC16121, PTPRN2; BCOR, UBTD1, RPS4Y2, PPAPDC1A, ITGAX, DIP2C, and CLCN4; BCOR, UBTD1, RPS4Y2, PPAPDC1A, ITGAX, DIP2C, PTPRN2; BCOR, UBTD1, RPS4Y2, PPAPDC1A, ITGAX, DIP2C, MGC16121; BCOR, UBTD1, LOC285375, DIP2C, MGC16121, PTPRN2, and CLCN4; BCOR, UBTD1, LOC285375, RPS4Y2ITGAX, MGC16121, PTPRN2, and CLCN4; BCOR, UBTD1, LOC285375, ITGAX, DIP2C, PTPRN2, and CLCN4; BCOR, UBTD1, LOC285375, ITGAX, DIP2C, MGC16121, and CLCN4; BCOR, UBTD1, LOC285375, ITGAX, DIP2C, MGC16121, PTPRN2; BCOR, UBTD1, LOC285375, PPAPDC1A, MGC16121, PTPRN2, and CLCN4; BCOR, UBTD1, LOC285375, PPAPDC1A, DIP2C, PTPRN2, and CLCN4; BCOR, UBTD1, LOC285375, PPAPDC1A, DIP2C, MGC16121, and CLCN4; BCOR, UBTD1, LOC285375, PPAPDC1A, DIP2C, MGC16121, PTPRN2; BCOR, UBTD1, LOC285375, PPAPDC1A, ITGAX, PTPRN2, and CLCN4; BCOR, UBTD1, LOC285375, PPAPDC1A, ITGAX, MGC16121, and CLCN4; BCOR, UBTD1, LOC285375, PPAPDC1A, ITGAX, MGC16121, PTPRN2; BCOR, UBTD1, LOC285375, PPAPDC1A, ITGAX, DIP2C, and CLCN4; BCOR, UBTD1, LOC285375, PPAPDC1A, ITGAX, DIP2C, PTPRN2; BCOR, UBTD1, LOC285375, PPAPDC1A, ITGAX, DIP2C, MGC16121, and; BCOR, UBTD1, LOC285375, RPS4Y2, MGC16121, PTPRN2, and CLCN4; BCOR, UBTD1, LOC285375, RPS4Y2, DIP2C, PTPRN2, and CLCN4; BCOR, UBTD1, LOC285375, RPS4Y2, DIP2C, MGC16121, and CLCN4; BCOR, UBTD1, LOC285375, RPS4Y2,DIP2C, MGC16121, PTPRN2; BCOR, UBTD1, LOC285375, RPS4Y2, ITGAX, PTPRN2, and CLCN4; BCOR, UBTD1, LOC285375, RPS4Y2, ITGAX, MGC16121, and CLCN4; BCOR, UBTD1, LOC285375, RPS4Y2, ITGAX, MGC16121, PTPRN2; BCOR, UBTD1, LOC285375, RPS4Y2, ITGAX, DIP2C, and CLCN4; BCOR, UBTD1, LOC285375, RPS4Y2, ITGAX, DIP2C, PTPRN2; BCOR, UBTD1, LOC285375, RPS4Y2, ITGAX, DIP2C, MGC16121; BCOR, UBTD1, LOC285375, RPS4Y2, PPAPDC1A, PTPRN2, and CLCN4; BCOR, UBTD1, LOC285375, RPS4Y2, PPAPDC1A, MGC16121, and CLCN4; BCOR, UBTD1, LOC285375, RPS4Y2, PPAPDC1A, MGC16121, PTPRN2; BCOR, UBTD1, LOC285375, RPS4Y2, PPAPDC1A, DIP2C, and CLCN4; BCOR, UBTD1, LOC285375, RPS4Y2, PPAPDC1A, DIP2C, PTPRN2; BCOR, UBTD1, LOC285375, RPS4Y2, PPAPDC1A, DIP2C, MGC16121, and; BCOR, UBTD1, LOC285375, RPS4Y2, PPAPDC1A, ITGAX, and CLCN4; BCOR, UBTD1, LOC285375, RPS4Y2, PPAPDC1A, ITGAX, PTPRN2; BCOR, UBTD1, LOC285375, RPS4Y2, PPAPDC1A, ITGAX, and MGC16121; or BCOR, UBTD1, LOC285375, RPS4Y2, PPAPDC1A, ITGAX, and DIP2C. In particular embodiments, the markers include BCOR, UBTD1, LOC285375, RPS4Y2, PPAPDC1A, and ITGAX; BCOR, UBTD1, LOC285375, RPS4Y2, PPAPDC1A, and DIP2C; BCOR, UBTD1, LOC285375, RPS4Y2, PPAPDC1A, and MGC16121; BCOR, UBTD1, LOC285375, RPS4Y2, PPAPDC1A, and PTPRN2; BCOR, UBTD1, LOC285375, RPS4Y2, PPAPDC1A, and CLCN4; BCOR, UBTD1, LOC285375, RPS4Y2, ITGAX, and DIP2C; BCOR, UBTD1, LOC285375, RPS4Y2, ITGAX, and MGC16121; BCOR, UBTD1, LOC285375, RPS4Y2, ITGAX, and PTPRN2; BCOR, UBTD1, LOC285375, RPS4Y2, ITGAX, and CLCN4; BCOR, UBTD1, LOC285375, RPS4Y2, DIP2C, and MGC16121; BCOR, UBTD1, LOC285375, RPS4Y2, DIP2C, and PTPRN2; BCOR, UBTD1, LOC285375, RPS4Y2, DIP2C, and CLCN4; BCOR, UBTD1, LOC285375, RPS4Y2, MGC16121, and PTPRN2; BCOR, UBTD1, LOC285375, RPS4Y2, MGC16121, and CLCN4; BCOR, UBTD1, LOC285375, RPS4Y2, PTPRN2, and CLCN4; BCOR, UBTD1, LOC285375, PPAPDC1A, ITGAX, and DIP2C; BCOR, UBTD1, LOC285375, PPAPDC1A, ITGAX, and MGC16121; BCOR, UBTD1, LOC285375, PPAPDC1A, ITGAX, and PTPRN2; BCOR, UBTD1, LOC285375, PPAPDC1A, ITGAX, and CLCN4; BCOR, UBTD1, LOC285375, PPAPDC1A, DIP2C, and MGC16121; BCOR, UBTD1, LOC285375, PPAPDC1A, DIP2C, and PTPRN2; BCOR, UBTD1, LOC285375, PPAPDC1A, DIP2C, and CLCN4; BCOR, UBTD1, LOC285375, PPAPDC1A, MGC16121, and PTPRN2; BCOR, UBTD1, LOC285375, PPAPDC1A, MGC16121, and CLCN4; BCOR, UBTD1, LOC285375, PPAPDC1A, PTPRN2, and CLCN4; BCOR, UBTD1, LOC285375, ITGAX, DIP2C, and MGC16121; BCOR, UBTD1, LOC285375, ITGAX, DIP2C, and PTPRN2; BCOR, UBTD1, LOC285375, ITGAX, DIP2C, and CLCN4; BCOR, UBTD1, LOC285375, ITGAX, MGC16121, and PTPRN2; BCOR, UBTD1, LOC285375, ITGAX, MGC16121, and CLCN4; BCOR, UBTD1, LOC285375, ITGAX, PTPRN2, and CLCN4; BCOR, UBTD1, LOC285375, DIP2C, MGC16121, and PTPRN2; BCOR, UBTD1, LOC285375, DIP2C, MGC16121, and CLCN4; BCOR, UBTD1, LOC285375, DIP2C, PTPRN2, and CLCN4; BCOR, UBTD1, LOC285375, MGC16121, PTPRN2, and CLCN4; BCOR, UBTD1, RPS4Y2, PPAPDC1A, ITGAX, and DIP2C; BCOR, UBTD1, RPS4Y2, PPAPDC1A, ITGAX, and MGC16121; BCOR, UBTD1, RPS4Y2, PPAPDC1A, ITGAX, and PTPRN2; BCOR, UBTD1, RPS4Y2, PPAPDC1A, ITGAX, and CLCN4; BCOR, UBTD1, RPS4Y2, PPAPDC1A, DIP2C, and MGC16121; BCOR, UBTD1, RPS4Y2, PPAPDC1A, DIP2C, and PTPRN2; BCOR, UBTD1, RPS4Y2, PPAPDC1A, DIP2C, and CLCN4; BCOR, UBTD1, RPS4Y2, PPAPDC1A, MGC16121, and PTPRN2; BCOR, UBTD1, RPS4Y2, PPAPDC1A, MGC16121, and CLCN4; BCOR, UBTD1, RPS4Y2, PPAPDC1A, PTPRN2, and CLCN4; BCOR, UBTD1, RPS4Y2, ITGAX, DIP2C, and MGC16121; BCOR, UBTD1, RPS4Y2, ITGAX, DIP2C, and PTPRN2; BCOR, UBTD1, RPS4Y2, ITGAX, DIP2C, and CLCN4; BCOR, UBTD1, RPS4Y2, ITGAX, MGC16121, and PTPRN2; BCOR, UBTD1, RPS4Y2, ITGAX, MGC16121, and CLCN4; BCOR, UBTD1, RPS4Y2, ITGAX, PTPRN2, and CLCN4; BCOR, UBTD1, RPS4Y2, DIP2C, MGC16121, and PTPRN2; BCOR, UBTD1, RPS4Y2, DIP2C, MGC16121, and CLCN4; BCOR, UBTD1, RPS4Y2, DIP2C, PTPRN2, and CLCN4; BCOR, UBTD1, RPS4Y2, MGC16121, PTPRN2, and CLCN4; BCOR, UBTD1, PPAPDC1A, ITGAX, DIP2C, and MGC16121; BCOR, UBTD1, PPAPDC1A, ITGAX, DIP2C, and PTPRN2; BCOR, UBTD1, PPAPDC1A, ITGAX, DIP2C, and CLCN4; BCOR, UBTD1, PPAPDC1A, ITGAX, MGC16121, and PTPRN2; BCOR, UBTD1, PPAPDC1A, ITGAX, MGC16121, and CLCN4; BCOR, UBTD1, PPAPDC1A, ITGAX, PTPRN2, and CLCN4; BCOR, UBTD1, PPAPDC1A, DIP2C, MGC16121, and PTPRN2; BCOR, UBTD1, PPAPDC1A, DIP2C, MGC16121, and CLCN4; BCOR, UBTD1, PPAPDC1A, DIP2C, PTPRN2, and CLCN4; BCOR, UBTD1, PPAPDC1A, MGC16121, PTPRN2, and CLCN4; BCOR, UBTD1, ITGAX, DIP2C, MGC16121, and PTPRN2; BCOR, UBTD1, ITGAX, DIP2C, MGC16121, and CLCN4; BCOR, UBTD1, ITGAX, DIP2C, PTPRN2, and CLCN4; BCOR, UBTD1, ITGAX, MGC16121, PTPRN2, and CLCN4; BCOR, UBTD1, DIP2C, MGC16121, PTPRN2, and CLCN4; BCOR, LOC285375, RPS4Y2, PPAPDC1A, ITGAX, and DIP2C; BCOR, LOC285375, RPS4Y2, PPAPDC1A, ITGAX, and MGC16121; BCOR, LOC285375, RPS4Y2, PPAPDC1A, ITGAX, and PTPRN2; BCOR, LOC285375, RPS4Y2, PPAPDC1A, ITGAX, and CLCN4; BCOR, LOC285375, RPS4Y2, PPAPDC1A, DIP2C, and MGC16121; BCOR, LOC285375, RPS4Y2, PPAPDC1A, DIP2C, and PTPRN2; BCOR, LOC285375, RPS4Y2, PPAPDC1A, DIP2C, and CLCN4; BCOR, LOC285375, RPS4Y2, PPAPDC1A, MGC16121, and PTPRN2; BCOR, LOC285375, RPS4Y2, PPAPDC1A, MGC16121, and CLCN4; BCOR, LOC285375, RPS4Y2, PPAPDC1A, PTPRN2, and CLCN4; BCOR, LOC285375, RPS4Y2, ITGAX, DIP2C, and MGC16121; BCOR, LOC285375, RPS4Y2, ITGAX, DIP2C, and PTPRN2; BCOR, LOC285375, RPS4Y2, ITGAX, DIP2C, and CLCN4; BCOR, LOC285375, RPS4Y2, ITGAX, MGC16121, and PTPRN2; BCOR, LOC285375, RPS4Y2, ITGAX, MGC16121, and CLCN4; BCOR, LOC285375, RPS4Y2, ITGAX, PTPRN2, and CLCN4; BCOR, LOC285375, RPS4Y2, DIP2C, MGC16121, and PTPRN2; BCOR, LOC285375, RPS4Y2, DIP2C, MGC16121, and CLCN4; BCOR, LOC285375, RPS4Y2, DIP2C, PTPRN2, and CLCN4; BCOR, LOC285375, RPS4Y2, MGC16121, PTPRN2, and CLCN4; BCOR, LOC285375, PPAPDC1A, ITGAX, DIP2C, and MGC16121; BCOR, LOC285375, PPAPDC1A, ITGAX, DIP2C, and PTPRN2; BCOR, LOC285375, PPAPDC1A, ITGAX, DIP2C, and CLCN4; BCOR, LOC285375, PPAPDC1A, ITGAX, MGC16121, and PTPRN2; BCOR, LOC285375, PPAPDC1A, ITGAX, MGC16121, and CLCN4; BCOR, LOC285375, PPAPDC1A, ITGAX, PTPRN2, and CLCN4; BCOR, LOC285375, PPAPDC1A, DIP2C, MGC16121, and PTPRN2; BCOR, LOC285375, PPAPDC1A, DIP2C, MGC16121, and CLCN4; BCOR, LOC285375, PPAPDC1A, DIP2C, PTPRN2, and CLCN4; BCOR, LOC285375, PPAPDC1A, MGC16121, PTPRN2, and CLCN4; BCOR, LOC285375, ITGAX, DIP2C, MGC16121, and PTPRN2; BCOR, LOC285375, ITGAX, DIP2C, MGC16121, and CLCN4; BCOR, LOC285375, ITGAX, DIP2C, PTPRN2, and CLCN4; BCOR, LOC285375, ITGAX, MGC16121, PTPRN2, and CLCN4; BCOR, LOC285375, DIP2C, MGC16121, PTPRN2, and CLCN4; BCOR, RPS4Y2, PPAPDC1A, ITGAX, DIP2C, and MGC16121; BCOR, RPS4Y2, PPAPDC1A, ITGAX, DIP2C, and PTPRN2; BCOR, RPS4Y2, PPAPDC1A, ITGAX, DIP2C, and CLCN4; BCOR, RPS4Y2, PPAPDC1A, ITGAX, MGC16121, and PTPRN2; BCOR, RPS4Y2, PPAPDC1A, ITGAX, MGC16121, and CLCN4; BCOR, RPS4Y2, PPAPDC1A, ITGAX, PTPRN2, and CLCN4; BCOR, RPS4Y2, PPAPDC1A, DIP2C, MGC16121, and PTPRN2; BCOR, RPS4Y2, PPAPDC1A, DIP2C, MGC16121, and CLCN4; BCOR, RPS4Y2, PPAPDC1A, DIP2C, PTPRN2, and CLCN4; BCOR, RPS4Y2, PPAPDC1A, MGC16121, PTPRN2, and CLCN4; BCOR, RPS4Y2, ITGAX, DIP2C, MGC16121, and PTPRN2; BCOR, RPS4Y2, ITGAX, DIP2C, MGC16121, and CLCN4; BCOR, RPS4Y2, ITGAX, DIP2C, PTPRN2, and CLCN4; BCOR, RPS4Y2, ITGAX, MGC16121, PTPRN2, and CLCN4; BCOR, RPS4Y2, DIP2C, MGC16121, PTPRN2, and CLCN4; BCOR, PPAPDC1A, ITGAX, DIP2C, MGC16121, and PTPRN2; BCOR, PPAPDC1A, ITGAX, DIP2C, MGC16121, and CLCN4; BCOR, PPAPDC1A, ITGAX, DIP2C, PTPRN2, and CLCN4; BCOR, PPAPDC1A, ITGAX, MGC16121, PTPRN2, and CLCN4; BCOR, PPAPDC1A, DIP2C, MGC16121, PTPRN2, and CLCN4; BCOR, ITGAX, DIP2C, MGC16121, PTPRN2, and CLCN4; UBTD1, LOC285375, RPS4Y2, PPAPDC1A, ITGAX, and DIP2C; UBTD1, LOC285375, RPS4Y2, PPAPDC1A, ITGAX, and MGC16121; UBTD1, LOC285375, RPS4Y2, PPAPDC1A, ITGAX, and PTPRN2; UBTD1, LOC285375, RPS4Y2, PPAPDC1A, ITGAX, and CLCN4; UBTD1, LOC285375, RPS4Y2, PPAPDC1A, DIP2C, and MGC16121; UBTD1, LOC285375, RPS4Y2, PPAPDC1A, DIP2C, and PTPRN2; UBTD1, LOC285375, RPS4Y2, PPAPDC1A, DIP2C, and CLCN4; UBTD1, LOC285375, RPS4Y2, PPAPDC1A, MGC16121, and PTPRN2; UBTD1, LOC285375, RPS4Y2, PPAPDC1A, MGC16121, and CLCN4; UBTD1, LOC285375, RPS4Y2, PPAPDC1A, PTPRN2, and CLCN4; UBTD1, LOC285375, RPS4Y2, ITGAX, DIP2C, and MGC16121; UBTD1, LOC285375, RPS4Y2, ITGAX, DIP2C, and PTPRN2; UBTD1, LOC285375, RPS4Y2, ITGAX, DIP2C, and CLCN4; UBTD1, LOC285375, RPS4Y2, ITGAX, MGC16121, and PTPRN2; UBTD1, LOC285375, RPS4Y2, ITGAX, MGC16121, and CLCN4; UBTD1, LOC285375, RPS4Y2, ITGAX, PTPRN2, and CLCN4; UBTD1, LOC285375, RPS4Y2, DIP2C, MGC16121, and PTPRN2; UBTD1, LOC285375, RPS4Y2, DIP2C, MGC16121, and CLCN4; UBTD1, LOC285375, RPS4Y2, DIP2C, PTPRN2, and CLCN4; UBTD1, LOC285375, RPS4Y2, MGC16121, PTPRN2, and CLCN4; UBTD1, LOC285375, PPAPDC1A, ITGAX, DIP2C, and MGC16121; UBTD1, LOC285375, PPAPDC1A, ITGAX, DIP2C, and PTPRN2; UBTD1, LOC285375, PPAPDC1A, ITGAX, DIP2C, and CLCN4; UBTD1, LOC285375, PPAPDC1A, ITGAX, MGC16121, and PTPRN2; UBTD1, LOC285375, PPAPDC1A, ITGAX, MGC16121, and CLCN4; UBTD1, LOC285375, PPAPDC1A, ITGAX, PTPRN2, and CLCN4; UBTD1, LOC285375, PPAPDC1A, DIP2C, MGC16121, and PTPRN2; UBTD1, LOC285375, PPAPDC1A, DIP2C, MGC16121, and CLCN4; UBTD1, LOC285375, PPAPDC1A, DIP2C, PTPRN2, and CLCN4; UBTD1, LOC285375, PPAPDC1A, MGC16121, PTPRN2, and CLCN4; UBTD1, LOC285375, ITGAX, DIP2C, MGC16121, and PTPRN2; UBTD1, LOC285375, ITGAX, DIP2C, MGC16121, and CLCN4; UBTD1, LOC285375, ITGAX, DIP2C, PTPRN2, and CLCN4; UBTD1, LOC285375, ITGAX, MGC16121, PTPRN2, and CLCN4; UBTD1, LOC285375, DIP2C, MGC16121, PTPRN2, and CLCN4; UBTD1, RPS4Y2, PPAPDC1A, ITGAX, DIP2C, and MGC16121; UBTD1, RPS4Y2, PPAPDC1A, ITGAX, DIP2C, and PTPRN2; UBTD1, RPS4Y2, PPAPDC1A, ITGAX, DIP2C, and CLCN4; UBTD1, RPS4Y2, PPAPDC1A, ITGAX, MGC16121, and PTPRN2; UBTD1, RPS4Y2, PPAPDC1A, ITGAX, MGC16121, and CLCN4; UBTD1, RPS4Y2, PPAPDC1A, ITGAX, PTPRN2, and CLCN4; UBTD1, RPS4Y2, PPAPDC1A, DIP2C, MGC16121, and PTPRN2; UBTD1, RPS4Y2, PPAPDC1A, DIP2C, MGC16121, and CLCN4; UBTD1, RPS4Y2, PPAPDC1A, DIP2C, PTPRN2, and CLCN4; UBTD1, RPS4Y2, PPAPDC1A, MGC16121, PTPRN2, and CLCN4; UBTD1, RPS4Y2, ITGAX, DIP2C, MGC16121, and PTPRN2; UBTD1, RPS4Y2, ITGAX, DIP2C, MGC16121, and CLCN4; UBTD1, RPS4Y2, ITGAX, DIP2C, PTPRN2, and CLCN4; UBTD1, RPS4Y2, ITGAX, MGC16121, PTPRN2, and CLCN4; UBTD1, RPS4Y2, DIP2C, MGC16121, PTPRN2, and CLCN4; UBTD1, PPAPDC1A, ITGAX, DIP2C, MGC16121, and PTPRN2; UBTD1, PPAPDC1A, ITGAX, DIP2C, MGC16121, and CLCN4; UBTD1, PPAPDC1A, ITGAX, DIP2C, PTPRN2, and CLCN4; UBTD1, PPAPDC1A, ITGAX, MGC16121, PTPRN2, and CLCN4; UBTD1, PPAPDC1A, DIP2C, MGC16121, PTPRN2, C and LCN4; UBTD1, ITGAX, DIP2C, MGC16121, PTPRN2, and CLCN4; LOC285375, RPS4Y2, PPAPDC1A, ITGAX, DIP2C, and MGC16121; LOC285375, RPS4Y2, PPAPDC1A, ITGAX, DIP2C, and PTPRN2; LOC285375, RPS4Y2, PPAPDC1A, ITGAX, DIP2C, and CLCN4; LOC285375, RPS4Y2, PPAPDC1A, ITGAX, MGC16121, and PTPRN2; LOC285375, RPS4Y2, PPAPDC1A, ITGAX, MGC16121, and CLCN4; LOC285375, RPS4Y2, PPAPDC1A, ITGAX, PTPRN2, and CLCN4; LOC285375, RPS4Y2, PPAPDC1A, DIP2C, MGC16121, and PTPRN2; LOC285375, RPS4Y2, PPAPDC1A, DIP2C, MGC16121, and CLCN4; LOC285375, RPS4Y2, PPAPDC1A, DIP2C, PTPRN2, and CLCN4; LOC285375, RPS4Y2, PPAPDC1A, MGC16121, PTPRN2, and CLCN4; LOC285375, RPS4Y2, ITGAX, DIP2C, MGC16121, and PTPRN2; LOC285375, RPS4Y2, ITGAX, DIP2C, MGC16121, and CLCN4; LOC285375, RPS4Y2, ITGAX, DIP2C, PTPRN2, and CLCN4; LOC285375, RPS4Y2, ITGAX, MGC16121, PTPRN2, and CLCN4; LOC285375, RPS4Y2, DIP2C, MGC16121, PTPRN2, and CLCN4; LOC285375, PPAPDC1A, ITGAX, DIP2C, MGC16121, and PTPRN2; LOC285375, PPAPDC1A, ITGAX, DIP2C, MGC16121, C and LCN4; LOC285375, PPAPDC1A, ITGAX, DIP2C, PTPRN2, and CLCN4; LOC285375, PPAPDC1A, ITGAX, MGC16121, PTPRN2, and CLCN4; LOC285375, PPAPDC1A, DIP2C, MGC16121, PTPRN2, and CLCN4; LOC285375, ITGAX, DIP2C, MGC16121, PTPRN2, and CLCN4; RPS4Y2, PPAPDC1A, ITGAX, DIP2C, MGC16121, and PTPRN2; RPS4Y2, PPAPDC1A, ITGAX, DIP2C, MGC16121, and CLCN4; RPS4Y2, PPAPDC1A, ITGAX, DIP2C, PTPRN2, and CLCN4; RPS4Y2, PPAPDC1A, ITGAX, MGC16121, PTPRN2, and CLCN4; RPS4Y2, PPAPDC1A, DIP2C, MGC16121, PTPRN2, and CLCN4; RPS4Y2, ITGAX, DIP2C, MGC16121, PTPRN2, and CLCN4; and PPAPDC1A, ITGAX, DIP2C, MGC16121, PTPRN2, and CLCN4. In particular embodiments, the markers include BCOR, UBTD1, LOC285375, RPS4Y2, PPAPDC1A; BCOR, UBTD1, LOC285375, RPS4Y2, ITGAX; BCOR, UBTD1, LOC285375, RPS4Y2, DIP2C; BCOR, UBTD1, LOC285375, RPS4Y2, MGC16121; BCOR, UBTD1, LOC285375, RPS4Y2, PTPRN2; BCOR, UBTD1, LOC285375, RPS4Y2, CLCN4; BCOR, UBTD1, LOC285375, PPAPDC1A, ITGAX; BCOR, UBTD1, LOC285375, PPAPDC1A, DIP2C; BCOR, UBTD1, LOC285375, PPAPDC1A, MGC16121; BCOR, UBTD1, LOC285375, PPAPDC1A, PTPRN2; BCOR, UBTD1, LOC285375, PPAPDC1A, CLCN4; BCOR, UBTD1, LOC285375, ITGAX, DIP2C; BCOR, UBTD1, LOC285375, ITGAX, MGC16121; BCOR, UBTD1, LOC285375, ITGAX, PTPRN2; BCOR, UBTD1, LOC285375, ITGAX, CLCN4; BCOR, UBTD1, LOC285375, DIP2C, MGC16121; BCOR, UBTD1, LOC285375, DIP2C, PTPRN2; BCOR, UBTD1, LOC285375, DIP2C, CLCN4; BCOR, UBTD1, LOC285375, MGC16121, PTPRN2; BCOR, UBTD1, LOC285375, MGC16121, CLCN4; BCOR, UBTD1, LOC285375, PTPRN2, CLCN4; BCOR, UBTD1, RPS4Y2, PPAPDC1A, ITGAX; BCOR, UBTD1, RPS4Y2, PPAPDC1A, DIP2C; BCOR, UBTD1, RPS4Y2, PPAPDC1A, MGC16121; BCOR, UBTD1, RPS4Y2, PPAPDC1A, PTPRN2; BCOR, UBTD1, RPS4Y2, PPAPDC1A, CLCN4; BCOR, UBTD1, RPS4Y2, ITGAX, DIP2C; BCOR, UBTD1, RPS4Y2, ITGAX, MGC16121; BCOR, UBTD1, RPS4Y2, ITGAX, PTPRN2; BCOR, UBTD1, RPS4Y2, ITGAX, CLCN4; BCOR, UBTD1, RPS4Y2, DIP2C, MGC16121; BCOR, UBTD1, RPS4Y2, DIP2C, PTPRN2; BCOR, UBTD1, RPS4Y2, DIP2C, CLCN4; BCOR, UBTD1, RPS4Y2, MGC16121, PTPRN2; BCOR, UBTD1, RPS4Y2, MGC16121, CLCN4; BCOR, UBTD1, RPS4Y2, PTPRN2, CLCN4; BCOR, UBTD1, PPAPDC1A, ITGAX, DIP2C; BCOR, UBTD1, PPAPDC1A, ITGAX, MGC16121; BCOR, UBTD1, PPAPDC1A, ITGAX, PTPRN2; BCOR, UBTD1, PPAPDC1A, ITGAX, CLCN4; BCOR, UBTD1, PPAPDC1A, DIP2C, MGC16121; BCOR, UBTD1, PPAPDC1A, DIP2C, PTPRN2; BCOR, UBTD1, PPAPDC1A, DIP2C, CLCN4; BCOR, UBTD1, PPAPDC1A, MGC16121, PTPRN2; BCOR, UBTD1, PPAPDC1A, MGC16121, CLCN4; BCOR, UBTD1, PPAPDC1A, PTPRN2, CLCN4; BCOR, UBTD1, ITGAX, DIP2C, MGC16121; BCOR, UBTD1, ITGAX, DIP2C, PTPRN2; BCOR, UBTD1, ITGAX, DIP2C, CLCN4; BCOR, UBTD1, DIP2C, MGC16121, PTPRN2; BCOR, UBTD1, DIP2C, MGC16121, CLCN4; BCOR, UBTD1, DIP2C, PTPRN2, CLCN4; BCOR, UBTD1, MGC16121, PTPRN2, CLCN4; BCOR, LOC285375, RPS4Y2, PPAPDC1A, ITGAX; BCOR, LOC285375, RPS4Y2, PPAPDC1A, DIP2C; BCOR, LOC285375, RPS4Y2, PPAPDC1A, MGC16121; BCOR, LOC285375, RPS4Y2, PPAPDC1A, MGC16121; BCOR, LOC285375, RPS4Y2, PPAPDC1A, PTPRN2; BCOR, LOC285375, RPS4Y2, PPAPDC1A, PTPRN2; BCOR, LOC285375, RPS4Y2, PPAPDC1A, CLCN4; BCOR, LOC285375, RPS4Y2, PPAPDC1A, CLCN4; BCOR, LOC285375, RPS4Y2, ITGAX, DIP2C; BCOR, LOC285375, RPS4Y2, ITGAX, DIP2C; BCOR, LOC285375, RPS4Y2, ITGAX, MGC16121; BCOR, LOC285375, RPS4Y2, ITGAX, MGC16121; BCOR, LOC285375, RPS4Y2, ITGAX, PTPRN2; BCOR, LOC285375, RPS4Y2, ITGAX, PTPRN2; BCOR, LOC285375, RPS4Y2, ITGAX, CLCN4; BCOR, LOC285375, RPS4Y2, ITGAX, CLCN4; BCOR, LOC285375, RPS4Y2, DIP2C, MGC16121; BCOR, LOC285375, RPS4Y2, DIP2C, MGC16121; BCOR, LOC285375, RPS4Y2, DIP2C, PTPRN2; BCOR, LOC285375, RPS4Y2, DIP2C, PTPRN2; BCOR, LOC285375, RPS4Y2, DIP2C, CLCN4; BCOR, LOC285375, RPS4Y2, DIP2C, CLCN4; BCOR, LOC285375, RPS4Y2, MGC16121, PTPRN2; BCOR, LOC285375, RPS4Y2, MGC16121, PTPRN2; BCOR, LOC285375, RPS4Y2, MGC16121, CLCN4; BCOR, LOC285375, RPS4Y2, MGC16121, CLCN4; BCOR, LOC285375, RPS4Y2, PTPRN2, CLCN4; BCOR, LOC285375, RPS4Y2, PTPRN2, CLCN4; BCOR, LOC285375, PPAPDC1A, ITGAX, DIP2C; BCOR, LOC285375, PPAPDC1A, ITGAX, DIP2C; BCOR, LOC285375, PPAPDC1A, ITGAX, MGC16121; BCOR, LOC285375, PPAPDC1A, ITGAX, PTPRN2; BCOR, LOC285375, PPAPDC1A, ITGAX, CLCN4; BCOR, LOC285375, PPAPDC1A, DIP2C, MGC16121; BCOR, LOC285375, PPAPDC1A, DIP2C, MGC16121; BCOR, LOC285375, PPAPDC1A, DIP2C, PTPRN2; BCOR, LOC285375, PPAPDC1A, DIP2C, PTPRN2; BCOR, LOC285375, PPAPDC1A, DIP2C, CLCN4; BCOR, LOC285375, PPAPDC1A, DIP2C, CLCN4; BCOR, LOC285375, PPAPDC1A, MGC16121, PTPRN2; BCOR, LOC285375, PPAPDC1A, MGC16121, PTPRN2; BCOR, LOC285375, PPAPDC1A, MGC16121, CLCN4; BCOR, LOC285375, PPAPDC1A, MGC16121, CLCN4; BCOR, LOC285375, PPAPDC1A, PTPRN2, CLCN4; BCOR, LOC285375, ITGAX, DIP2C, MGC16121; BCOR, LOC285375, ITGAX, DIP2C, MGC16121; BCOR, LOC285375, ITGAX, DIP2C, PTPRN2; BCOR, LOC285375, ITGAX, DIP2C, PTPRN2; BCOR, LOC285375, ITGAX, DIP2C, CLCN4; BCOR, LOC285375, ITGAX, DIP2C, CLCN4; BCOR, LOC285375, ITGAX, MGC16121, PTPRN2; BCOR, LOC285375, ITGAX, MGC16121, PTPRN2; BCOR, LOC285375, ITGAX, MGC16121, CLCN4; BCOR, LOC285375, ITGAX, MGC16121, CLCN4; BCOR, LOC285375, ITGAX, PTPRN2, CLCN4; BCOR, LOC285375, ITGAX, PTPRN2, CLCN4; BCOR, LOC285375, DIP2C, MGC16121, PTPRN2; BCOR, LOC285375, DIP2C, MGC16121, PTPRN2; BCOR, LOC285375, DIP2C, MGC16121, CLCN4; BCOR, LOC285375, DIP2C, MGC16121, CLCN4; BCOR, LOC285375, DIP2C, PTPRN2, CLCN4; BCOR, LOC285375, DIP2C, PTPRN2, CLCN4; BCOR, LOC285375, MGC16121, PTPRN2, CLCN4; BCOR, LOC285375, MGC16121, PTPRN2, CLCN4; BCOR, RPS4Y2, PPAPDC1A, ITGAX, DIP2C; BCOR, RPS4Y2, PPAPDC1A, ITGAX, DIP2C; BCOR, RPS4Y2, PPAPDC1A, ITGAX, MGC16121; BCOR, RPS4Y2, PPAPDC1A, ITGAX, MGC16121; BCOR, RPS4Y2, PPAPDC1A, ITGAX, PTPRN2; BCOR, RPS4Y2, PPAPDC1A, ITGAX, PTPRN2; BCOR, RPS4Y2, PPAPDC1A, ITGAX, CLCN4; BCOR, RPS4Y2, PPAPDC1A, ITGAX, CLCN4; BCOR, RPS4Y2, PPAPDC1A, DIP2C, MGC16121; BCOR, RPS4Y2, PPAPDC1A, DIP2C, MGC16121; BCOR, RPS4Y2, PPAPDC1A, DIP2C, PTPRN2; BCOR, RPS4Y2, PPAPDC1A, DIP2C, PTPRN2; BCOR, RPS4Y2, PPAPDC1A, DIP2C, CLCN4; BCOR, RPS4Y2, PPAPDC1A, DIP2C, CLCN4; BCOR, RPS4Y2, PPAPDC1A, MGC16121, PTPRN2; BCOR, RPS4Y2, PPAPDC1A, MGC16121, PTPRN2; BCOR, RPS4Y2, PPAPDC1A, MGC16121, CLCN4; BCOR, RPS4Y2, PPAPDC1A, MGC16121, CLCN4; BCOR, RPS4Y2, PPAPDC1A, PTPRN2, CLCN4; BCOR, RPS4Y2, PPAPDC1A, PTPRN2, CLCN4; BCOR, RPS4Y2, ITGAX, DIP2C, MGC16121; BCOR, RPS4Y2, ITGAX, DIP2C, MGC16121; BCOR, RPS4Y2, ITGAX, DIP2C, PTPRN2; BCOR, RPS4Y2, ITGAX, DIP2C, PTPRN2; BCOR, RPS4Y2, ITGAX, DIP2C, CLCN4; BCOR, RPS4Y2, ITGAX, DIP2C, CLCN4; BCOR, RPS4Y2, ITGAX, MGC16121, PTPRN2; BCOR, RPS4Y2, ITGAX, MGC16121, PTPRN2; BCOR, RPS4Y2, ITGAX, MGC16121, CLCN4; BCOR, RPS4Y2, ITGAX, MGC16121, CLCN4; BCOR, RPS4Y2, ITGAX, PTPRN2, CLCN4; BCOR, RPS4Y2, ITGAX, PTPRN2, CLCN4; BCOR, RPS4Y2, DIP2C, MGC16121, PTPRN2; BCOR, RPS4Y2, DIP2C, MGC16121, PTPRN2; BCOR, RPS4Y2, DIP2C, MGC16121, CLCN4; BCOR, RPS4Y2, DIP2C, MGC16121, CLCN4; BCOR, RPS4Y2, DIP2C, PTPRN2, CLCN4; BCOR, RPS4Y2, DIP2C, PTPRN2, CLCN4; BCOR, RPS4Y2, MGC16121, PTPRN2, CLCN4; BCOR, RPS4Y2, MGC16121, PTPRN2, CLCN4; BCOR, PPAPDC1A, ITGAX, DIP2C, MGC16121; BCOR, PPAPDC1A, ITGAX, DIP2C, MGC16121; BCOR, PPAPDC1A, ITGAX, DIP2C, PTPRN2; BCOR, PPAPDC1A, ITGAX, DIP2C, PTPRN2; BCOR, PPAPDC1A, ITGAX, DIP2C, CLCN4; BCOR, PPAPDC1A, ITGAX, DIP2C, CLCN4; BCOR, PPAPDC1A, ITGAX, MGC16121, PTPRN2; BCOR, PPAPDC1A, ITGAX, MGC16121, PTPRN2; BCOR, PPAPDC1A, ITGAX, MGC16121, CLCN4; BCOR, PPAPDC1A, ITGAX, MGC16121, CLCN4; BCOR, PPAPDC1A, ITGAX, PTPRN2, CLCN4; BCOR, PPAPDC1A, ITGAX, PTPRN2, CLCN4; BCOR, PPAPDC1A, DIP2C, MGC16121, PTPRN2; BCOR, PPAPDC1A, DIP2C, MGC16121, CLCN4; BCOR, PPAPDC1A, DIP2C, PTPRN2, CLCN4; BCOR, PPAPDC1A, MGC16121, PTPRN2, CLCN4; BCOR, ITGAX, DIP2C, MGC16121, PTPRN2; BCOR, ITGAX, DIP2C, MGC16121, PTPRN2; BCOR, ITGAX, DIP2C, MGC16121, CLCN4; BCOR, ITGAX, DIP2C, MGC16121, CLCN4; BCOR, ITGAX, DIP2C, PTPRN2, CLCN4; BCOR, ITGAX, DIP2C, PTPRN2, CLCN4; BCOR, ITGAX, MGC16121, PTPRN2, CLCN4; BCOR, DIP2C, MGC16121, PTPRN2, CLCN4; BCOR, DIP2C, MGC16121, PTPRN2, CLCN4; UBTD1, LOC285375, RPS4Y2, PPAPDC1A, ITGAX; UBTD1, LOC285375, RPS4Y2, PPAPDC1A, ITGAX; UBTD1, LOC285375, RPS4Y2, PPAPDC1A, DIP2C; UBTD1, LOC285375, RPS4Y2, PPAPDC1A, MGC16121; UBTD1, LOC285375, RPS4Y2, PPAPDC1A, PTPRN2; UBTD1, LOC285375, RPS4Y2, PPAPDC1A, CLCN4; UBTD1, LOC285375, RPS4Y2, ITGAX, DIP2C; UBTD1, LOC285375, RPS4Y2, ITGAX, MGC16121; UBTD1, LOC285375, RPS4Y2, ITGAX, PTPRN2; UBTD1, LOC285375, RPS4Y2, ITGAX, CLCN4; UBTD1, LOC285375, RPS4Y2, DIP2C, MGC16121; UBTD1, LOC285375, RPS4Y2, DIP2C, PTPRN2; UBTD1, LOC285375, RPS4Y2, DIP2C, CLCN4; UBTD1, LOC285375, RPS4Y2, MGC16121, PTPRN2; UBTD1, LOC285375, RPS4Y2, MGC16121, CLCN4; UBTD1, LOC285375, RPS4Y2, PTPRN2, CLCN4; UBTD1, LOC285375, PPAPDC1A, ITGAX, DIP2C; UBTD1, LOC285375, PPAPDC1A, ITGAX, MGC16121; UBTD1, LOC285375, PPAPDC1A, ITGAX, PTPRN2; UBTD1, LOC285375, PPAPDC1A, ITGAX, CLCN4; UBTD1, LOC285375, PPAPDC1A, DIP2C, MGC16121; UBTD1, LOC285375, PPAPDC1A, DIP2C, PTPRN2; UBTD1, LOC285375, PPAPDC1A, DIP2C, CLCN4; UBTD1, LOC285375, PPAPDC1A, MGC16121, PTPRN2; UBTD1, LOC285375, PPAPDC1A, MGC16121, CLCN4; UBTD1, LOC285375, PPAPDC1A, PTPRN2, CLCN4; UBTD1, LOC285375, ITGAX, DIP2C, MGC16121; UBTD1, LOC285375, ITGAX, DIP2C, PTPRN2; UBTD1, LOC285375, ITGAX, DIP2C, CLCN4; UBTD1, LOC285375, ITGAX, MGC16121, PTPRN2; UBTD1, LOC285375, ITGAX, MGC16121, CLCN4; UBTD1, LOC285375, ITGAX, PTPRN2, CLCN4; UBTD1, LOC285375, DIP2C, MGC16121, PTPRN2; UBTD1, LOC285375, DIP2C, MGC16121, CLCN4; UBTD1, LOC285375, DIP2C, PTPRN2, CLCN4; UBTD1, LOC285375, MGC16121, PTPRN2, CLCN4; UBTD1, RPS4Y2, PPAPDC1A, ITGAX, DIP2C; UBTD1, RPS4Y2, PPAPDC1A, ITGAX, MGC16121; UBTD1, RPS4Y2, PPAPDC1A, ITGAX, PTPRN2; UBTD1, RPS4Y2, PPAPDC1A, ITGAX, CLCN4; UBTD1, RPS4Y2, PPAPDC1A, DIP2C, MGC16121; UBTD1, RPS4Y2, PPAPDC1A, DIP2C, PTPRN2; UBTD1, RPS4Y2, PPAPDC1A, DIP2C, CLCN4; UBTD1, RPS4Y2, PPAPDC1A, MGC16121, PTPRN2; UBTD1, RPS4Y2, PPAPDC1A, MGC16121, CLCN4; UBTD1, RPS4Y2, PPAPDC1A, PTPRN2, CLCN4; UBTD1, RPS4Y2, ITGAX, DIP2C, MGC16121; UBTD1, RPS4Y2, ITGAX, DIP2C, PTPRN2; UBTD1, RPS4Y2, ITGAX, DIP2C, CLCN4; UBTD1, RPS4Y2, ITGAX, MGC16121, PTPRN2; UBTD1, RPS4Y2, ITGAX, MGC16121, CLCN4; UBTD1, RPS4Y2, ITGAX, PTPRN2, CLCN4; UBTD1, RPS4Y2, DIP2C, MGC16121, PTPRN2; UBTD1, RPS4Y2, DIP2C, MGC16121, CLCN4; UBTD1, RPS4Y2, DIP2C, PTPRN2, CLCN4; UBTD1, RPS4Y2, MGC16121, PTPRN2, CLCN4; UBTD1, PPAPDC1A, ITGAX, DIP2C, MGC16121; UBTD1, PPAPDC1A, ITGAX, DIP2C, PTPRN2; UBTD1, PPAPDC1A, ITGAX, DIP2C, CLCN4; UBTD1, PPAPDC1A, ITGAX, MGC16121, PTPRN2; UBTD1, PPAPDC1A, ITGAX, MGC16121, CLCN4; UBTD1, PPAPDC1A, ITGAX, PTPRN2, CLCN4; UBTD1, PPAPDC1A, DIP2C, MGC16121, PTPRN2; UBTD1, PPAPDC1A, DIP2C, MGC16121, CLCN4; UBTD1, PPAPDC1A, DIP2C, PTPRN2, CLCN4; UBTD1, PPAPDC1A, MGC16121, PTPRN2, CLCN4; UBTD1, ITGAX, DIP2C, MGC16121, PTPRN2; UBTD1, ITGAX, DIP2C, MGC16121, CLCN4; UBTD1, ITGAX, DIP2C, PTPRN2, CLCN4; or UBTD1, DIP2C, MGC16121, PTPRN2, CLCN4.

[0053] In particular embodiments, the markers include RAP1GAP2, UBTD1, MAMLD1, and C8orf75. In particular embodiments, the markers include UBTD1, MAMLD1, and C8orf75. In particular embodiments, the markers include RAP1GAP2, MAMLD1, and C8orf75. In particular embodiments, the markers include RAP1GAP2, UBTD1, and C8orf75. In particular embodiments, the markers include RAP1GAP2, UBTD1, and MAMLD1.

[0054] In other embodiments, the markers include BCOR in combination with two, three, or four markers selected from: PTPRN2, TUBA3D, PDE9A, and LOC284412; PTPRN2 in combination with two, three, or four markers selected from: BCOR, TUBA3D, PDE9A, and LOC284412; TUBA3D in combination with two, three, or four markers selected from: BCOR, PTPRN2, PDE9A, and LOC284412; PDE9A in combination with two, three, or four markers selected from: BCOR, PTPRN2, TUBA3D, and LOC284412; or LOC284412 in combination with two, three, or four markers selected from: BCOR, PTPRN2, TUBA3D, and PDE9A.

[0055] In other embodiments, the markers include GPM6B in combination with two or three markers selected from: NDUFA10, PDE9A, and LOC284412; NDUFA10 in combination with two or three markers selected from: GPM6B, PDE9A, and LOC284412; PDE9A in combination with two or three markers selected from: GPM6B, NDUFA10, and LOC284412; and LOC284412in combination with two or three markers selected from: GPM6B, NDUFA10, and PDE9A.

[0056] In other embodiments, the markers include BCOR in combination with two, three, four, five, six, seven, eight or nine markers selected from: UBTD1, LOC285375, RPS4Y2, PPAPDC1A, ITGAX, DIP2C, MGC16121, PTPRN2, and CLCN4; UBTD1 in combination with two, three, four, five, six, seven, eight or nine markers selected from: BCOR, LOC285375, RPS4Y2, PPAPDC1A, ITGAX, DIP2C, MGC16121, PTPRN2, and CLCN4; LOC285375 in combination with two, three, four, five, six, seven, eight or nine markers selected from: BCOR, UBTD1, RPS4Y2, PPAPDC1A, ITGAX, DIP2C, MGC16121, PTPRN2, and CLCN4; RPS4Y2 in combination with two, three, four, five, six, seven, eight or nine markers selected from: BCOR, UBTD1, LOC285375, PPAPDC1A, ITGAX, DIP2C, MGC16121, PTPRN2, and CLCN4; PPAPDC1A in combination with two, three, four, five, six, seven, eight or nine markers selected from: BCOR, UBTD1, LOC285375, RPS4Y2, ITGAX, DIP2C, MGC16121, PTPRN2, and CLCN4; ITGAX in combination with two, three, four, five, six, seven, eight or nine markers selected from: BCOR, UBTD1, LOC285375, RPS4Y2, PPAPDC1A, DIP2C, MGC16121, PTPRN2, and CLCN4; DIP2C in combination with two, three, four, five, six, seven, eight or nine markers selected from: BCOR, UBTD1, LOC285375, RPS4Y2, PPAPDC1A, ITGAX, MGC16121, PTPRN2, and CLCN4; MGC16121 in combination with two, three, four, five, six, seven, eight or nine markers selected from: BCOR, UBTD1, LOC285375, RPS4Y2, PPAPDC1A, ITGAX, DIP2C, PTPRN2, and CLCN4; PTPRN2 in combination with two, three, four, five, six, seven, eight or nine markers selected from: BCOR, UBTD1, LOC285375, RPS4Y2, PPAPDC1A, ITGAX, DIP2C, MGC16121, and CLCN4; or CLCN4 in combination with two, three, four, five, six, seven, eight or nine markers selected from: BCOR, UBTD1, LOC285375, RPS4Y2, PPAPDC1A, ITGAX, DIP2C, MGC16121, and PTPRN2.

[0057] In other embodiments, the markers include RAP1GAP2 in combination with two, three, four, five, six, seven, eight or nine markers selected from:, UBTD1, MAMLD1, and C8orf75; UBTD1 in combination with two, three, four, five, six, seven, eight or nine markers selected from: RAP1GAP2, MAMLD1, and C8orf75; MAMLD1 in combination with two, three, four, five, six, seven, eight or nine markers selected from: RAP1GAP2, UBTD1, and C8orf75; or C8orf75 in combination with two, three, four, five, six, seven, eight or nine markers selected from: RAP1GAP2, UBTD1, and MAMLD1.

[0058] In other embodiments, the markers exclude BCOR. In other embodiments, the markers exclude C8orf75. In other embodiments, the markers exclude CLCN4. In other embodiments, the markers exclude DIP2C. In other embodiments, the markers exclude GPM6B. In other embodiments, the markers exclude ITGAX. In other embodiments, the markers exclude LOC284412. In other embodiments, the markers exclude LOC285375. In other embodiments, the markers exclude MAMLD1. In other embodiments, the markers exclude MGC16121. In other embodiments, the markers exclude NDUFA10. In other embodiments, the markers exclude one or more of PDE9A. In other embodiments, the markers exclude PPAPDC1A. In other embodiments, the markers exclude PTPRN2. In other embodiments, the markers exclude RAP1GAP2. In other embodiments, the markers exclude RPS4Y2. In other embodiments, the markers exclude TUBA3D. In other embodiments, the markers exclude UBTD1.

[0059] As is understood by one of ordinary skill in the art, various methods of statistical analysis can be employed to identify cytosine methylation loci for use in the systems and methods disclosed herein.

[0060] In one embodiment, logistic regression analysis is used. Logistic regression analysis can lead to identification of the significant independent predictors among a number of possible predictors (e.g. methylation loci) known to be associated with increased risk of autism. Cytosine methylation levels at different loci can be used by themselves or in combination with other known risk predictors such as prenatal exposure to toxins (e.g. alcohol or maternal smoking, maternal diabetes, and family history). The probability that a subject has autism can be derived from the probability equation based on the logistic regression:

$${P}_{autism} = \frac{1}{1 + {e}^{- ( {α}_{1} {x}_{1} + {α}_{2} {x}_{2} + {α}_{3} {x}_{3} + … + {α}_{n} {x}_{n} )}}$$

where x refers to the magnitude or quantity of a particular predictor (e.g. methylation level at a particular locus) and a refers to the magnitude of change in the probability of the outcome (autism) for each unit change in the level of the particular predictor (x). The a values are derived from multivariable logistic regression analysis in a large population of affected and unaffected subjects. Values for x₁, x₂, x₃, . . . , xₙ, representing in this instance methylation percentage at different cytosine locI are derived from the subject being tested. Based on these values, a subject's probability of having a type of autism can be quantitatively estimated. Probability thresholds are used to define a high risk or low risk of autism. For example, if Pₐᵤₜᵢₛₘ≥1/100, the subject may be identified as being at high risk for autism, which may trigger further evaluation using, for example, any one or more of the following: CARS, ADOS-2, GARS-2, and ADI-R). Conversely, if Pₐᵤₜᵢₛₘ<1/200 or Pₐᵤₜᵢₛₘ<1/300, the subject may be identified as being at low risk for autism, and would require no further follow-up. The thresholds used can be based on the diagnostic sensitivity (number of autism cases correctly identified) and specificity (number of non-autism cases correctly identified as normal), as well as other factors considered clinically desirable, balanced by the risk and the medical cost of further interventions, such as assessments (psychological and otherwise) related to a designation of a subject as being at “high risk” for autism. Logistic regression analysis is well known as a method in disease screening for estimating a subject's risk for having a disorder. (Royston & Thompson, Stat. Med. 1992; 11:257-68.)

[0061] In another embodiment, a subject's risk of autism can also be calculated by using methylation percentages (reported as β-coefficients) at the individual discriminating cytosine locus by themselves or using different combinations of loci based on the method of overlapping Gaussian distribution or multivariate Gaussian distribution where the variable would be methylation level/percentage methylation at a particular (or multiple) loci. (See Wald, et al., BMJ 1988, 297, 883-887). Alternatively if methylation percentages or β-coefficients are not normally distributed (i.e. non-Gaussian), normal Gaussian distribution would be achieved if necessary by logarithmic transformation of these percentages.

[0062] For example, two Gaussian distribution curves are derived for methylation at particular loci in the autism and the normal populations. Mean, standard deviation (SD) and the degree of overlap between the two curves are then calculated. The ratio of the heights of the distribution curves at a given level of methylation will give the likelihood ratio or factor by which the risk of having autism is increased (or decreased) at a particular level of methylation at a given locus. The likelihood ratio (LR) value can be multiplied by the background risk of autism (or for a particular type of autism) in the general population and thus give a subject's risk of autism based on methylation level at the CG site(s) chosen. Information on the background population risk of autism in the newborn population is available from several sources. (See, for example, Hoffman, et al., Am. Heart J. 2004; 147:425-439). Similar information is available for prenatal and later postnatal life.

[0063] In a further embodiment, evolutionary computing can be used. Evolutionary computation methods are tools for predicting outcomes from a complex, large volume of data. Evolutionary computation includes a number of approaches such as genetic algorithms. This is widely utilized for problem solving and uses the three principles of natural evolution: selection, mutation, and recombination. (Penza-Reyes, et al., Artif. Intell. Med. 2000; 19:1-23; Whitley, Info Software Tech 2001; 43:87-31). Applications extend from chemistry, economics, engineering, and pharmaceuticals to metabolomics. The acute challenge of analyzing the vast volumes of data generated from new analytic platforms such as metabolomics has been outlined. (Goodcare, J. Exp. Bot. 2005; 56:245-54). As an example, the analysis of 250 biochemical markers (a plausible number of data points per subject in epigenetic analysis) was used to discriminate plants resistant to drought from normal control plants. A complete search to determine whether or not a particular metabolite would be included in the model would require 2²⁵⁰ or 1.8×10⁷⁵ computations. An ultrafast computer would require more than an estimated 3×10⁶² years to perform the required computations. Evolutionary computation is an automated method for providing a good solution for predicting the outcome from a large mass of data in a much shorter time.

[0064] Evolutionary computation selects ‘chromosomes’ (which is a string or a combination of different metabolites and their concentrations) that are optimally suited to ‘survive’ (i.e., predict the outcome of interest). Each predictor variable (e.g. metabolite) represents a ‘gene’ on this ‘chromosome’ string. The fitness to survive of each chromosome is a numerical value from 0 to 1, assigned by the computer program. ‘Fitness’ indicates how well this combination of parameters ensures evolutionary survival. (Goodcare, J. Exp. Bot. 2005, 56:245-54).

[0065] The combination of the ‘chromosome’ and the ‘fitness’ represents an ‘individual’. (Miranda, et al., Elec. Power Energ. Sys. 1998, 20:89-98). A population of such ‘individuals’ represents the ‘first generation’ of the organisms. The ‘individuals’ are ranked according to their fitness. This begins the evolutionary process. The selection operator creates the next generation by choosing the fittest individuals from the first generation which have the best chance of ‘survival’ i.e. predicting the outcome of interest. New second generation individuals are created by crossover with random rearrangement of segments of the ‘chromosome’ i.e. a change in a ‘chromosome’ segment with its string of constituent predictors (metabolite biomarkers) which form the sequence of ‘genes’. Finally, ‘mutation’ is produced where changes are introduced in an individual. Mutations could be either changes in constituent predictors or input variables (metabolite markers) with or without any change in their numerical values (concentrations).

[0066] Thus genetic algorithms take high performing ‘individuals’ and selects, ‘mutates’ and ‘recombines’ them with other high fitness or high performing ‘individuals’ to eventually achieve the optimal combination of ‘genes’ or input predictors on the ‘chromosome’ that will predict the outcome of interest. The similarities to the well-recognized principles of evolution are apparent. Evolutionary computing, including genetic algorithms, produces progressively better solutions to the problem through continuous reevaluation and adjustment. (Penza-Reyes & Sipper, Artif. Intell. Med. 2000, 19:1-23). The process identifies key components, and patterns form a large data set to achieve the highest predictive accuracy. The process is rapid, automated, and does not require any statistical or other assumptions about the input variables or outcomes of interest. It is unaffected by missing data, impervious to background noise, and does not require parametric distribution. Overall it is said to be superior to regression analyses and neural networks and equally handles both small and extremely large data sets. Given the large number of methylation sites analyzed, 450,000/subject DNA sample and the relatively small number of cases of autism, Genetic Programming, a branch of evolutionary computing, was the primary method of data analysis. The Gmax computer program version 11.09.23 (www.thegmax.com) was used for evolutionary computing analysis.

[0067] In additional embodiments when more than one marker is assayed, values of the detected markers can be calculated into a score. Each value can be weighted evenly within an algorithm generating a score, or the values for particular markers can be weighted more heavily in reaching the score. For example, markers with higher sensitivity and/or specificity scores could be weighted more heavily than markers with lower sensitivity and/or specificity scores. For example, marker values for diagnosing autism may be weighted as follows (i) (from highest weight to lowest weight): BCOR; PTPRN2; PDE9A; TUBA3D; LOC284412; (ii) (from highest weight to lowest weight): PDE9A; LOC284412; GPM6B; NDUFA10; (iii) (from highest weight to lowest weight): RPS4Y2; BCOR; UBTD1; PPAPDC1A; LOC285375; ITGAX; MGC16121; PTPRN2; CLCN4; D1P2C; or (iv) (from highest weight to lowest weight): UBTD1; RAP1GAP2; MAMLD1; C8orf75.

[0068] Markers may also be grouped into classes, and each class given a weighted score. For example, marker values for diagnosing autism may be grouped into classes and weighted as follows (from highest weight to lowest weight): Class 1: BCOR; PDE9A; UBTD1; RPS4Y2; Class 2: PTPRN2; LOC284412; RAP1GAP2; PPAPDC1A; LOC285375; Class 3: TUBA3D; GPM6B; MAMLD1; ITGAX; MGC16121; and Class 4: NDUFA10; C8orf75; CLCN4; and D1P2C.

[0069] Particular embodiments also include the following groups of markers presented in Tables 1-4 with associated percent contribution margins.

TABLE 1
Class 1 Cytosine Markers for Predicting and/or Diagnosing Autism
and their relative contribution margin.

| Locus | Gene Symbol | Chromosome | Contribution Margin (%) |
|---|---|---|---|
| cg03161453 | BCOR | X | 40 |
| cg15935227 | PTPRN2 | 7 | 20 |
| cg21639922 | PDE9A | 21 | 20 |
| cg18757828 | TUBA3D | 2 | 13.33 |
| cg04227007 | LOC284412 | 19 | 6.67 |

TABLE 2
Class 2 Cytosine Markers for Predicting and/or Diagnosing Autism
and their relative contribution margin.

| Locus | Gene Symbol | Chromosome | Contribution Margin (%) |
|---|---|---|---|
| cg21639922 | PDE9A | 21 | 38.24 |
| cg04227007 | LOC284412 | 19 | 23.53 |
| cg10479459 | GPM6B | X | 20.59 |
| cg05023192 | NDUFA10 | 2 | 17.65 |

TABLE 3
Class 3 Cytosine Markers for Predicting and/or Diagnosing Autism
and their relative contribution margin.

| Locus | Gene Symbol | Chromosome | Contribution Margin (%) |
|---|---|---|---|
| cg17741448 | RPS4Y2 | Y | 14.63 |
| cg04751297 | BCOR | X | 12.2 |
| cg10989317 | UBTD1 | 10 | 12.2 |
| cg10954330 | PPAPDC1A | 10 | 12.2 |
| cg20187719 | LOC285375 | 3 | 9.76 |
| cg04845171 | ITGAX | 16 | 9.76 |
| cg07283407 | MGC16121 | X | 9.26 |
| cg05175762 | PTPRN2 | 7 | 7.32 |
| cg00140189 | CLCN4 | X | 7.32 |
| cg01244571 | D1P2C | 10 | 4.88 |

TABLE 4
Class 4 Cytosine Markers for Predicting and/or Diagnosing Autism
and their relative contribution margin.

| Locus | Gene Symbol | Chromosome | Contribution Margin (%) |
|---|---|---|---|
| cg10989317 | UBTD1 | 10 | 48.78 |
| cg05932517 | RAP1GAP2 | 17 | 36.59 |
| cg16440909 | MAMLD1 | X | 12.2 |
| cg21297996 | C8orf75 | 8 | 2.44 |

[0070] Any marker or class of markers can be included in a particular value calculation. For example, in particular embodiments, Class 4 is included. In particular embodiments, Class 3 is included. In particular embodiments, Class 2 is included. In particular embodiments, Class 1 is included. In further embodiments, groups of classes can be included, for example, Classes 1 and 4; 1 and 3; 1 and 2; 4 and 3; 4 and 2; 3 and 2; etc.

[0071] Up- or down-regulation of the markers, as indicated elsewhere herein, for particular markers can be assessed by comparing a value to a relevant reference level. For example, the quantity of one or more markers can be indicated as a value. The value can be one or more numerical values resulting from the assaying of a sample, and can be derived, e.g., by measuring level(s) of the marker(s) in the sample by an assay, or from a dataset obtained from a provider such as a laboratory, or from a dataset stored on a server.

[0072] In the broadest sense, the value may be qualitative or quantitative. As such, where detection is qualitative, the systems and methods provide a reading or evaluation, e.g., assessment, of whether or not the marker is present in the sample being assayed. In further embodiments, the systems and methods provide a quantitative detection of whether the marker is present in the sample being assayed, i.e., an evaluation or assessment of the actual amount or relative abundance of the marker in the sample being assayed. In such embodiments, the quantitative detection may be absolute or relative, if the method is a method of detecting two or more different markers in a sample. As such, the term “quantifying” when used in the context of quantifying a marker in a sample can refer to absolute or to relative quantification. Absolute quantification can be accomplished by inclusion of known concentration(s) of one or more control markers and referencing, e.g., normalizing, the detected level of the marker with the known control markers (e.g., through generation of a standard curve). Alternatively, relative quantification can be accomplished by comparison of detected levels or amounts between two or more different markers to provide a relative quantification of each of the two or more markers, e.g., relative to each other. The actual measurement of values of the markers can be determined at the protein or nucleic acid level using any method known in the art.

[0073] As stated previously, obtained marker values can be compared to one or more reference levels. Reference levels can be obtained from one or more relevant datasets. A “dataset” as used herein is a set of numerical values resulting from evaluation of a sample (or population of samples) under a desired condition. The values of the dataset can be obtained, for example, by experimentally obtaining measures from sample(s) and constructing a dataset from these measurements. As is understood by one of ordinary skill in the art, the reference level can be based on e.g., any mathematical or statistical formula useful and known in the art for arriving at a meaningful aggregate reference level from a collection of individual datapoints; e.g., mean, median, median of the mean, etc. Alternatively, a reference level or dataset to create a reference level can be obtained from a service provider such as a laboratory, or from a database or a server on which the dataset has been stored.

[0074] A reference level from a dataset can be derived from previous measures derived from a population. A “population” is any grouping of subjects or samples of like specified characteristics. The grouping could be according to, for example, clinical parameters, clinical assessments, therapeutic regimens, disease status, severity of condition, etc.

[0075] In particular embodiments, conclusions are drawn based on whether a sample value is statistically significantly different or not statistically significantly different from a reference level. A measure is not statistically significantly different if the difference is within a level that would be expected to occur based on chance alone. In contrast, a statistically significant difference is one that is greater than what would be expected to occur by chance alone. Statistical significance or lack thereof can be determined by any of various methods well-known in the art. An example of a commonly used measure of statistical significance is the p-value. The p-value represents the probability of obtaining a given result equivalent to a particular datapoint, where the datapoint is the result of random chance alone. A result is often considered significant (not random chance) at a p-value less than 0.05.

[0076] In particular embodiments, values obtained based on the markers and/or other dataset components can be subjected to an analytic process with chosen parameters. The parameters of the analytic process may be those disclosed herein or those derived using the guidelines described herein. The analytic process used to generate a result may be any type of process capable of providing a result useful for classifying a sample, for example, comparison of the obtained value with a reference level, a linear algorithm, a quadratic algorithm, a decision tree algorithm, or a voting algorithm. The analytic process may set a threshold for determining the probability that a sample belongs to a given class. The probability preferably is at least 60%, at least 70%, at least 80%, at least 90%, at least 95% or higher.

[0077] The receiver operating characteristics (ROC) curve is a graph plotting sensitivity, which is defined in this setting as the percentage of autism cases with a positive test or abnormal cytosine methylation levels at a particular cytosine locus on the Y axis and false positive rate (1-specificity), i.e. the number of normal non-autism cases with abnormal cytosine methylation at the same locus on the X-axis. Specificity is defined as the percentage of normal cases with normal methylation levels at the locus of interest or a negative test. False positive rate refers to the percentage of normal subjects falsely found to have a positive test (i.e. abnormal methylation levels).

[0078] The area under the ROC curves (AUC) indicates the accuracy of the test in identifying normal from abnormal cases (Hanley & McNeil, Radiology 1982; 143:29-36).The AUC is the area under the ROC plot from the curve to the diagonal line from the point of intersection of the X- and Y-axes and with an angle of incline of 45°. The higher the area under the receiver operating characteristics (ROC) curve, the greater the accuracy of the test in predicting the condition of interest. An area ROC=1.0 indicates a perfect test, which is positive in all cases with the disorder and negative in all normal cases without the disorder.

[0079] In various embodiments, the values can be measured using methylation assays. “Methylation assay” refers to an assay, a large number of which are commercially available, for distinguishing methylated versus unmethylated cytosine loci in DNA. Commonly used techniques for measuring cytosine methylation include bisulfite-based methylation assays. The addition of bisulfite to DNA results in the methylation of the cytosine (i.e. addition of an extra carbon atom to position #5 of the hexagonal ring structure of the cytosine nucleotide) and its ultimate conversion to the nucleotide uracil. Uracil has similar binding properties to thiamine in the DNA sequence. Previously methylated cytosine does not undergo similar chemical conversion on exposure to bisulfite. Bisulfite assays can thus be used to discriminate previously methylated versus unmethylated cytosine.

[0080] Quantitative methylation assays include combined bisulfite and restriction analysis COBRA, which uses methylation sensitive restriction endonuclease, gel electrophoresis, and detection based on labeled hybridization probes. (Ziong and Laird, Nucleic Acid Res. 1997 25; 2532-4). Another exemplary assay is the methylation specific polymerase chain reaction PCR (MSPCR) for amplification of DNA segments of interest. This assay is performed after sodium bisulfite conversion of cytosine and uses methylation sensitive probes. Other methods include the Quantitative Methylation (QM) assay, which combines PCR amplification with fluorescent probes designed to bind to putative methylation sites; MethyLight™ (Qiagen, Redwood City, Calif.) a quantitative methylation assay that uses fluorescence based PCR (Eads, et al., Cancer Res. 1999; 59:2302-2306); and Ms-SNuPE, a quantitative technique for determining differences in methylation levels in CpG sites. As with other techniques, Ms-SNuPE also requires bisulfite treatment to be performed first, leading to the conversion of unmethylated cytosine to uracil while methyl cytosine is unaffected. PCR primers specific for bisulfite converted DNA are used to amplify the target sequence of interest. The amplified PCR product is isolated and used to quantitate the methylation status of the CpG site of interest. (Gonzalgo and Jones Nuclei Acids Res 1997; 25:252-31).

[0081] In specific embodiments, the ILLUMINA INFINIUM® (flumina, Inc., San Diego Calif., USA) Human Methylation 450 Beadchip assay is used. The Illumina assay can be used for genome wide quantitative methylation profiling. In various embodiments, genomic DNA can be extracted from cells, such as those from archived blood spot. Using techniques known to those of skill in the art, the genomic DNA can be isolated using commercial kits. Proteins and other contaminants can be removed from the DNA using proteinase K. The DNA can then be removed from the solution using available methods such as organic extraction, salting out, or binding the DNA to a solid phase support. As described above, and in the INFINIUM® Assay Methylation Protocol Guide, the DNA can be treated with sodium bisulfite, which converts unmethylated cytosine to uracil, while the methylated cytosine remains unchanged. The bisulfite converted DNA can then be denatured and neutralized. The denatured DNA can then be amplified. The next step uses enzymatic means to fragment the DNA. The fragmented DNA can then be precipitated using isopropanol and separated by centrifugation. The separated DNA can next be suspended in a hybridization buffer. The fragmented DNA can then be hybridized to beads that have been covalently limited to 50mer nucleotide segments at a locus specific to the cytosine nucleotide of interest in the genome. There are a total of over 500,000 bead types specifically designed to anneal to the locus where the particular cytosine is located. The beads are bound to silicon based arrays. There are two bead types designed for each locus, one bead type represents a probe that is designed to match to the methylated locus at which the cytosine nucleotide will remain unchanged. The other bead type corresponds to an initially unmethylated cytosine, which after sodium bisulfite treatment, is converted to uracil and ultimately a thiamine nuleotide. Unhybridized DNA (DNA not annealed to the beads) is washed away leaving only DNA segments bound to the appropriate bead and containing the cytosine of interest. If the cytosine of interest was unmethylated prior to the sodium bisulfite treatment, then it will match with the unmethylated or “U” bead probe. This enables single base extensions with fluorescent labeled nucleotide probes and generate fluorescent signals for that bead probe that can be read in an automated fashion. If the cytosine is methylated, single base mismatch will occur with the “U” bead probe oligomer. No further nucleotide extension on the bead oligomer occurs, thus preventing incorporation of the fluorescent tagged nucleotides on the bead. This will lead to low fluorescent signal from the “U” bead. The reverse will happen on the “M” or methylated bead probe.

[0082] Lasers are then used to stimulate the fluorophore bound to the single-base used for the sequence extension. The level of methylation at each cytosine locus is determined by the intensity of the fluorescence from the methylated compared to the unmethylated bead. Cytosine methylation level is expressed as “β” which is the ratio of the methylated-bead probe signal to total signal intensity at that cytosine locus. These techniques for determining cytosine methylation have been previously described and are widely available for commercial use.

[0083] Reliable identification of specific cytosine loci distributed throughout the genome has been detailed in the document “CpG Loci Identification. A guide to Ilumina's method for unambiguous CpG loci identification and tracking for the GOLDENGATE® and Infinium™ assays for Methylation”. (www.illumnia.com). Briefly, Illumina has developed a CpG locus identifier that designates cytosine loci based on the actual or contextual sequence of nucleotides in which the cytosine is located. It uses a similar strategy as used by NCBI's re SNP IPS (rs#) and is based on the sequence flanking the cytosine of interest. Thus a unique CpG locus cluster ID number is assigned to each of the cytosine undergoing evaluation. The system is reported to be consistent and will not be affected by changes in public databases and genome assemblies. Flanking sequences of 60 bases 5′ and 3′ to the CG locus (i.e. a total of 122 base sequences) is used to identify the locus. Thus a unique “CpG cluster number” or cg# is assigned to the sequence of 122 bp which contains the CpG of interest. Thus, only if the 122 bp in the CpG cluster is identical is there a risk of a locus being assigned the same number and being located in more than one position in the genome. Three separate criteria are utilized to track individual CpG locus based on this unique ID system, chromosome number, genomic coordinate, and genome build. The lesser of the two coordinates “C” or “G” in CpG is used in the unique CG loci identification. The CG locus is also designated in relation to the first ‘unambiguous” pair of nucleotides containing either an ‘A’ or ‘T’. If one of these nucleotides is 5′ to the CG then the arrangement is designated TOP and if such a nucleotide is 3′ it is designate BOT.

[0084] In addition, the forward or reverse DNA strand is indicated as being the location of the cytosine being evaluated. The assumption is made that methylation status of cytosine bases within the specific chromosome region is synchronized (Eckhart, et al., Nat. Gent. 2006, 38:1379-85).

[0085] Described herein are methods of using methylation technique to cover up to 99% of Ref Seq genes involving 16,000 genes and 500,000 cytosine nucleotides down to the single nucleotide level, throughout the genome. In various methods, the frequency of cytosine methylation of single nucleotides in a group of autism cases compared to controls is used to estimate the risk or probability of autism. The cytosine nucleotides analyzed using this technique included cytosines within CpG islands and those at further distances outside of the CpG islands i.e. located in “CpG shores” and “CpG shelves” and even more distantly located from the island so called “seas”.

[0086] DNA methylation is associated with altered gene expression and protein expression. It has been shown that DNA methylation leads to gene silencing. (Phillips et al., Nature Education 2008; 1(1):116; Hunter et al., Investigative Ophthalmology & Visual Science 2012; 53(4):2089).

[0087] Also described herein are methods of predicting autism and/or diagnosing autism using the measurement of mRNA levels transcribed by genes with altered cytosine methylation. Abnormal expression of mRNA transcribed from differentially methylated CG sites in genes and/or DNA sequences can also be used to predict and/or diagnose autism. In various embodiments, the measurement of RNA from related genes or genomic sequence levels using cells, tissues, and/or body fluids of subjects can be used to predict and/or diagnose autism. Any of the currently available techniques for determining expression levels of mRNA including Northern blot analysis, fluorescent in situ hybridization (FISH), RNase protection assays (RPA), microarrays, PCR-based, or other technologies for measuring RNA levels can be used.

[0088] Additionally, protein products of genes that are up- or down-regulated can be measured to assess cytosine methylation levels. Proteins translated from mRNA reflect the same phenomenon of altered gene function related to changes in cytosine methylation. Therefore, protein expression could also be used for the prediction and/or diagnosis of autism.

[0089] “Up-regulation” or “up-regulated” refers to an increase in the presence of a protein and/or an increase in the expression of the related gene. “Down-regulation” or “down-regulated” refers to a decrease in the presence of a protein and/or a decrease in the expression of the related gene. The “related gene” in reference to a particular protein refers to a nucleic acid sequence (used interchangeably with polynucleotide or nucleotide sequence) that encodes the particular protein. This definition also includes various sequence polymorphisms, mutations, and/or sequence variants wherein such alterations do not substantially affect the identity or function of the particular protein. For example, in a sequence identity analysis, the protein would share at least 80% sequence identity; at least 81% sequence identity; at least 82% sequence identity; at least 83% sequence identity; at least 84% sequence identity; at least 85% sequence identity; at least 86% sequence identity; at least 87% sequence identity; at least 88% sequence identity; at least 89% sequence identity; at least 90% sequence identity; at least 91% sequence identity; at least 92% sequence identity; at least 93% sequence identity; at least 94% sequence identity; at least 95% sequence identity; at least 96% sequence identity; at least 97% sequence identity; at least 98% sequence identity or at least 99% sequence identity with the particular protein.

[0090] “Protein detection” includes detection of full-length proteins, mature proteins, pre-proteins, polypeptides, isoforms, mutations, post-translationally modified proteins and variants thereof, and can be detected in any suitable manner.

[0091] In some embodiments, a marker is detected by contacting a sample with reagents (e.g., antibodies or nucleic acid primers), generating complexes of reagent and marker(s), and detecting the complexes. In various embodiments, measurement of the various proteins coded for by genes undergoing differential activation based on the differences in cytosine methylation can be used for the prediction and/or diagnosis of autism. Increased or decreased concentrations of proteins would result from changes in gene expression. Various methods for detecting and measuring protein levels can be used. These include western blot, immunohistochemistry, immunodiffusion, immunoassay, immunochemical, mass-spectrometry, immunoelectrophoresis, agglutination, and complement assays. Those skilled in the art will be familiar with numerous specific immunoassay formats and variations thereof which can be useful for carrying out the methods disclosed herein. See, e.g., E. Maggio, Enzyme-Immunoassay (1980), CRC Press, Inc., Boca Raton, Fla.; and U.S. Pat. Nos. 4,727,022; 4,659,678; 4,376,110; 4,275,149; 4,233,402; and 4,230,797. Examples of suitable immunoassays include immunoblotting, immunoprecipitation, immunofluorescence, chemiluminescence, electro-chemiluminescence (ECL), and/or enzyme-linked immunoassays (ELISA).

[0092] Antibodies can be conjugated to a solid support suitable for a diagnostic assay (e.g., beads such as protein A or protein G agarose, microspheres, plates, slides, or wells formed from materials such as latex or polystyrene) in accordance with known techniques, such as passive binding. Antibodies can be conjugated to detectable labels or groups such as radiolabels (e.g., ³⁵S, ¹²⁵I, ¹³¹I), enzyme labels (e.g., horseradish peroxidase, alkaline phosphatase), and fluorescent labels (e.g., fluorescein, Alexa, green fluorescent protein, rhodamine) in accordance with known techniques. Further, using techniques known to those of skill in the art, antibodies to epitopes in the protein(s) of interests can be developed for the purpose of detection of the protein(s).

[0093] Antibodies may also be useful for detecting post-translational modifications of markers. Examples of post-translational modifications include tyrosine phosphorylation, threonine phosphorylation, serine phosphorylation, citrullination and glycosylation (e.g., O-GlcNAc). Such antibodies specifically detect the phosphorylated amino acids in marker proteins of interest. These antibodies are well-known to those skilled in the art, and commercially available. Post-translational modifications can also be determined using metastable ions in reflector matrix-assisted laser desorption ionization-time of flight mass spectrometry (MALDI-TOF). See U. Wirth, et al., Proteomics 2002, 2(10):1445-1451.

[0094] Up- or down-regulation of genes also can be detected using, for example, cDNA arrays, cDNA fragment fingerprinting, cDNA sequencing, clone hybridization, differential display, differential screening, FRET detection, liquid microarrays, PCR, RT-PCR, quantitative RT-PCR analysis with TaqMan assays, molecular beacons, microelectric arrays, oligonucleotide arrays, polynucleotide arrays, serial analysis of gene expression (SAGE), and/or subtractive hybridization.

[0095] The term “gene” can include not only coding sequences but also regulatory regions such as promoters, enhancers, and termination regions. The term further can include all introns and other DNA sequences spliced from the mRNA transcript, along with variants resulting from alternative splice sites. Gene sequences encoding the particular protein can be nucleic acid sequences that direct the expression of the particular protein. These nucleic acid sequences may be a DNA strand sequence that is transcribed into RNA or an RNA sequence that is translated into the particular protein. The nucleic acid sequences include both the full-length nucleic acid sequences as well as non-full-length sequences encoding the full-length protein. The sequences can also include degenerate codons of the native sequence. Portions of complete gene sequences are referenced throughout the disclosure as is understood by one of ordinary skill in the art.

[0096] As an example, Northern hybridization analysis using probes that specifically recognize one or more marker sequences can be used to determine gene expression. Alternatively, expression can be measured using RT-PCR; e.g., polynucleotide primers specific for the differentially expressed marker mRNA sequences reverse-transcribe the mRNA into DNA, which is then amplified in PCR and can be visualized and quantified. Marker RNA can also be quantified using, for example, other target amplification methods, such as transcription-mediated amplification (TMA), strand displacement amplification (SDA), and Nucleic acid sequence based amplification (NASBA), or signal amplification methods (e.g., bDNA), and the like. Ribonuclease protection assays can also be used, using probes that specifically recognize one or more marker mRNA sequences, to determine gene expression.

[0097] Further hybridization technologies that may be used are described in, for example, U.S. Pat. Nos. 5,143,854; 5,288,644; 5,324,633; 5,432,049; 5,470,710; 5,492,806; 5,503,980; 5,510,270; 5,525,464; 5,547,839; 5,580,732; 5,661,028; and 5,800,992 as well as WO 95/21265; WO 96/31622; WO 97/10365; WO 97/27317; EP 373 203; and EP 785 280.

[0098] Proteins and nucleic acids can be linked to chips, such as microarray chips. See, for example, U.S. Pat. Nos. 5,143,854; 6,087,112; 5,215,882; 5,707,807; 5,807,522; 5,958,342; 5,994,076; 6,004,755; 6,048,695; 6,060,240; 6,090,556; and 6,040,138. Binding to proteins or nucleic acids on microarrays can be detected by scanning the microarray with a variety of laser or charge coupled device (CCD)-based scanners, and extracting features with software packages, for example, Imagene (Biodiscovery, Hawthorne, Calif.), Feature Extraction Software (Agilent), Scanalyze (Eisen, M. 1999. SCANALYZE User Manual; Stanford Univ., Stanford, Calif. Ver 2.32.), or GenePix (Axon Instruments).

[0099] Numerous protein and gene sequence markers are disclosed herein. The disclosure is not limited to the particularly disclosed protein and gene sequences but instead also encompasses sequences including 80% sequence identity; 81% sequence identity; 82% sequence identity; 83% sequence identity; 84% sequence identity; 85% sequence identity; 86% sequence identity; 87% sequence identity; 88% sequence identity; 89% sequence identity; 90% sequence identity; 91% sequence identity; 92% sequence identity; 93% sequence identity; 94% sequence identity; 95% sequence identity; 96% sequence identity; 97% sequence identity; 98% sequence identity or 99% sequence identity.

[0100] “% sequence identity” refers to a relationship between two or more sequences, as determined by comparing the sequences. In the art, “identity” also means the degree of sequence relatedness between protein (or nucleic acid) sequences as determined by the match between strings of such sequences. “Identity” (often referred to as “similarity”) can be readily calculated by known methods, including those described in: Computational Molecular Biology (Lesk, A. M., ed.) Oxford University Press, NY (1988); Biocomputing: Informatics and Genome Projects (Smith, D. W., ed.) Academic Press, NY (1994); Computer Analysis of Sequence Data, Part I (Griffin, A. M., and Griffin, H. G., eds.) Humana Press, NJ (1994); Sequence Analysis in Molecular Biology (Von Heijne, G., ed.) Academic Press (1987); and Sequence Analysis Primer (Gribskov, M. and Devereux, J., eds.) Oxford University Press, NY (1992). Preferred methods to determine sequence identity are designed to give the best match between the sequences tested. Methods to determine sequence identity and similarity can be found in publicly available computer programs. Sequence alignments and percent identity calculations may be performed using the Megalign program of the LASERGENE bioinformatics computing suite (DNASTAR, Inc., Madison, Wis.). Multiple alignment of the sequences can also be performed using the Clustal method of alignment (Higgins and Sharp CABIOS, 5, 151-153 (1989) with default parameters (GAP PENALTY=10, GAP LENGTH PENALTY=10). Relevant programs also include the GCG suite of programs (Wisconsin Package Version 9.0, Genetics Computer Group (GCG), Madison, Wis.); BLASTP, BLASTN, BLASTX (Altschul, et al., J. Mol. Biol. 215:403-410 (1990); DNASTAR (DNASTAR, Inc., Madison, Wis.); and the FASTA program incorporating the Smith-Waterman algorithm (Pearson, Comput. Methods Genome Res., [Proc. Int. Symp.] (1994), Meeting Date 1992, 111-20. Editor(s): Suhai, Sandor. Publisher: Plenum, New York, N.Y. Within the context of this disclosure, it will be understood that where sequence analysis software is used for analysis, the results of the analysis are based on the “default values” of the program referenced. “Default values” mean any set of values or parameters which originally load with the software when first initialized.

[0101] Embodiments disclosed herein can be used with high throughput screening (HTS). Typically, HTS refers to a format that performs at least 100 assays, at least 500 assays, at least 1000 assays, at least 5000 assays, at least 10,000 assays, or more per day. When enumerating assays, either the number of samples or the number of protein or nucleic acid markers assayed can be considered.

[0102] Generally HTS methods involve a logical or physical array of either the subject samples, or the protein or nucleic acid markers, or both. Appropriate array formats include both liquid and solid phase arrays. For example, assays employing liquid phase arrays, e.g., for hybridization of nucleic acids, binding of antibodies or other receptors to ligand, etc., can be performed in multiwell or microtiter plates. Microtiter plates with 96, 384, or 1536 wells are widely available, and even higher numbers of wells, e.g., 3456 and 9600 can be used. In general, the choice of microtiter plates is determined by the methods and equipment, e.g., robotic handling and loading systems, used for sample preparation and analysis.

[0103] HTS assays and screening systems are commercially available from, for example, Zymark Corp. (Hopkinton, Mass.); Air Technical Industries (Mentor, Ohio); Beckman Instruments, Inc. (Fullerton, Calif.); Precision Systems, Inc. (Natick, Mass.), etc. These systems typically automate entire procedures including all sample and reagent pipetting, liquid dispensing, timed incubations, and final readings of the microplate in detector(s) appropriate for the assay. These configurable systems provide HTS as well as a high degree of flexibility and customization. The manufacturers of such systems provide detailed protocols for the various methods of HTS.

[0104] The systems and methods disclosed herein include kits. Disclosed kits include materials and reagents necessary to assay a sample obtained from a subject for one or more markers disclosed herein. The materials and reagents can include those necessary to assay the markers disclosed herein according to any method described herein and/or known to one of ordinary skill in the art.

[0105] Various embodiments include materials and reagents necessary to perform methylation assays on particular gene loci. Particular embodiments include materials and reagents necessary to assay for up- or down-regulation of a marker protein in a sample. In particular embodiments, the kits include antibodies to marker proteins and/or can also include aptamers, epitopes, or mimitopes. Other embodiments additionally or alternatively include oligonucleotides that specifically assay for one or more marker nucleic acids based on homology and/or complementarity with marker nucleic acids. The oligonucleotide sequences may correspond to fragments of the marker nucleic acids. For example, the oligonucleotides can be more than 200, 175, 150, 100, 50, 25, 10, or fewer than 10 nucleotides in length. Collectively, any molecule (e.g., antibody, aptamer, epitope, mimitope, oligonucleotide) that forms a complex with a marker is referred to as a marker binding agent herein.

[0106] Embodiments of kits can contain in separate containers marker binding agents either bound to a matrix, or packaged separately with reagents for binding to a matrix. In particular embodiments, the matrix is, for example, a porous strip. In some embodiments, measurement or detection regions of the porous strip can include a plurality of sites containing marker binding agents. In some embodiments, the porous strip can also contain sites for negative and/or positive controls. Alternatively, control sites can be located on a separate strip from the porous strip. Optionally, the different detection sites can contain different amounts of marker binding agents, e.g., a higher amount in the first detection site and lesser amounts in subsequent sites. Upon the addition of test sample, the number of sites displaying a detectable signal provides a quantitative indication of the amount of marker present in the sample. The detection sites can be configured in any suitably detectable shape and can be, e.g., in the shape of a bar or dot spanning the width (or a portion thereof) of a porous strip.

[0107] In some embodiments the matrix can be a solid substrate, such as a “chip.” See, e.g., U.S. Pat. No. 5,744,305. In some embodiments the matrix can be a solution array; e.g., xMAP (Luminex, Austin, Tex.), Cyvera (Illumina, San Diego, Calif.), RayBio Antibody Arrays (RayBiotech, Inc., Norcross, Ga.), CellCard (Vitra Bioscience, Mountain View, Calif.) and Quantum Dots' Mosaic (Invitrogen, Carlsbad, Calif.).

[0108] Additional embodiments can include control formulations (positive and/or negative), and/or one or more detectable labels, such as fluorescein, green fluorescent protein, rhodamine, cyanine dyes, Alexa dyes, luciferase, and radiolabels, among others. Instructions for carrying out the assay, including, optionally, instructions for generating a score, can be included in the kit; e.g., written, tape, VCR, or CD-ROM.

[0109] In particular embodiments, the kits include materials and reagents necessary to conduct and immunoassay (e.g., ELISA). In particular embodiments, the kits include materials and reagents necessary to conduct hybridization assays (e.g., PCR). In particular embodiments, materials and reagents expressly exclude equipment (e.g., plate readers). In particular embodiments, kits can exclude materials and reagents commonly found in laboratory settings (pipettes; test tubes; distilled H₂O).

[0110] Subjects include humans and research animals with a relevant model of autism (e.g., Norway rat (Rattus norvegicus); house mouse (Mus musculus); mu opioid knockout mice; FMR1 knockout mice; deer mice; songbirds (e.g., zebra finch)). Embodiments include the use of genome-wide differences in cytosine methylation in DNA to screen for and determine risk or likelihood of autism at any life stage. These stages include embryonic (from conception to 8 weeks of gestation), fetal (from 8 weeks of gestation to birth), neonatal (first 28 days after birth), infancy (up to 1 year of age), childhood (up to 10 years of age), adolescence (11 to 21 years of age), and adulthood (>21 years of age).

[0111] The sample can be any appropriate biological sample obtained from the subject. Cells and DNA from any biological sample(s) containing DNA can be used as a sample. Samples used for testing can be obtained from living or dead tissue and also archeological or forensic specimens containing cells or tissues. Exemplary samples include: body fluids (e.g. blood, serum, saliva, genital secretions, urine, cerebrospinal fluid (CSF), amniotic fluid, tears, breath condensate), skin, hair follicles/roots, mucous membranes (e.g. buccal scrapings or scrapings from the tongue), internal body tissue, umbilical cord segment, umbilical cord blood, or placental tissue. Additionally, cfDNA from cells that have been destroyed, and which can be retrieved from any body fluids, can be used as a sample.

[0112] In various embodiments, the methods disclosed herein can be used to predict autism in a subject before behavioral symptoms appear. In other embodiments, the methods disclosed herein can be used to diagnose autism in a subject after behavioral symptoms appear. In other embodiments, the methods disclosed herein can be used in conjunction with behavioral testing, such as the CARS, ADOS-2, GARS-2, ABC, or ADI-R, in order to diagnose autism in a subject. In further embodiments, the methods disclosed herein can be used to confirm a diagnosis of autism in a subject. In still further embodiments, the methods disclosed herein can be used to classify a subject as in need of further evaluation using behavioral testing.

[0113] Particular embodiments disclosed herein include obtaining a sample from a subject suspected of having autism; performing a methylation assay on the sample; determining one or more values based on the assaying; comparing the one or more values to a reference level; and predicting or diagnosing autism in the subject according to the methylation status of a marker, as described elsewhere herein.

[0114] Particular embodiments also include predicting or diagnosing autism in a subject by obtaining a sample from a subject suspected of having autism; assaying the sample for up- or down-regulation of one or more markers disclosed herein; determining one or more marker values based on the assaying; comparing the one or more marker values to a reference level; and predicting or diagnosing autism in the subject according to the methylation status of a marker as determined by the up- or down-regulation of the one or more markers, as described elsewhere herein.

[0115] Various embodiments include obtaining a sample from a subject suspected of having autism; performing a methylation assay on the sample; determining one or more values based on the assaying; comparing the one or more values to a reference level; and predicting autism in the subject according to the methylation status of one or more markers, as described elsewhere herein.

[0116] Further embodiments include predicting autism in a subject by obtaining a sample from a subject suspected of having autism; assaying the sample for up- or down-regulation of one or more markers disclosed herein; determining one or more marker values based on the assaying; comparing the one or more marker values to a reference level; and predicting autism in the subject according to the methylation status of a marker as determined by the up- or down-regulation of the one or more markers, as described elsewhere herein.

[0117] Other embodiments include obtaining a sample from a subject suspected of having autism; performing a methylation assay on the sample; determining one or more values based on the assaying; comparing the one or more values to a reference level; and diagnosing autism in the subject according to the methylation status of one or more markers, as described elsewhere herein.

[0118] Additional embodiments include diagnosing autism in a subject by obtaining a sample from a subject suspected of having autism; assaying the sample for up- or down-regulation of one or more markers disclosed herein; determining one or more marker values based on the assaying; comparing the one or more marker values to a reference level; and diagnosing autism in the subject according to the methylation status of a marker as determined by the up- or down-regulation of the one or more markers, as described elsewhere herein.

[0119] Other embodiments include obtaining a sample from a subject suspected of having autism; performing a methylation assay on the sample; determining one or more values based on the assaying; comparing the one or more values to a reference level; performing behavioral testing on the subject; and diagnosing autism in the subject according to the methylation status of one or more markers, as described elsewhere herein, and the results of the behavioral testing.

[0120] Additional embodiments include diagnosing autism in a subject by obtaining a sample from a subject suspected of having autism; assaying the sample for up- or down-regulation of one or more markers disclosed herein; determining one or more marker values based on the assaying; comparing the one or more marker values to a reference level; performing behavioral testing on the subject; and diagnosing autism in the subject according to the methylation status of a marker as determined by the up- or down-regulation of the one or more markers, as described elsewhere herein, and the results of the behavioral testing.

[0121] Other embodiments include obtaining a sample from a subject diagnosed with autism; performing a methylation assay on the sample; determining one or more values based on the assaying; comparing the one or more values to a reference level; and confirming a diagnosis of autism in the subject according to the methylation status of one or more markers, as described elsewhere herein.

[0122] Additional embodiments include confirming a diagnosis of autism in a subject by obtaining a sample from a subject suspected of having autism; assaying the sample for up- or down-regulation of one or more markers disclosed herein; determining one or more marker values based on the assaying; comparing the one or more marker values to a reference level; and confirming an autism diagnosis in the subject according to the methylation status of a marker as determined by the up- or down-regulation of the one or more markers, as described elsewhere herein.

[0123] A prediction or diagnosis according to the systems and methods disclosed herein can direct a treatment regimen. For example, an autism diagnosis can direct treatment with an autism treatment (e.g., lifestyle and behavioral interventions; behavioral management therapy; cognitive behavior therapy; early intervention; educational and school-based therapies; joint attention therapy; medication treatment; nutritional therapy; occupational therapy; parent-mediated therapy; physical therapy; social skills training; speech-language therapy). Administered treatments will be delivered in therapeutically effective amounts leading to an improvement or resolution of the treated condition, as assessed by a practicing physician or researcher.

[0124] The present disclosure provides kits for diagnosing autism in a subject. The kit can include components for detecting, identifying, and/or quantitating cytosine methylation of one or more, two or more, three or more, four or more, five or more, six or more, seven or more, eight or more, nine or more, ten or more, eleven or more, twelve or more, thirteen or more, fourteen or more, fifteen or more, sixteen or more, seventeen or more, or all eighteen of the following genes encoding BCL6 co-repressor (BCOR); long intergenic non-protein coding RNA 589 (C8orf75); chloride channel, voltage-sensitive chloride channel 1, (CLCN1); chloride channel voltage-sensitive 4 (CLCN4); disco-interacting protein 2 homolog C (D1P2C); glycoprotein M6B (GPM6B); integrin, alpha X complement component 3 receptor 4 subunit (ITGAX); LOC284412; long intergenic non-protein coding RNA 620 (LOC285375); mastermind-like domain containing 1 (MAMLD1); MIR503 host gene (MGC16121); NADH dehydrogenase (ubiquinone) 1 alpha subcomplex, 10 (NDUFA10); phosphodiesterase 9A (PDE9A); phosphatidic acid phosphatase type 2 domain containing 1A (PPAPDC1A); protein tyrosine phosphatase, receptor type, N polypeptide 2 (PTPRN2); RAP1 GTPase activating protein 2 (RAP1GAP2); ribosomal protein S4, Y-linked 2 (RPS4Y2); tubulin, alpha 3d (TUBA3D); and ubiquitin domain containing 1 (UBTD1). The kit can also include components for detecting and/or quantitating expression of one or more, two or more, three or more, four or more, five or more, six or more, seven or more, eight or more, nine or more, ten or more, eleven or more, twelve or more, thirteen or more, fourteen or more, fifteen or more, sixteen or more, seventeen or more, or all eighteen of the following genes encoding BCOR, C8orf75, CLCN1, CLCN4, D1P2C, GPM6B, ITGAX, LOC284412, LOC285375, MAMLD1, MGC16121, NDUFA10, PDE9A, PPAPDC1A, PTPRN2, RAP1GAP2, RPS4Y2, TUBA3D, and UBTD1. The kit can also include components for detecting and/or quantitating expression of one or more, two or more, three or more, four or more, five or more, six or more, seven or more, eight or more, nine or more, ten or more, eleven or more, twelve or more, thirteen or more, fourteen or more, fifteen or more, sixteen or more, seventeen or more, or all eighteen of the following proteins: BCOR, C8orf75, CLCN1, CLCN4, D1P2C, GPM6B, ITGAX, LOC284412, LOC285375, MAMLD1, MGC16121, NDUFA10, PDE9A, PPAPDC1A, PTPRN2, RAP1GAP2, RPS4Y2, TUBA3D, and UBTD1. The kits can comprise a microarray including one or more of the genes or proteins for diagnosing autism.

[0125] The present disclosure provides microarray for diagnosing autism by detecting and/or quantitating the expression of one or more of the following genes encoding BCOR, C8orf75, CLCN1, CLCN4, D1P2C, GPM6B, ITGAX, LOC284412, LOC285375, MAMLD1, MGC16121, NDUFA10, PDE9A, PPAPDC1A, PTPRN2, RAP1GAP2, RPS4Y2, TUBA3D, and UBTD1. The microarray can include nucleic acids that bind to one or more, two or more, three or more, four or more, five or more, six or more, seven or more, eight or more, nine or more, ten or more, eleven or more, twelve or more, thirteen or more, fourteen or more, fifteen or more, sixteen or more, seventeen or more, or all eighteen of the following genes encoding BCOR, C8orf75, CLCN1, CLCN4, D1P2C, GPM6B, ITGAX, LOC284412, LOC285375, MAMLD1, MGC16121, NDUFA10, PDE9A, PPAPDC1A, PTPRN2, RAP1GAP2, RPS4Y2, TUBA3D, and UBTD1. The microarray can include one to eighteen different nucleic acids, each binding to one of the following genes: BCOR, C8orf75, CLCN1, CLCN4, D1P2C, GPM6B, ITGAX, LOC284412, LOC285375, MAMLD1, MGC16121, NDUFA10, PDE9A, PPAPDC1A, PTPRN2, RAP1GAP2, RPS4Y2, TUBA3D, and UBTD1.

[0126] The present disclosure also provides microarray for diagnosing autism by detecting and/or quantitating the expression of one or more of the following proteins: BCOR, C8orf75, CLCN1, CLCN4, D1P2C, GPM6B, ITGAX, LOC284412, LOC285375, MAMLD1, MGC16121, NDUFA10, PDE9A, PPAPDC1A, PTPRN2, RAP1GAP2, RPS4Y2, TUBA3D, and UBTD1. The microarray can include antibodies or proteins that bind to one or more, two or more, three or more, four or more, five or more, six or more, seven or more, eight or more, nine or more, ten or more, eleven or more, twelve or more, thirteen or more, fourteen or more, fifteen or more, sixteen or more, seventeen or more, or all eighteen of the following proteins: BCOR, C8orf75, CLCN1, CLCN4, D1P2C, GPM6B, ITGAX, LOC284412, LOC285375, MAMLD1, MGC16121, NDUFA10, PDE9A, PPAPDC1A, PTPRN2, RAP1GAP2, RPS4Y2, TUBA3D, and UBTD1. The microarray can include one to eighteen different antibodies or proteins, each binding to one of the following proteins: BCOR, C8orf75, CLCN1, CLCN4, D1P2C, GPM6B, ITGAX, LOC284412, LOC285375, MAMLD1, MGC16121, NDUFA10, PDE9A, PPAPDC1A, PTPRN2, RAP1GAP2, RPS4Y2, TUBA3D, and UBTD1.

[0127] Binding to proteins or nucleic acids on microarrays can be detected by scanning the microarray with a variety of laser or CCD-based scanners, and extracting features with software packages, for example, Imagene (Biodiscovery, Hawthorne, Calif.), Feature Extraction Software (Agilent), Scanalyze (Eisen, M. 1999. SCANALYZE User Manual; Stanford Univ., Stanford, Calif. Ver 2.32.), or GenePix (Axon Instruments).

[0128] Autism can be diagnosed by determining that there is altered gene expression or protein expression in a subject of a marker gene described herein or of a protein encoded by a marker gene described herein as compared to the corresponding gene or protein in a control sample or reference value. Austism also can be diagnosed by determining that there is an altered cytosine methylation located on one of the marker genes. The control sample or reference value can be obtained from a normal or unaffected subject.

[0129] A blood sample can be maternal blood obtained during the prenatal period from 11 weeks to 42 weeks of pregnancy. A blood sample can be obtained from a neonatal subject within 72 hours of birth or within 7 days of after birth, from a neonatal subject from 7 days after birth up to 28 days after birth, from an infant subject from 29 days after birth up to one year of age, or from a subject from one year of age up to 17 years of age. The blood sample can be analyzed for altered gene or protein expression or for altered methylation of cytosines of one or more of the marker genes.

[0130] The Examples below are included to demonstrate particular embodiments of the disclosure. Those of ordinary skill in the art should recognize in light of the present disclosure that many changes can be made to the specific embodiments disclosed herein and still obtain a like or similar result without departing from the spirit and scope of the disclosure.

### EXAMPLES

### Example 1

[0131] Description of the Methods. A single neonatal dried blood spot saved on filter paper was retrieved from biobank specimens collected as part of the newborn screening program for the detection of metabolic disorders and stored by the Michigan Department of Community Health in Lansing, Mich. Blood was originally obtained by heel-stick and placed on filter paper an average of two days after birth. Samples were stored at room temperature. De-identified residual blood spots after the completion of clinical testing were used. Parental consent was obtained for the use of the residual blood spots. The Institutional Review Board approval was obtained through a standardized process. The specimens used for the current study were collected between 1998 and 2003. Cases with chromosomal abnormalities, other known or suspected genetic syndromes, or other significant medical or surgical disorders were excluded.

[0132] A total of 10 cases of and 14 unaffected controls were analyzed. Control cases were normal newborns with no significant medical or surgical disorder at the time of the blood draw.

[0133] DNA extraction from blood-spot. DNA extraction was performed as described in the EZ1® DNA Investigator Handbook, Sample and Assay Technologies, QUIAGEN 4th Edition, April 2009. Briefly, two 6 mm diameter circles (or four 3mm diameter circles) were punched out of a dried blood spot stored on filter paper and used for DNA extraction. The circle contains DNA from white blood cells from 5 μL of whole blood. The circles are transferred to a 2 ml sample tube.

[0134] A total of 190 μL of diluted buffer G2 (G2 buffer: distilled water in 1:1 ratio) was used to elute DNA from the filter paper. Additional buffer is added until residual sample volume in the tube is 190 μL because filter paper will absorb a certain volume of the buffer. Ten μL of proteinase K is added and the mixture is vortexed for 10 seconds and quick spun. The mixture is then incubated at 56° C. for 15 minutes at 900 rpm. Further incubation at 95° C. for 5 minutes at 900 rpm is performed to increase the yield of DNA from the filter paper. Quick spin was performed. The sample is then run on EZ1 Advanced (Trace, Tip-Dance) protocol as described. The protocol is designed for isolation of total DNA from the mixture. Elution tubes containing purified DNA in 50 μL of water is now available for further analysis.

[0135] Infinium DNA methylation assay. Illumina's Infinium Human Methylation 450 Bead Chip system was used for genome-wide methylation analysis. DNA (500 ng) was subjected to bisulfite conversion to deaminate unmethylated cytosines to uracils with the EZ-96 Methylation Kit (Zymo Research) using the standard protocol for Infinium. The DNA is enzymatically fragmented and hybridized to the Illumina BeadChips. BeadChips contain locus-specific oligomers and are in pairs, one specific for the methylated cytosine locus and the other for the unmethylated locus. A single base extension is performed to incorporate a biotin-labeled ddNTP. After fluorescent staining and washing, the BeadChip is scanned and the methylation status of each locus is determined using BeadStudio software (Illumina). Experimental quality was assessed using the Controls Dashboard that has sample-dependent and sample-independent controls target removal, staining, hybridization, extension, bisulfite conversion, specificity, negative control, and non-polymorphic control. The methylation status is the ratio of the methylated probe signal relative to the sum of methylated and unmethylated probes. The resulting ratio indicates whether a locus is unmethylated (0) or fully methylated (1). Differentially methylated sites are determined using the Illumina Custom Model and filtered according to p-value using 0.05 as a cutoff.

[0136] IIlumina's Infinium HumanMethylation 450 BeadChip system covers CpG sites in the promoter region of 16,880 genes. In addition, other cytosine loci throughout the genome and outside of genes, and within or outside of CpG islands, are represented in this assay.

[0137] Cytosine Methylation for the Prediction of Autism Risk Using ROC Curve. To determine the accuracy of the methylation level of a particular cytosine locus for autism prediction, different threshold levels of methylation at the site e.g. ≥10%, ≥20%, ≥30%, ≥40%; etc. were used to calculate sensitivity and specificity for autism prediction. Thus, for example, using ≥10% methylation at a particular CG locus, cases with methylation levels above this threshold would be considered to have a positive test and those with lower than this threshold are interpreted as a negative methylation test. The percentage of autism cases with a positive test in this example ≥10% methylation at this particular cytosine locus would be equal to the sensitivity of the test. The percentage of normal non-autism cases with cytosine methylation levels of <10% at this locus would be considered the specificity of the test. False positive rate is here defined as the number of normal cases with a (falsely) abnormal test result and sensitivity is defined as the number of autism cases with (correctly) abnormal test result i.e. the level of methylation ≥10% at this particular CG location. A series of threshold methylation values are evaluated e.g. ≥ 1/10, ≥ 1/20, ≥ 1/30 etc., and used to generate a series of paired sensitivity and false positive values for each locus. A receiver operating characteristic (ROC) curve which is a plot of data points with sensitivity values on the Y-axis and false positivity rate on the X-axis is generated. This approach can be used to generate ROC curves for each individual cytosine locus that displays significant methylation differences between cases and autism groups.

[0138] It should be noted that similarly, in loci at which the methylation level was reduced in affected compared to control cases threshold methylation values for calculating sensitivity and false positive rates would be ≥ 1/10, ≥ 1/20, ≥ 1/30, etc.

[0139] Standard statistical testing using p-values to express the probability that the observed difference between cytosine methylation at a given locus between autism and control DNA specimens were performed.

[0140] More stringent testing using False discovery Rate (FDR) was also performed. The FDR gives the probability that positive results were due to chance when multiple hypothesis testing is performed using multiple comparisons. The Benjamini-Hochberg test was used to calculate FDR.

### Example 2

[0141] Blood spots were collected on filter paper from newborns undergoing routine screening for metabolic disorders. Newborns averaged two days of age at the time of collection. Completely de-identified residual blood spots not used for metabolic testing was stored at room temperature at the Michigan Department of Community Health facilities in Lansing, Mich. DNA was extracted and purified from a single spot of blood on filter paper as described previously in the application and methylation levels in different CPG islands determined using the Illumina's Infinium Human Methylation 450 Bead Chip system.

[0142] The level or percentage methylation at multiple cytosine throughout the DNA was compared in 14 cases of autism versus 10 normal cases. Table 1 shows five cytosine loci located in five different genes that were associated with significant differences in methylation between autism cases and the normal controls. The GENE symbols, chromosome number on which the gene is located, and the specific cytosine locus displaying differential methylation are provided along with the contribution (‘marginal contribution’) of each particular cytosine locus for the overall prediction of autism versus normal controls. The extremely low FDR values of each cytosine locus (Table 5) indicate the highly significant differences in the percentage methylation between these specific cytosines in autism cases versus controls. The high diagnostic performance (AUC, sensitivity, specificity, and low p-values for AUC) of the cytosine biomarker combination in Table 1 are shown in Table 6. This model only considered cytosine biomarkers in autism prediction and used the minimum number of predictive sites in the model.

TABLE 5
Differentially Methylated Cytosine Loci and associated Genes in
Autism.

| | | | % m | | FDR | |
|---|---|---|---|---|---|---|
| TargetID | GeneSym | Chromosome | Change | pvalue | pvalue | AUC |
| cg00140189 | CLCN4 | X | 13.74038 | 3.68E−38 | 3.47E−35 | 0.91429 |
| cg00150874 | BCOR; BCOR | X | 14.81594 | 3.68E−38 | 3.47E−35 | 0.91429 |
| cg00308367 | KDM5D | Y | 38.21149 | 3.68E−38 | 3.47E−35 | 0.89286 |
| cg00408231 | ARMCX1 | X | 17.65587 | 3.68E−38 | 3.47E−35 | 0.88571 |
| cg00501169 | NBPF4 | 1 | 19.97094 | 3.68E−38 | 3.47E−35 | 0.87857 |
| cg00576139 | LOC100101115; | Y | 14.61021 | 3.68E−38 | 3.47E−35 | 0.87857 |
| | TTTY21 | | | | | |
| cg00632358 | SNX29 | 16 | 7.812852 | 3.68E−38 | 3.47E−35 | 0.87857 |
| cg00676506 | RPS4Y2 | Y | 15.69715 | 3.68E−38 | 3.47E−35 | 0.87857 |
| cg00756172 | LOC340094 | 5 | 13.13532 | 3.68E−38 | 3.47E−35 | 0.87857 |
| cg00944884 | NBL1 | 1 | 21.76583 | 3.68E−38 | 3.47E−35 | 0.87143 |
| cg01078565 | MAGEB2 | X | 11.20327 | 3.68E−38 | 3.47E−35 | 0.87143 |
| cg01127608 | LMX1B | 9 | 20.881 | 3.68E−38 | 3.47E−35 | 0.86429 |
| cg01153376 | MSLN; MIR662 | 16 | 14.76771 | 3.68E−38 | 3.47E−35 | 0.86429 |
| cg01244571 | DIP2C | 10 | 7.70281 | 3.68E−38 | 3.47E−35 | 0.86429 |
| cg01347786 | RBMS3; RBMS3 | 3 | 15.53262 | 3.68E−38 | 3.47E−35 | 0.86429 |
| cg01426558 | DDX3Y | Y | 23.00077 | 3.68E−38 | 3.47E−35 | 0.86429 |
| cg01451277 | DPP8 | 15 | 18.90162 | 3.68E−38 | 3.47E−35 | 0.86429 |
| cg01498999 | NLGN4Y | Y | 23.62679 | 3.68E−38 | 3.47E−35 | 0.85714 |
| cg01522249 | BCOR | X | 17.21601 | 3.68E−38 | 3.47E−35 | 0.85714 |
| cg01600516 | ALOX12 | 17 | 32.79307 | 3.68E−38 | 3.47E−35 | 0.85714 |
| cg01677142 | OCA2 | 15 | 13.84752 | 3.68E−38 | 3.47E−35 | 0.85714 |
| cg01900066 | EIF1AY | Y | 17.74769 | 3.68E−38 | 3.47E−35 | 0.85714 |
| cg01906946 | BCOR | X | 17.4637 | 3.68E−38 | 3.47E−35 | 0.85714 |
| cg01911472 | TBL1Y | Y | 19.86583 | 3.68E−38 | 3.47E−35 | 0.85714 |
| cg01958928 | TPD52 | 8 | 15.67355 | 3.68E−38 | 3.47E−35 | 0.85714 |
| cg01984154 | RPS4Y1 | Y | 35.63903 | 3.68E−38 | 3.47E−35 | 0.85 |
| cg02004401 | GNA12 | 7 | 17.42085 | 3.68E−38 | 3.47E−35 | 0.85 |
| cg02011394 | TSPY4 | Y | 26.04095 | 3.68E−38 | 3.47E−35 | 0.85 |
| cg02050847 | RPS4Y2 | Y | 38.41111 | 3.68E−38 | 3.47E−35 | 0.85 |
| cg02056550 | TTTY18 | Y | 31.49682 | 3.68E−38 | 3.47E−35 | 0.85 |
| cg02352633 | RBMY2EP | Y | 22.16595 | 3.68E−38 | 3.47E−35 | 0.85 |
| cg02394572 | AMZ1 | 7 | 39.39936 | 3.68E−38 | 3.47E−35 | 0.85 |
| cg02407581 | TTTY18 | Y | 22.48185 | 3.68E−38 | 3.47E−35 | 0.85 |
| cg02522936 | TTTY10 | Y | 26.68201 | 3.68E−38 | 3.47E−35 | 0.85 |
| cg02730008 | TMSB4Y | Y | 30.91268 | 3.68E−38 | 3.47E−35 | 0.84286 |
| cg02741327 | TMEM163 | 2 | 19.46717 | 3.68E−38 | 3.47E−35 | 0.84286 |
| cg02788633 | MICALL2 | 7 | 12.48116 | 3.68E−38 | 3.47E−35 | 0.84286 |
| cg02907689 | PDZD4 | X | 13.92036 | 3.68E−38 | 3.47E−35 | 0.84286 |
| cg02931660 | BCOR | X | 14.19786 | 3.68E−38 | 3.47E−35 | 0.83571 |
| cg03052502 | FAM197Y2 | Y | 33.82447 | 3.68E−38 | 3.47E−35 | 0.83571 |
| cg03161453 | BCOR | X | 19.98807 | 3.68E−38 | 3.47E−35 | 0.83571 |
| cg03183700 | ANK1 | 8 | 13.17744 | 3.68E−38 | 3.47E−35 | 0.83571 |
| cg03199239 | GNG7 | 19 | 22.89847 | 3.68E−38 | 3.47E−35 | 0.83571 |
| cg03278611 | NLGN4Y | Y | 35.17792 | 3.68E−38 | 3.47E−35 | 0.83571 |
| cg03293837 | ATE1 | 10 | 14.89882 | 3.68E−38 | 3.47E−35 | 0.83571 |
| cg03443143 | TSPY4; | Y | 21.90664 | 3.68E−38 | 3.47E−35 | 0.82857 |
| | FAM197Y2 | | | | | |
| cg03492634 | GP5 | 3 | 17.42065 | 3.68E−38 | 3.47E−35 | 0.82857 |
| cg03535417 | TSPY4; | Y | 21.02525 | 3.68E−38 | 3.47E−35 | 0.82857 |
| | FAM197Y2 | | | | | |
| cg03554089 | XIST | X | 20.81236 | 3.68E−38 | 3.47E−35 | 0.82857 |

TABLE 6
Cytosine Methylation Prediction of Autism: Evolutionary Computing.

| Biomarkers | AUC | Sensitivity | Specificity | P-value |
|---|---|---|---|---|
| Refer to Table 1 | 1.00 | 100.0 | 100.0 | <0.00001 |
| Refer to Table 2 | 1.00 | 100.0 | 100.0 | <0.00001 |
| Refer to Table 3 | 1.00 | 100.0 | 100.0 | <0.00001 |
| Refer to Table 4 | 1.00 | 100.0 | 100.0 | <0.00001 |

### Example 3

[0143] Blood spots were collected on filter paper from newborns undergoing routine screening for metabolic disorders. Newborns averaged two days of age at the time of collection. Completely de-identified residual blood spots not used for metabolic testing was stored at room temperature at the Michigan Department of Community Health facilities in Lansing, Mich. DNA was extracted and purified from a single spot of blood on filter paper as described previously and methylation levels in different CPG islands determined using the Illumina's Infinium Human Methylation 450 Bead Chip system.

[0144] Demographic and clinical factors have been shown in multiple studies to affect risk of development of autism. We therefore considered the potential impact of putative risk factors such as race, gender, gestational age at delivery, birth weight, and plausible factors such as interval between birth and blood draw and also length of storage of the blood specimens. It is possible that the latter two factors could affect DNA methylation. We therefore considered all the above demographic, clinical, and specimen handling factors with biomarkers for the prediction of autism.

[0145] The level or percentage methylation at multiple cytosine loci throughout the DNA was compared in 14 cases of autism versus 10 normal cases. Table 4 shows four cytosine loci located in known genes that were associated with significant differences in methylation between autism cases and the controls. The GENE symbols, chromosome number on which the gene is located, and the specific cytosine locus displaying differential methylation are provided along with the contribution (marginal contribution') of each particular cytosine locus for the overall prediction of autism versus normal controls. In this analysis, demographic and clinical characteristics such as maternal age and race, gestational age of delivery, birth weight, newborn gender, and interval from birth to sample collection were also considered as potential contributors to autism prediction. None of these factors significantly contributed to prediction. For the cytosine loci, the extremely low FDR values (Tables 5 and 7) indicate the highly significant differences in the percentage methylation between these specific cytosines in autism cases versus controls. The high diagnostic performance (AUC, sensitivity, specificity, and low p-values for AUC) are shown in Table 6. This model (“parsimonious”) used a minimum number of DNA methylation markers for prediction.

TABLE 7
Differentially Methylated Cytosine Loci and associated Genes in
Autism

| | Gene | | | | FDR p- | |
|---|---|---|---|---|---|---|
| TargetID | Sym | Chromosome | % m Change | pvalue | value | AUC |
| cg03554089 | XIST | X | 20.81236 | 3.68E−38 | 3.47E−35 | 0.7 |
| cg16995742 | COPS8 | 2 | 17.77194 | 3.68E−38 | 3.47E−35 | 0.7 |
| cg17869311 | GXYLT2 | 3 | 15.70243 | 3.68E−38 | 3.47E−35 | 0.7 |
| cg19278629 | LMNB2 | 19 | 17.39525 | 3.68E−38 | 3.47E−35 | 0.7 |
| cg20089799 | TSPAN9 | 12 | 22.71465 | 3.68E−38 | 3.47E−35 | 0.7 |
| cg21903981 | PAPLN | 14 | 20.47229 | 3.68E−38 | 3.47E−35 | 0.7 |
| cg00150874 | BCOR | X | 14.81594 | 3.68E−38 | 3.47E−35 | 0.69286 |
| cg02907689 | PDZD4 | X | 13.92036 | 3.68E−38 | 3.47E−35 | 0.69286 |
| cg09247979 | PTPRK | 6 | 25.84962 | 3.68E−38 | 3.47E−35 | 0.69286 |
| cg13183651 | KRTAP3-3 | 17 | 19.3143 | 3.68E−38 | 3.47E−35 | 0.69286 |
| cg18057692 | CAMKK1 | 17 | 14.27172 | 3.68E−38 | 3.47E−35 | 0.69286 |
| cg19248407 | CUX1 | 7 | 20.19702 | 3.68E−38 | 3.47E−35 | 0.69286 |
| cg19569170 | ARHGAP26 | 5 | 19.73967 | 3.68E−38 | 3.47E−35 | 0.69286 |
| cg00756172 | LOC340094 | 5 | 13.13532 | 3.68E−38 | 3.47E−35 | 0.68571 |
| cg04381873 | LOC284412 | 19 | 14.62235 | 3.68E−38 | 3.47E−35 | 0.68571 |
| cg04787784 | LMF1 | 16 | 22.28741 | 3.68E−38 | 3.47E−35 | 0.68571 |
| cg05292605 | LTBP2 | 14 | 17.17855 | 3.68E−38 | 3.47E−35 | 0.68571 |
| cg05341252 | HLA-DQB1 | 6 | 21.68212 | 3.68E−38 | 3.47E−35 | 0.68571 |
| cg10039267 | BCOR | X | 16.31939 | 3.68E−38 | 3.47E−35 | 0.68571 |
| cg11268327 | MICA | 6 | 20.32274 | 3.68E−38 | 3.47E−35 | 0.68571 |
| cg12208638 | ACTN3 | 11 | 23.52442 | 3.68E−38 | 3.47E−35 | 0.68571 |
| cg13176022 | XG | X | 14.83821 | 3.68E−38 | 3.47E−35 | 0.68571 |
| cg13966843 | C6orf10 | 6 | 12.05593 | 3.68E−38 | 3.47E−35 | 0.68571 |
| cg14261068 | BCOR | X | 17.88543 | 3.68E−38 | 3.47E−35 | 0.68571 |
| cg22508145 | CPAMD8 | 19 | 19.75364 | 3.68E−38 | 3.47E−35 | 0.68571 |
| cg02522936 | TTTY10 | Y | 26.68201 | 3.68E−38 | 3.47E−35 | 0.67857 |
| cg08477332 | S100A14 | 1 | 19.75707 | 3.68E−38 | 3.47E−35 | 0.67857 |
| cg09829904 | ZFY | Y | 24.34083 | 3.68E−38 | 3.47E−35 | 0.67857 |
| cg12012426 | KIAA1530 | 4 | 23.02595 | 3.68E−38 | 3.47E−35 | 0.67857 |
| cg21797452 | LOC286467 | X | 19.78103 | 3.68E−38 | 3.47E−35 | 0.67857 |
| cg22007216 | DCHS2 | 4 | 21.76253 | 3.68E−38 | 3.47E−35 | 0.67857 |
| cg22802014 | SNRNP40 | 1 | 17.01872 | 3.68E−38 | 3.47E−35 | 0.67857 |
| cg24156613 | BCOR | X | 18.64296 | 3.68E−38 | 3.47E−35 | 0.67857 |
| cg26570714 | OR2T10 | 1 | 19.76158 | 3.68E−38 | 3.47E−35 | 0.67857 |
| cg02056550 | TTTY18 | Y | 31.49682 | 3.68E−38 | 3.47E−35 | 0.67143 |
| cg02931660 | BCOR | X | 14.19786 | 3.68E−38 | 3.47E−35 | 0.67143 |
| cg04624564 | NCRNA00182 | X | 15.68838 | 3.68E−38 | 3.47E−35 | 0.67143 |
| cg05990366 | FAM101A | 12 | 12.53592 | 3.68E−38 | 3.47E−35 | 0.67143 |
| cg06084534 | OR6K6 | 1 | 18.94504 | 3.68E−38 | 3.47E−35 | 0.67143 |
| cg07876831 | TMCO3 | 13 | 24.80591 | 3.68E−38 | 3.47E−35 | 0.67143 |
| cg08225549 | STMN2 | 8 | 19.52434 | 3.68E−38 | 3.47E−35 | 0.67143 |
| cg15366127 | BCOR | X | 16.12798 | 3.68E−38 | 3.47E−35 | 0.67143 |
| cg15516537 | RBMY1D; | Y | 18.16238 | 3.68E−38 | 3.47E−35 | 0.67143 |
| | RBMY1A1; | | | | | |
| | RBMY1E; | | | | | |
| | RBMY1B | | | | | |
| cg19504860 | ZNF708 | 19 | 23.13524 | 3.68E−38 | 3.47E−35 | 0.67143 |
| cg27020349 | UTRN | 6 | 16.59896 | 3.68E−38 | 3.47E−35 | 0.67143 |
| cg08707617 | BCOR | X | 15.79325 | 3.68E−38 | 3.47E−35 | 0.66429 |
| cg10102162 | SORCS1 | 10 | 10.9724 | 3.68E−38 | 3.47E−35 | 0.66429 |
| cg10601372 | WDR18 | 19 | 10.16212 | 3.68E−38 | 3.47E−35 | 0.66429 |
| cg13284789 | SIDT1 | 3 | 26.2783 | 3.68E−38 | 3.47E−35 | 0.66429 |
| cg18001722 | GRK5 | 10 | 16.70102 | 3.7E−38 | 3.5E−35 | 0.66429 |
| cg19712277 | MMEL1 | 1 | 19.2261 | 3.7E−38 | 3.5E−35 | 0.66429 |
| cg25705492 | TSPY4 | Y | 22.52221 | 3.7E−38 | 3.5E−35 | 0.66429 |
| cg01127608 | LMX1B | 9 | 20.881 | 3.7E−38 | 3.5E−35 | 0.65714 |
| cg07240846 | CAMK1D | 10 | 17.33648 | 3.7E−38 | 3.5E−35 | 0.65714 |
| cg04173211 | IL16 | 15 | 16.44636 | 3.7E−38 | 3.5E−35 | 0.65 |
| cg06051619 | DIP2C | 10 | 19.4605 | 3.7E−38 | 3.5E−35 | 0.65 |
| cg06350542 | MCF2L | 13 | 15.39299 | 3.7E−38 | 3.5E−35 | 0.65 |
| cg07747963 | RPS4Y2 | Y | 24.22948 | 3.7E−38 | 3.5E−35 | 0.65 |
| cg11585022 | WDR36 | 5 | 18.95778 | 3.7E−38 | 3.5E−35 | 0.65 |
| cg11970733 | GLT1D1 | 12 | 15.31366 | 3.7E−38 | 3.5E−35 | 0.65 |
| cg12727358 | CACNA1D | 3 | 18.43226 | 3.7E−38 | 3.5E−35 | 0.65 |

[0146] The results presented herein confirm that based on the differences in the level of methylation of the cytosine sites between autism and normal cases throughout the whole human genome, the predisposition to or risk of having a autism can be determined.

[0147] Without being bound to theory, the differences in methylation can be explained by the development of autism resulting from or leading to abnormal expression of multiple genes many of which directly or indirectly impact or control neurodevelopment. Abnormal gene function includes either the suppression of the function of genes whose activities are important to normal brain development or conversely the activation of genes whose functions are normally suppressed to permit normal development of the brain. Thus, genome wide cytosine methylation study provides information on the orchestrated widespread activation and suppression of multiple genes and gene networks involved in the normal and abnormal development of the brain. The approach does not require prior knowledge of the role of particular genes in brain development or the mechanism by which changes in the function of the genes lead to autism. Further, hundreds of thousands of cytosine loci involving thousands of genes are evaluated simultaneously and in an unbiased fashion and can thus be used to accurately estimate the risk of autism. Of further importance is the fact that cytosine loci outside of the genes can also control gene function, so methylation levels of a large number of loci located outside of the gene further contribute to the prediction of autism.

[0148] It has been confirmed that aberration or change in the methylation pattern of cytosine nucleotide occur at multiple cytosine loci throughout the genome in subjects affected with development of autism compared to subjects without autism.

### Example 4

[0149] Introduction. Highly significant differences in the percentage of methylation of cytosine nucleotides throughout the genome in subjects with autism as compared to normal groups have been found using a widely available commercial bisulfite-based assay for distinguishing methylated from unmethylated cytosine. Cytosines analyzed for this invention were not limited to CpG islands or to specific genes but included cytosine loci outside of CpG islands and outside of genes. Cytosine loci associated with known genes are highlighted however extragenic loci also showed significant differences in methylation which are useful in distinguishing autism from normal cases. Multiple individual cytosine loci demonstrate highly significant differences in the degree of their methylation in autism versus normal cases (FDR q-values 1.0×10−3 to 1.0×10−35) see below.

[0150] Panels of known and identifiable cytosine loci throughout the genome whose methylation levels (expressed as percentages) are useful for distinguishing autism from normal cases and can be found in Tables 1-4.

[0151] In this example, 14 cases of autism diagnosed by neurologists and being been followed in a neurology clinic were compared to 10 normal controls. Demographic and clinical parameters were compared between the two groups (Tables 8-10).

TABLE 8
Comparison of Autism and Control Groups.

| | | Mean | | | Mean Age at |
|---|---|---|---|---|---|
| | | Maternal | Mean GA at | | Collection |
| | | Age in Years | Delivery in | Mean BW in | in Hours |
| Group | N | (SD) | Weeks (SD) | kg (SD) | (SD) |
| Case | 14 | 30.93 (8.10) | 39.21 (1.05) | 3.24 (0.39) | 32 (16.6) |
| Control | 10 | 32.0 (16.6) | 38.8 (1.23) | 3.52 (0.13) | 30.9 (8.1) |
| P-value (2 | — | 0.24 | 0.39 | 0.12 | 0.8 |
| tailed test) | | | | | |

TABLE 9
Newborn Gender.

| | | | | P-Value* |
|---|---|---|---|---|
| Gender | N (Total) | Case N (%) | Control N (%) | (Overall) |
| Male | 15 | 12 (85.7%) | 3 (30%) | 0.01 |
| Female | 9 | 2 (14.3%) | 7 (70%) | — |

*Fisher's Exact Test

TABLE 10
Maternal Race.

| | | | | P-Value* |
|---|---|---|---|---|
| Race | N (Total) | Case N (%) | Control N (%) | (Overall) |
| White | 14 | 11 (78.6%) | 3 (30%) | 0.035 |
| Black | 10 | 3 (21.4%) | 7 (70%) | — |

[0152] Highly significant differentiation in methylation levels were identified in cytosine loci when autism was compared to the normal group. The top 100 differentially methylated cytosine loci located within known genes and the associated genes are shown in Tables 5 and 7.

[0153] The cytosine loci were ranked based on FDR p-value significance level and area under the ROC curve of each locus. We found highly significant differences in cytosine methylation levels (similarly highly significant methylation differences were found in a large number of loci both intra- and extragenic in location however these are not presented in the tables). Different combinations of these methylation loci were used for the prediction of autism (Tables 1-4). Both complex models in which a relatively large number of marker loci and parsimonious models in which a smaller number of loci were used for autism prediction are considered. In each table the percentage contribution of each locus to discriminating autism from normal cases are provided. The inclusion of demographic and clinical characteristics such as maternal race, gestational age at delivery, newborn gender, birth weight and interval from birth to specimen collection did not contribute to autism prediction when considered in the predictive models (Tables 3 and 4). As shown in Table 6, multiple different biomarker combinations were very sensitive predictors of autism status.

[0154] The data shows a strong association between cytosine methylation status at a large number of cytosine sites throughout the genome using stringent False Discover Rate (FDR) using Benjamini-Hochberg test, analysis with q-values <0.05 and with many q-values as low as <1×10⁻³⁰, depending on particular cytosine locus being considered (Tables 1-4). Importance of methylated sites were ranked based on (low) FDR p-value and (high) AUC. A total of 14 cases of autism and 10 normal controls were evaluated.

[0155] The cytosine methylation markers reported enable population screening studies for the prediction and detection of autism based on cytosine methylation throughout the genome. They also permit improved understanding of the mechanism of development of autism. Understanding the mechanism is crucial to the identification of environmental factors including toxins, pharmaceutical agents, and recreational substances e.g. alcohol and narcotic drugs that contribute to the development of autism, and monitoring and mitigating the impact of such agents on autism development and severity. In addition, understanding the mechanism of development of autism can play an important role in development of specific therapies including pharmaceutical agents for autism treatment. Based on the above discussion, gene ontology analysis of cellular pathways involved in autism was performed (Table 11).

TABLE 11
Cellular pathways.

| | | | | Fold | |
|---|---|---|---|---|---|
| Category | ID | Pathway | P-value | Enrichment | FDR |
| GOTERM_CC_FAT | GO: 0044459 | plasma membrane | 6.56E−10 | 1.288033872 | 9.82E−07 |
| | | part | | | |
| GOTERM_CC_FAT | GO: 0005886 | plasma membrane | 1.35E−06 | 1.154598265 | 0.002024726 |
| GOTERM_CC_FAT | GO: 0045202 | synapse | 2.90E−06 | 1.620713951 | 0.004346224 |
| GOTERM_CC_FAT | GO: 0031012 | extracellular matrix | 1.88E−05 | 1.572935987 | 0.028194889 |
| GOTERM_CC_FAT | GO: 0005578 | proteinaceous | 6.90E−05 | 1.552800512 | 0.103228181 |
| | | extracellular matrix | | | |
| GOTERM_CC_FAT | GO: 0031226 | intrinsic to plasma | 4.42E−04 | 1.226904108 | 0.660518374 |
| | | membrane | | | |
| GOTERM_CC_FAT | GO: 0005901 | caveola | 4.45E−04 | 2.388923864 | 0.664168038 |
| GOTERM_CC_FAT | GO: 0030054 | cell junction | 5.18E−04 | 1.363157531 | 0.773145321 |
| GOTERM_CC_FAT | GO: 0005856 | cytoskeleton | 7.04E−04 | 1.202519395 | 1.049170132 |
| GOTERM_CC_FAT | GO: 0005887 | integral to plasma | 8.66E−04 | 1.21626409 | 1.28909368 |
| | | membrane | | | |
| GOTERM_CC_FAT | GO: 0009898 | internal side of | 0.0010998 | 1.448314934 | 1.634576305 |
| | | plasma membrane | | | |
| GOTERM_CC_FAT | GO: 0009986 | cell surface | 0.001598077 | 1.409074874 | 2.36690154 |
| GOTERM_CC_FAT | GO: 0044420 | extracellular matrix | 0.00242136 | 1.732319059 | 3.565755828 |
| | | part | | | |
| GOTERM_CC_FAT | GO: 0019717 | synaptosome | 0.003600736 | 1.846053859 | 5.259227243 |
| GOTERM_CC_FAT | GO: 0005581 | collagen | 0.004254465 | 2.428439898 | 6.185924151 |
| GOTERM_CC_FAT | GO: 0044456 | synapse part | 0.00519834 | 1.435194311 | 7.50900302 |
| GOTERM_CC_FAT | GO: 0015629 | actin cytoskeleton | 0.005579245 | 1.409703458 | 8.03798951 |
| GOTERM_CC_FAT | GO: 0044433 | cytoplasmic vesicle | 0.00570152 | 1.503415074 | 8.207200255 |
| | | part | | | |
| GOTERM_CC_FAT | GO: 0005884 | actin filament | 0.006343642 | 2.232524484 | 9.091046234 |
| GOTERM_CC_FAT | GO: 0000267 | cell fraction | 0.010043393 | 1.171184523 | 14.03078185 |
| GOTERM_CC_FAT | GO: 0031225 | anchored to | 0.0149852 | 1.396777494 | 20.23877552 |
| | | membrane | | | |
| GOTERM_CC_FAT | GO: 0044421 | extracellular region | 0.019058687 | 1.164600384 | 25.03869134 |
| | | part | | | |
| GOTERM_CC_FAT | GO: 0012506 | vesicle membrane | 0.019434305 | 1.472156637 | 25.46744234 |
| GOTERM_CC_FAT | GO: 0005626 | insoluble fraction | 0.019875422 | 1.17670348 | 25.96803535 |
| GOTERM_CC_FAT | GO: 0042734 | presynaptic | 0.024882943 | 2.254519799 | 31.43500872 |
| | | membrane | | | |
| GOTERM_CC_FAT | GO: 0030659 | cytoplasmic vesicle | 0.029219251 | 1.458139064 | 35.86237471 |
| | | membrane | | | |
| GOTERM_CC_FAT | GO: 0005624 | membrane fraction | 0.031562903 | 1.163766957 | 38.14271008 |
| GOTERM_CC_FAT | GO: 0045211 | postsynaptic | 0.033468218 | 1.452912759 | 39.94055046 |
| | | membrane | | | |
| GOTERM_CC_FAT | GO: 0043005 | neuron projection | 0.034042287 | 1.261740028 | 40.47260211 |
| GOTERM_CC_FAT | GO: 0030934 | anchoring collagen | 0.036088032 | 3.632281898 | 42.33306135 |

[0156] There was over representation of pathways related to plasma membrane, nerve synapse and proteinaceous extracellular matrix. These were statistically significant (FDR) when controlled for multiple comparisons.

[0157] The cytosines evaluated include those in CpG islands located in the promoter regions of the genes. Other areas targeted and measured include the so called CpG island ‘shores’ located up to 2000 base pairs distant from CpG islands and ‘shelves’ which is the designation for DNA regions flanking shores. Even more distant areas from the CpG islands so called “seas” were analyzed for cytosine methylation differences. Thus comprehensive and genome-wide analysis of cytosine methylation was performed. Although sites exhibited in tables were confined to those associated with known genes, the genome-wide analysis is described above.

[0158] Numerous genes are referenced herein. Exemplary sequences can be found in the accompanying sequence listing, as follows: BCL6 co-repressor (BCOR; SEQ ID NO: 1); long intergenic non-protein coding RNA 589 (C8orf75; SEQ ID NO: 2); voltage-sensitive chloride channel 1 (CLCN1; SEQ ID NO: 3); voltage-sensitive chloride channel 4 (CLCN4; SEQ ID NO: 4); disco-interacting protein 2 homolog C (D1 P2C; SEQ ID NO: 5); glycoprotein M6B (GPM6B; SEQ ID NO: 6); integrin, alpha X complement component 3 receptor 4 subunit (ITGAX; SEQ ID NO: 7); LOC284412 (SEQ ID NO: 8);

long intergenic non-protein coding RNA 620 (LOC285375; SEQ ID NO: 9); mastermind-like domain containing 1 (MAMLD1; SEQ ID NO: 10); MIR503 host gene (MGC16121; SEQ ID NO. 11); NADH dehydrogenase (ubiquinone) 1 alpha subcomplex, 10 (NDUFA10; SEQ ID NO: 12); phosphodiesterase 9A (PDE9A; SEQ ID NO: 13); phosphatidic acid phosphatase type 2 domain containing 1A (PPAPDC1A; SEQ ID NO: 14); protein tyrosine phosphatase, receptor type, N polypeptide 2 (PTPRN2; SEQ ID NO: 15); RAP1 GTPase activating protein 2 (RAP1GAP2; SEQ ID NO: 16); ribosomal protein S4, Y-linked 2 (RPS4Y2; SEQ ID NO: 17); tubulin alpha 3d (TUBA3D; SEQ ID NO: 18); and ubiquitin domain containing 1 (UBTD1; SEQ ID NO: 19). Numerous additional sequences can be found in publicly available databases known to one of ordinary skill in the art.

[0159] As will be understood by one of ordinary skill in the art, each embodiment disclosed herein can comprise, consist essentially of or consist of its particular stated element, step, ingredient or component. Thus, the terms “include” or “including” should be interpreted to recite: “comprise, consist of, or consist essentially of.” As used herein, the transition term “comprise” or “comprises” means includes, but is not limited to, and allows for the inclusion of unspecified elements, steps, ingredients, or components, even in major amounts. The transitional phrase “consisting of” excludes any element, step, ingredient or component not specified. The transition phrase “consisting essentially of” limits the scope of the embodiment to the specified elements, steps, ingredients or components and to those that do not materially affect the embodiment. As used herein, a material effect would cause a statistically-significant reduction in the ability to predict and/or diagnose autism in a subject.

[0160] Unless otherwise indicated, all numbers expressing quantities of ingredients, properties such as molecular weight, reaction conditions, and so forth used in the specification and claims are to be understood as being modified in all instances by the term “about.” Accordingly, unless indicated to the contrary, the numerical parameters set forth in the specification and attached claims are approximations that may vary depending upon the desired properties sought to be obtained by the present invention. At the very least, and not as an attempt to limit the application of the doctrine of equivalents to the scope of the claims, each numerical parameter should at least be construed in light of the number of reported significant digits and by applying ordinary rounding techniques. When further clarity is required, the term “about” has the meaning reasonably ascribed to it by a person skilled in the art when used in conjunction with a stated numerical value or range, i.e. denoting somewhat more or somewhat less than the stated value or range, to within a range of ±20% of the stated value; ±19% of the stated value; ±18% of the stated value; ±17% of the stated value; ±16% of the stated value; ±15% of the stated value; ±14% of the stated value; ±13% of the stated value; ±12% of the stated value; ±11% of the stated value; ±10% of the stated value; ±9% of the stated value; ±8% of the stated value; ±7% of the stated value; ±6% of the stated value; ±5% of the stated value; ±4% of the stated value; ±3% of the stated value; ±2% of the stated value; or ±1% of the stated value.

[0161] Notwithstanding that the numerical ranges and parameters setting forth the broad scope of the invention are approximations, the numerical values set forth in the specific examples are reported as precisely as possible. Any numerical value, however, inherently contains certain errors necessarily resulting from the standard deviation found in their respective testing measurements.

[0162] The terms “a,” “an,” “the” and similar referents used in the context of describing the invention (especially in the context of the following claims) are to be construed to cover both the singular and the plural, unless otherwise indicated herein or clearly contradicted by context. Recitation of ranges of values herein is merely intended to serve as a shorthand method of referring individually to each separate value falling within the range. Unless otherwise indicated herein, each individual value is incorporated into the specification as if it were individually recited herein. All methods described herein can be performed in any suitable order unless otherwise indicated herein or otherwise clearly contradicted by context. The use of any and all examples, or exemplary language (e.g., “such as”) provided herein is intended merely to better illuminate the invention and does not pose a limitation on the scope of the invention otherwise claimed. No language in the specification should be construed as indicating any non-claimed element essential to the practice of the invention.

[0163] Groupings of alternative elements or embodiments of the invention disclosed herein are not to be construed as limitations. Each group member may be referred to and claimed individually or in any combination with other members of the group or other elements found herein. It is anticipated that one or more members of a group may be included in, or deleted from, a group for reasons of convenience and/or patentability. When any such inclusion or deletion occurs, the specification is deemed to contain the group as modified thus fulfilling the written description of all Markush groups used in the appended claims.

[0164] Certain embodiments of this invention are described herein, including the best mode known to the inventors for carrying out the invention. Of course, variations on these described embodiments will become apparent to those of ordinary skill in the art upon reading the foregoing description. The inventor expects skilled artisans to employ such variations as appropriate, and the inventors intend for the invention to be practiced otherwise than specifically described herein. Accordingly, this invention includes all modifications and equivalents of the subject matter recited in the claims appended hereto as permitted by applicable law. Moreover, any combination of the above-described elements in all possible variations thereof is encompassed by the invention unless otherwise indicated herein or otherwise clearly contradicted by context.

[0165] Furthermore, numerous references have been made to patents, printed publications, journal articles and other written text throughout this specification (referenced materials herein). Each of the referenced materials are individually incorporated herein by reference in their entirety for their referenced teaching.

[0166] In closing, it is to be understood that the embodiments of the invention disclosed herein are illustrative of the principles of the present invention. Other modifications that may be employed are within the scope of the invention. Thus, by way of example, but not of limitation, alternative configurations of the present invention may be utilized in accordance with the teachings herein. Accordingly, the present invention is not limited to that precisely as shown and described.

[0167] The particulars shown herein are by way of example and for purposes of illustrative discussion of the preferred embodiments of the present invention only and are presented in the cause of providing what is believed to be the most useful and readily understood description of the principles and conceptual aspects of various embodiments of the invention. In this regard, no attempt is made to show structural details of the invention in more detail than is necessary for the fundamental understanding of the invention, the description taken with the drawings and/or examples making apparent to those skilled in the art how the several forms of the invention may be embodied in practice.

[0168] Definitions and explanations used in the present disclosure are meant and intended to be controlling in any future construction unless clearly and unambiguously modified in the following examples or when application of the meaning renders any construction meaningless or essentially meaningless. In cases where the construction of the term would render it meaningless or essentially meaningless, the definition should be taken from Webster's Dictionary, 3rd Edition or a dictionary known to those of ordinary skill in the art, such as the Oxford Dictionary of Biochemistry and Molecular Biology (Ed. Anthony Smith, Oxford University Press, Oxford, 2004).

1-68. (canceled)

69. A method of predicting autism in a subject comprising:
obtaining a sample from the subject or from the subject's mother when the subject is at an embryonic or fetal stage of life;
assaying the sample to determine a percentage of methylated cytosine nucleotides at one or more of the following genes: BCL6 co-repressor (BCOR); long intergenic non-protein coding RNA 589 (C8orf75); chloride channel voltage-sensitive 1 (CLCN1); chloride channel voltage-sensitive 4 (CLCN4); disco-interacting protein 2 homolog C (D1P2C); glycoprotein M6B (GPM6B); integrin, alpha X complement component 3 receptor 4 subunit (ITGAX); LOC284412; long intergenic non-protein coding RNA 620 (LOC285375); mastermind-like domain containing 1 (MAMLD1); MIR503 host gene (MGC16121); NADH dehydrogenase (ubiquinone) 1 alpha subcomplex, 10 (NDUFA10); phosphodiesterase 9A (PDE9A); phosphatidic acid phosphatase type 2 domain containing 1A (PPAPDC1A); protein tyrosine phosphatase, receptor type, N polypeptide 2 (PTPRN2); RAP1 GTPase activating protein 2 (RAP1GAP2); ribosomal protein S4, Y-linked 2 (RPS4Y2); tubulin, alpha 3d (TUBA3D); or ubiquitin domain containing 1 (UBTD1);
obtaining a value based on the assay;
comparing the value to a reference level; and
predicting that the subject has autism based on the methylation of cytosine nucleotides as demonstrated by the value and the reference level.

70. The method of claim 69, wherein assaying the sample comprises determining a percentage of methylated cytosine nucleotides at one or more of the following genes: BCOR, C8orf75, CLCN1. CLCN4, D1P2C, GPM6B, ITGAX, LOC284412, LOC285375, MAMLD1, MGC16121, NDUFA10, PDE9A, PPAPDC1A, PTPRN2, RAP1GAP2, RPS4Y2, TUBA3D, or UBTD1.

71. The method of claim 69, wherein assaying the sample comprises determining percentage of methylated cytosine nucleotides at the following genes: BCOR, PTPRN2, TUBA3D, PDE9A, and LOC284412.

72. The method of claim 69, wherein assaying the sample comprises determining percentage of methylated cytosine nucleotides at the following genes: GPM6B, NDUFA10, PDE9A, and LOC284412.

73. The method of claim 69, wherein assaying the sample comprises determining percentage of methylated cytosine nucleotides at the following genes: BCOR, UBTD1, LOC285375, RPS4Y2, PPAPDC1A, ITGAX, D1P2C, MGC16121, PTPRN2, and CLCN4.

74. The method of claim 69, wherein assaying the sample comprises determining percentage of methylated cytosine nucleotides at the following genes: RAP1GAP2, UBTD1, MAMLD1, and C8orf75.

75. The method of claim 69, wherein the sample is one or more of the following samples: a tissue sample, a cell sample, a body fluid sample, a whole blood sample, a serum sample, a plasma sample, a saliva sample, a genital secretion sample, a sputum sample, a urine sample, a CSF sample, an amniotic fluid sample, a tear sample, a buccal sample, or a breath condensate sample.

76. The method of claim 75, wherein the sample is maternal blood, amniotic fluid, or placental tissue.

77. The method of claim 69, wherein the value is a weighted score.

78. The method of claim 69, wherein the sample is obtained while the subject is at an embryonic stage, a fetal stage, a neonatal stage, an infant stage, a childhood stage, an adolescent stage, or an adulthood stage.

79. A method of diagnosing autism in a subject comprising:
obtaining a sample from the subject or the subject's mother when the subject is at an embryonic or fetal stage of life;
assaying the sample to determine a percentage of methylated cytosine nucleotides at one or more of the following genes: BCL6 co-repressor (BCOR); long intergenic non-protein coding RNA 589 (C8orf75); chloride channel voltage-sensitive 1 (CLCN1); chloride channel voltage-sensitive 4 (CLCN4); disco-interacting protein 2 homolog C (D1P2C); glycoprotein M6B (GPM6B); integrin, alpha X complement component 3 receptor 4 subunit (ITGAX); LOC284412; long intergenic non-protein coding RNA 620 (LOC285375); mastermind-like domain containing 1 (MAMLD1); MIR503 host gene (MGC16121); NADH dehydrogenase (ubiquinone) 1 alpha subcomplex, 10 (NDUFA10); phosphodiesterase 9A (PDE9A); phosphatidic acid phosphatase type 2 domain containing 1A (PPAPDC1A); protein tyrosine phosphatase, receptor type, N polypeptide 2 (PTPRN2); RAP1 GTPase activating protein 2 (RAP1GAP2); ribosomal protein S4, Y-linked 2 (RPS4Y2); tubulin, alpha 3d (TUBA3D); or ubiquitin domain containing 1 (UBTD1);
obtaining a value based on the assay;
comparing the value to a reference level; and
diagnosing the subject with autism based on the methylation of cytosine nucleotides as demonstrated by the value and the reference level.

80. The method of claim 79, wherein assaying the sample comprises determining a percentage of methylated cytosine nucleotides at one or more of the following genes: BCOR, C8orf75, CLCN1. CLCN4, D1P2C, GPM6B, ITGAX, LOC284412, LOC285375, MAMLD1, MGC16121, NDUFA10, PDE9A, PPAPDC1A, PTPRN2, RAP1GAP2, RPS4Y2, TUBA3D, or UBTD1.

81. The method of claim 79, wherein assaying the sample comprises determining percentage of methylated cytosine nucleotides at the following genes: BCOR, PTPRN2, TUBA3D, PDE9A, and LOC284412.

82. The method of claim 79, wherein assaying the sample comprises determining percentage of methylated cytosine nucleotides at the following genes: GPM6B, NDUFA10, PDE9A, and LOC284412.

83. The method of claim 79, wherein assaying the sample comprises determining percentage of methylated cytosine nucleotides at the following genes: BCOR, UBTD1, LOC285375, RPS4Y2, PPAPDC1A, ITGAX, D1P2C, MGC16121, PTPRN2, and CLCN4.

84. The method of claim 79, wherein assaying the sample comprises determining percentage of methylated cytosine nucleotides at the following genes: RAP1GAP2, UBTD1, MAMLD1, and C8orf75.

85. The method of claim 79, wherein the sample is one or more of the following samples: a tissue sample, a cell sample, a body fluid sample, a whole blood sample, a serum sample, a plasma sample, a saliva sample, a genital secretion sample, a sputum sample, a urine sample, a CSF sample, an amniotic fluid sample, a tear sample, a buccal sample, or a breath condensate sample.

86. The method of claim 85, wherein the sample is maternal blood, amniotic fluid, or placental tissue.

87. The method of claim 79, wherein the value is a weighted score.

88. The method of claim 79, wherein the sample is obtained while the subject is at an embryonic stage, a fetal stage, a neonatal stage, an infant stage, a childhood stage, an adolescent stage, or an adulthood stage.

89. A kit for diagnosing or predicting autism in a subject comprising one or more probes and/or one or more microarrays designed to identify and/or assay methylation of cytosines at one or more genes in a sample from a subject or from a subject's mother when the subject is at an embryonic or fetal stage of life, wherein the one or more of the genes is one or more of the following genes: BCL6 co-repressor (BCOR); long intergenic non-protein coding RNA 589 (C8orf75); chloride channel voltage-sensitive 1 (CLCN1); chloride channel voltage-sensitive 4 (CLCN4); disco-interacting protein 2 homolog C (D1P2C); glycoprotein M6B (GPM6B); integrin, alpha X complement component 3 receptor 4 subunit (ITGAX); LOC284412; long intergenic non-protein coding RNA 620 (LOC285375); mastermind-like domain containing 1 (MAMLD1); MIR503 host gene (MGC16121); NADH dehydrogenase (ubiquinone) 1 alpha subcomplex, 10 (NDUFA10); phosphodiesterase 9A (PDE9A); phosphatidic acid phosphatase type 2 domain containing 1A (PPAPDC1A); protein tyrosine phosphatase, receptor type, N polypeptide 2 (PTPRN2); RAP1 GTPase activating protein 2 (RAP1GAP2); ribosomal protein S4, Y-linked 2 (RPS4Y2); tubulin, alpha 3d (TUBA3D); or ubiquitin domain containing 1 (UBTD1).

90. The kit of claim 89, where the one or more microarrays comprise one or more probes that identify and/or assay for methylation of cytosines at
(a) one or more of the following genes: BCOR, C8orf75, CLCN1, CLCN4, D1P2C, GPM6B, ITGAX, LOC284412, LOC285375, MAMLD1, MGC16121, NDUFA10, PDE9A, PPAPDC1A, PTPRN2, RAP1GAP2, RPS4Y2, TUBA3D, or UBTD1;
(b) the following genes: BCOR, PTPRN2, TUBA3D, PDE9A, and LOC284412;
(c) the following genes: GPM6B, NDUFA10, PDE9A, and LOC284412;
(d) the following genes: BCOR, UBTD1, LOC285375, RPS4Y2, PPAPDC1A, ITGAX, D1P2C, MGC16121, PTPRN2, and CLCN4; or
(e) the following genes: RAP1GAP2, UBTD1, MAMLD1, and C8orf75.

91. The method of claim 69, wherein the method further comprises obtaining cell free DNA from the sample.

92. The method of claim 79, wherein the method further comprises obtaining cell free DNA vrom the sample.

The application's sequence listing, which the Patent Office published only in electronic form, follows.

SEQUENCE LISTING (19 sequences)

SEQ ID NO: 1 - DNA, 126145 bp, Homo sapiens
attattatttagcacagtcctccaccccagctctgcctggtgccacagtccaccgcttggtggtatttccgaagctggccaggccctctgctgctgaccctggaaatcgggtcacactagacaaggctgcatgtgcggggagaaggcgggggggctcctttgcacgcggctgctcgcgtttccccaaggcctccaaatagtctaaaaactcacctcggaggaggagaaagagcgtgaagtggctctttcgatctgagacaccccctcccggagaactcgccccctcccccccagcccagagcggagtgaaatcttagaagccgtggctgctgggtttgaacggaatgctggagtcagtggaagacggagctggtcggcccgaaggtcagcgagttgttttgagttctcctacccggaaggtagggggtggggtggggtggggagcagggagtagaggacgccagggcccccgagagaccccgcgtcagagcaaaaattgtttgtgccccggaacaggcagctcagcggaagccgcgacgggggcgggtcacgtgcggcggtggcggcgcagctggcgggggagccgggctgggacaagggccgggccgggcgggggtggcgcggggcggcggctctcgcagccgaaggtggaaccggctgactctgggcgctgggagcgagcggctccccgagcccggagcgagggaggagcgcgagttatggagggaccggtgtgggagccagggcgcgcggagctccgcgtggtgcggcacgggccggacgaggaatcgttggggggcgggggcagggacacggaagcgggctcccggggcgagagcggaaccgacgcggaggctgcgagggcgtctgaaccccaagaatggagtcgccgctcttgtagtcgccggccttgttttcttcttgcacgcaaatcccggaacgaccggaaccgccatccccgcctgcgtcccaggggcgccccattacgcatggcgggggggcccgcggggctactccgggaggggatccgtgaggccgaggccggggagggctgcgaggtggctcgcgggggtgcaagccggagcggggctacacaccacacaaacagcctccctttcccccggaagagcgggcgagggaagacgcgggctagctctgggggctccccaggactgtgggagccaggcgaggaccgcaaggcggaagggagtgctgcagacaaaccatcggccccacctggaagacattggtggcctcgtggccggtggtgaacggtctcacgcttccccaaagtggcgtgcgctactctagcgtgggagggaaaggacacaaacttggccatctgccagaacccttgaagacgcctgtctttggtgtccctccgccccccgcagtggcccgaaatgtactctccctcccgtagtccacgaggttcaggtccgaaacctggaaaagtagggtagcgtggtctggcctcggacgggaaacccacccacgttcttctgaggtgccacgcggggaaggcgcggaacagtcttcttgcaaagtttcccgcccctcaccccagtcgagtaagggcggctcttccggaggtgggggcggggaacggtctcgtagcggggagtggtgctagttcctcttccctgcgaccgctcgggccgcctgcgcgttcgcgtccccagacgctgcaccccagtttgctgcaacgtctgcttggagtcgcggtagcgggtgctgcgcggagtctaggacgacgcgagacgccatttgcatcccccctccctcctgcaggttggcgagggcggcggtgtcgcccgccgcggaagcgtattcctggcagtgacactgattagatgctgtgtcgatacgtgcacagaatcggggtgggccttcacctctcgtgtgcgcacacactttctgttggaaaagttgcgatattttttctccccctctcgccgcacagctgctgtctcccgggcggaattaggcgaccacgtttgctcaacccgaaggagagaggatcgcgcgggcgctgggcggccgccgggcccgggccgcgaaaatccagccctggctttgcgtcgagctgctgagtgccgcgcttacgcgcgcggggccagccggggcctggtttccatctgccccttttgcctccgtgttaagttcgccggggaaaacccaacgatccgtgctgagcccctcggaggagagcccccgccccaccccacccccagcccgatcccgaccgatggaaaaaatgacagtataggtcagaacaggctgcccgcgagtattaatatggacggcctccgttcctggtgcttggggaggatgggcgcttcgccaggaaaccgccgaaggaggcgccatgagggccgcctgccccttctcgggctagaaaacgtggattctcagagggaccagacaaatgtggtcagatagctgcaggaacttaccccatctaaatacaggttgcccgtgtatattccaaccaagatcatttttgtttcaatctaatacacgttgaatcaattagaaatactgtgagaaactgtggtcaaacggtagataggaaacttgctctttgcctaacattaaatgtatgctcaggaggtgcggggctgagcactatcggcgcagccagtctgtgtcctaagaagacagggtcccctttgcgttccaccttccaggaccttaatagaacgcgaagagaggaattattttagttgtagtttctattagagggttgcttactccttgcaaactcccgcctggggttgtcggtagttagtagtagatggttctgcgttttggcttttacagtccacgtttttctcttggctttttcttttcctgcgtacacgctgctgggtacggggagggggctgcccagacgtgtgctgccgccgccctcgggctctttcttgcgcaccacgcggcctcggaggaggggaaatgtgaactctccgggtggcgctcgagaactggaattctgatttagggctgcgggtttgttccggaggctggctgggagcgtcttgtaggggccggaggctgtgaaggggaagccccagaggtgaccctgaggcctcagaagcaaacctggaggcgcccgtgttctttgtctttctcggggctggcagcttggcacgcacagttccgataaggatctactgagagctagagcgcactgccagcacatttcagtgattaggcaaacgccggtagccacttaaggcaaaggccatttgcgttgtgtttgaaaaggaaaaggcagcctcacctaatgaattatgggtgaccctggagaggccaagcaggggaggccgaggcctccctaggctcttatttgccgcaactcctcccctttttgccagagtcgccatttcaaaggtaatgggaagccttttgaaattagaagtctgaccgattctgtctacagaagtggtatttgcatctgtgcaccagtaaaatgtggcccgccagcggcccagggacaaggcctgccatacgccagccctgcaccagtgttagaccaaagtacatcccagaggacatggcttttggccaactcctccgagaactgatttaaagaggtggccttcagccatcaaaaaaggtgtcctggaagagtaggctggaggtcctggaaaccagcgctcttccccagggctgcagggagagagtgggtaatggtgcctgagccctgacggaacttgctattaatccagtctaaatgagcaccattaaaaaggactctccctcctatccaccaccacacacacacaagcctttatgggacggtctagtggagacctagacagtttgagggcatttggccttcacttttcagtggccatacaatagtgccctttccaccctgccaagaccactggctccatgtaaacttccaggaactttaacccggaactttgtactccctacccatccaaagggagtgccagatcatagtaacaaacacacgtagcattgtactggaggcagcgttctaagcaccttatgtatggaggcatgttatcctcagaacaaccctacgaggtagataatagtattggtcttattttacagatgaggactccgaggtttcgaactgttaagcggtttgcccaaagccgcacagcttgggataatagggcctggattgaccagagggagagatagggcctggattgaccagagagagaaatagggctgtgttgcctctctagcgttttgtaatgaaagtgatctgtttgggggttgtttcgagaggactgcctggaccccaaccttccaaaggaaaatatgaagagactagaaggcccaacatttggcctttattttgcaaaagaaagttctggagagtcgtacagaggcatcttactgtggctcctccgcggcaaggaaggggtcagggaaggcaatgcaaaggcccccctggcccacctagctgcatagcatccggcggtcacgtccgccggaggtgactggggactggggacagccgattgccgaggaactccttatcgcccagtgtcagtgctcccgggtgccggagctaaacgtccgcctgcgggggcggctagttcacaccagtcccctggctcccgacgcgcccccgggcttctcccgcggagctggctagatgcccggcggcggctccgaagctccgggctccccgccgcttgtcccgccagcccgaggcatggagccccacggcccaggactggagagcccagttcgtcagtccaggttgggactgctggttccgggttgctcacgatcactctcccctcaacacccgtccggccagggcgcgcgcgcagacacataaacacacacggcttccaagcgcgcagcccgcctcccgggcctccgcttttccttcctcctccccgctcgggcgcttcggaagcccgtggcggttgtgtgctgcgccagggaagagtccgggtcggggagaccgcgctgccctctttccccccaaggtctgcgcgcacgctagtatccttaggaagcacagtcaggcttgtgggttcccatcttcccgggaaatgacggctgctggcgaggacctgttcgctccgtgtttcgcaatggcccggggatcagaggagaggaccgggcggtggggcctgcgcgtggatgagggtggcggtaaatcccctctcccgcgaaggtggctgagcctccggccaccgctagtagtagtctaccctgctcgtcttgcattggccgcagcttgactcccctgcgtgccgcgggtcggtgtgggtgtccccactccctcaagcctttactttcagctcgcgaaaccccatggatccgcggctgggctgggcagcgcagacgcccagctgccctcgccaaccccaggcccagagggggccaggctggcctgggggctgggcggcccggctgcacttgccggcgttgagagaggctctgtgagccggagccggccgccgagccgagggagagagcgcatcagcccgcgcgccttaaggcagaacacacgcctttcccggaaccttgaaacccaggggagccgctgccatcttcgcgtgacgagcagcgagacgccggtgattaagtgtttctttccggctccctctccgggttgcggctctcctcctttccacagggctggaagaataaaaacctggggaaaaaccacacacaactgcgctctggtctcgctcgccatgtccgcactggtttcttagggtgcgcccacgcggggcaccccctgctcccctactccacgcctggccggggtcgagggctgcgtgcctcggtttccatccgctctagcgcaaatctcggagtttaatggggagggggcacacattgctgaagccacccgacccccattctccttacgccccccccccatggggattaaacctaaacacatgaatcccccacccatacccgggactaatccagccgcgcctcctgggattaactcggctcacaggtccataaaacacttccggcgcggccagagggtctgtctgcagaaacactttaaaattgtcctcccgggcctggagtcggaattgactgggtggagggaagtgagtaaacagacagttgtaagagacaatccgtgaggtttgcaggctgtgaaaagagctgcttaaaatatgggctgtcggggttgcctccagcaggagggtggcccgggtcctagcagacagatccaagaaaaggatgcaatatattctaaatgacattgacctggaggaaggagggtgtaggcaggagcaggctggcttcacatggcttctggctccagttcagtgaggaagactagcttccagaaatttgtgggggcgagtggccagtctcttcatgtgtaaaatcagaacagtaacacctactctgtccccctcggatgggtttctgaggaccaaaatgtgaaggcactttgtaaatgcggctcaacccttctgcttcactgtggttaatgttcagtctctcttaggtagaaaaaccagtgacttgctgattagaaaacaaagtagaaatcagccctttctcaaatctacgcaacaatgttcgagataaagggaacccaaaagcaacctaatattttgaacctccttttacatcatttcgagataagtttctgaagtaatgagagaatctttggaatgttctaagaaaatctgtcaaaaactggaggttaatggggaagaaagggaggctttaaattgggtcaaatcacattttaagaaggctgggcgcggtggctcacgcttgtaatcctagcactttgggaggcgagatgggtggatcacgtgaggtcaggagttcgagaccagcctggccaacatggcgaaaccccgtctctagtaaaaatacaaaaaattagccgggcaaggtggcgggcgcctgtaatcccagctactggggaggctgaggcagaattgcttgaacccggtaggcagaggttgcagtgagccgagatcgtgccacttcactccagcctgggcaaaagagcgaaactccgtctcaaaaaaaaaaaaaccaaaaccaaaacaaaaccggaagaagaatataaatttatagtagcttcctggctatatccccttctgttagtctgcagaagagatgcccgttggtagccattcccccagccccaggaccgaaggacgtcttgactcaggcttggtctgctaggtgcaaggtgttgttggcgtctggggtggggacagtgaagaaaggcgatcattttgctttaaatgaacatcagaagacccaggcctgctactgcgtcttgaaggcctggagttgttaaaactctgtgggagggggtgcctcgtgacctccttcctcgcagatgggctcaggcagcgtgaccggccccaggtggtgcccaggcgcgctggggatggaggcccaggctgcgcgttcaccctgcctcgcagatagcgagtaggggcctccggctggaccgcccaccggccttactctcccttccctggccttggggccttggaccagggttaaccctggtcccgtctccacctcattgccccccgtgcagcgccgtccccgccctggctcccggcccagatcccgaggcctccctcgcccagcagtctcggttcttccccctcgtgattcatttagcagcggtgcagaaagcctgtttacctccgcagccctgggcgactcgatctgcgtaaaaagccccaacgccagctccgaccagtaggggggggattgtcctatagattatttctcctcctggtttttgtttttgtttttttttaaaccagaaggcttggttgaagagggggtggggtggcgtgttgctgctgttttttaaaacaccgtatttgaaagagaaacaaaagccacacaaaagccgtttaggaggtaccaagactgtttttacatataaaaagtgcagcgaataccaaggggcccccaacagtgataaactaaatggttggccgatttcgacaattaacagttaatctgttatctgcgatcagcaaacaagttttgaggctcgaaggacaccgaattcctgttccagtcgatagcgttgtactcgaatctgttgagcacatcagatgctccctgtttctcctagagcgaatccagctttagcaaacatgggtttcccaggttgaaggaccgacttgagccagagaaaattctcttgtgcagctgaggagcctctgtctgcatcgcccctcgagcccgagctcatctgtttggtttagatttctccaaattggttttcaccccgatttcgcggacctcctaattttgcacgtaataggcctccgataaatgtgtactgaatggcagaaactaaagtgaggccctcggcctggaagacggcctgacgcacggcctcgcccttggaaccccactcgggttcccagagcccccaggccgctgcagcctgcgcgcagcttcgccctgcgccggccagggcgggcgggcgggggaggccaggaggcacgaagcgcctggagcctgcacgatgataaatattgcgcagacagcccataaataatttgcattatgttcagctgacaacgcggggcgattaattttaatagctacatatttgcctgggctgctgctttcgtaggccccgtaatgaaaggcgagaggccgccctggctccgtgctcgcggtccaggaaggcagccgggggtgcgggaaggcccgatgtggcgtctcctccaggcagccccccggggagccccagccccttggcccccctctcgccctccgtgccttgtggaggtgaggtgtgcgcgcaccgccggagcacccccgaggcctcgagcaacaggagccaccataatgacactgcacatttgtctgtgtggggagagccacttgtggactgggagaccctccacgtagctttgtgccccacccggaccaagtccggagtttcaggttccacttaggctaggaggggggtgtttgccgccgccaattcgccagtgggccccagctcggccgaggcttctccgccctcccggcagaggcaagagacaaaacaaagcccggctgtccccgcgtcctctccgcgcgtgtagggtcctgagttctgcctcccaggagctgtccggcgctccgcggaaggcccccctaaaatgcttcctgagctccttgatgcaaaaggaccgcacacataaaggacggaagaaaagaaagggtctggaggagctctttaaaagagggggcagggaaggaagcgcagcgaggaaggacgcggctgccgcggtcccgtggtggccgggtgcgcgcgtgtgcgtgtctgtgtgtgcgttccgatgacaaagccccgccgccgccagcaagctcctggctgccagagctctggtgggggaggggaaagggaggagaggagccagcgctagcgtaggtagcggggaatcgaagcttcccaggagaaagagttcattcatgagctgtaggaggcctcgcggcccggccaggtggagcctcctgaagccaacacctgtgtattttcctttttggaaacaggcgagcccatcgatcattaccatattttaattgcctttcgcaaaggtcatctctaattatgggttgcgaggagggttggtcaggagtccgtggccctttattatctgtgtgggtgtgtgtgtgtcgccgcagagacaatgcgcccagctcttatagaaatgccaatccgagggtgtccgtgcgcgcctgcgaggcggtcacgacgtgctggatccacgcagaccaggctgcgtgcacaataaaagccgagcaggcggctgagggccgcgcagacccacgggttttctttttagaaacagtggtgcgaagagacttgacaataataacacgcagcaggattaaatcagggcgggaataaggaaatgtattttcgtttctagaaccgcggactgtgtttaacccatccgatcctcccctccccagagcattttgtgcacacgtggagttccgcgcagggacaggcgccgggcacagagtggcttgggactgcccgatgacgttccagggcagccacgttacgttcatattaatctcttcccttaattcggcatggttgtcagttacagtgacgtgaaacagccttaacgatgtctgttttatgggaaacaatacctggctagttgaaaaagagaaagcaaacgttgaggttttttaacttttgaaagtttgcatttccttagtttttatcactgtcagaaacccttgtggcaaaagcctattttaacttcctccgagggagaagagcagtggagaaggtagatggagggtcaggggttcttgggaggatattttggagatggagggaggtggagatcagtgaagagctgtgagtcaggggtggtcagcagccactctgaacttgattttctcaaaggagcctggcacttctgagccccgatgctgtttctggtagtccagcctgacaaagtcagaggctggggtcaggagcctcagagagttggagagttttgtactggtcctgcttcctgcctgcccccacacctggcctcctggcctcaccagcagccagctctgccctgaggaaggcagagccagatgactggtccaaccccccagagaccgcctggctttctcctcccctgtaatcataaccagatgcacttaagcgcctttcatcagaggaagcccaaagccctttaacaggcttcaataaaagccttttgagggcctaccagcctgctcagcgttggggcccctgtgcccactttccacctgagccagcctggggctgcagtcagggtctagcctctcccctggggccccagaagccaaggaagtttactcaactaaggcaacctctccaagcaggtagggtgccaagattcctgccaggtgtgtgggttcagacctcattaacaggaggaaagaaaggcatgggagggaagccagcagctagtgtctgtcttaaggaaggacaagaaggagcagcctatgagaaggaaccagaggggctaggaaatagagccggggtgaaggggcagtgatgatggagatgttcacaaagactcccatggtacttccaccaacccgaattcagaggtcagagctgctgtcccactgtgttgcagtctgtctcccttactaaactgtgaactccctaaggggagggactgtcttattcacctttgcaggcccggcccgggacctggcacaaaataagtaatcaagatgggagatcacaagctacgatggaaaactctggatcaagatgcatacgggcttaagatgggagctctgcccccagtggttgtgtagcctatctgagcctcagtttccttatctacaaaatgggtatgagaatgcctacatcaaaaaattggagaaagatccgatgaagtagttgcaggtgaagcaccaggaagatgataataaagtttttaataaatactgtgccctagctgggtgtggtggctcaggcctgtaatcctagctactcgggaggcagaggtgggaggatcacttgagcccaggaggtcaaggctgcagtgagctgagattgtgccactaagtgacagagtgagactctctcaaacaaagcaaaactagatagatagatagatagatagataatctcatgcccttgctcttgaaggagtgaagagaggatttggactgatattgtttgaattgtaagtaggaaggtttgtgttacaccctagctaggcacaggtctctctggcctgggatttggatcagaagaaggaattgtttctaaactgtgtgaattggagccacaggaccccactgcactgtccaacagggcaagcagctccaaagctgtgaacttgggaagccaagccagccttggtctcaggctctggggaaggggcaggtcctagacccttggactctcctgcacagggctggttgtggctggggcctagttgtgcactgcggaccaggctgctggagatgagtggctggcagataatcccagttggtgctggctttctgtggtcaagaggagaactgccccttcagctttgacctctgctccagtaatcatggctgtattttatttttggcgggttcatcctctggcatttggcagggcggggaggggaagcggggttgcctgcgtctctttgctattccttctggtctgctcagtagctccccacctctcatcccccaccccaccccacacaatgtggcctggttttctccccattgcaagctgctttatcatttttgcctgttccctggctgctctgcttgtttgagagtgggggtaagacctgggctctccccattcccctcctcggtccatcacattccagatgtctttcagcccctcctcccatctccctgagcttggcacttccccaggagggcagcctgagggtcagggtccatgggccgcctgggcatcaggggcctgtgagtgcctggctcagagaaggaggaaatggtgggggacagaggccagctgcactgctgcacattcctagctttgtgaatggaagctcatggcatttggtgtgtgacacaagtctggtagtcggggtcagaatgaaaaggtgtgggatttgtaggggaattgggaagaaaatgaagtaagctaacacttcttgcataattcatccctccctatccctgagatgagcaccctccaggagaggcaagaaaaacaagagagaagagaagagaagggagagcaaaaccagcctggtggaaatgctttgcccctctcccttcctgcctagggaactggctcccttgtgcagccaatgtaggtcaggaggggacaatagttagggtcctttacccagatcctctagggaaaatgtgagatcagatttgaggaagacacaggtcactgtcctacagggatttcagaaagaataagacactgcgttatcaaaggtgggggatttgggttatgatcagaaatttccttaaaaaaaatttcctgcctgtcacacttttgtttttaacccagttcaccttcttccatggatttagcaataagttatgaaattgatctcttcccctatagcatgtcagctacaagggagctcagaagcaatttaattctgctcctggaatctgtgggtccagaatttggtggactcaacagctggaggctggaagcatccggaggggtctttactttatgtctggctgttggctgggacctcagctgtgtcccatagcatgagcacagggctctctatgtggcatgggcttcctcacagtatggtgccttgagggtaataggactttaagttacaaatcggcagctcagggctccagaaaaccagcattgcagtaaataaggctgaagctgcatcaccttttttttttttttttctgagatggagtcttgctctgtcgcccaggctggagtgcagtggcaccatctcggctcaccgcaacctccgccttccaggttcaagagattctcctgcctcaacctcctgagtagctggaattacaggcatgcaccaccatgctcggctaatttttgtattcttagtagagacggggttttagcatgttggtcaggctgttctcaaactcctgacctcaggtgatctgcctgcctcggcctcccaaagtgctgggattacaggcgtgagccaccgtgcctggcccgctgcatcaccttttctaatccacccttgaagtctatattcattggttgcgattgtggtcacaaacccatccagattcaaggggaagggacagagatcctacttccacttgggaggagtgtcaaagaacttgtggccatggtggggtgggggtgggggtgggaaggtggtaggggaagccataccaggcacctttgagagctaagcttaattagcagtagctctaaacagactagtctacattgtaataggggtttctaccctcaagaggcctcataaattatatgggggcagggggactcagagagctaaaattaggccagggtaaaagaaatagagcctataaagcaaatatggattttaggaaaaatagaaaatatatcaagacagctgtctctatgatcttgtccaatgtgggaaggactgagggagaactgagtggtgggatcagatgggttttaggctcttctgcattgaaagggaagcaggtaaaagattagcattctatctgccgccatccttagcctactgtcttggggaagatctagtaacccttcatcgctcccaacaacattattttcactattgccttataagtcaccgccccctctaccaccagtatacagctatctttatatggtacaaagctaggaatgtagtcaatgcatttcctgtagtgtgtatggaaaaacaattaatacttactatttgtgccctccctgaggtgtggttttaaatatccagcatggatagtgttgtgactgaaagggcctgggtacatctctagggccccaggttcccattatccttgtctctaacccctgaatggagagtttgacttctaatttcatgctagaggtttcacgggcataattgtatttgcctctgcctttgatctgctatttgatctgctagtttattgtgggttcgactaggagacacagatagaaacgtggtggaaaacatgattttgttttgcttgggaattggcagttattattttctatggctcccttaacatgacacatcttccctaaatccaaaatctaatcattttcccatttttgaaaatccaaaaggcatgtgtaccctctggcctgctttcctctcccctcctgaagatttcattttcagtaagactttggaggcatgacgttcagattttagacctcagtgcagattggagccccgaattagtgtaatacacctgggtgaactctgccacacctgcccctttcctgacctcaccacggcttcccaggatgtatctggttcaccctagcctcccttgaggtgattttgggtctgcagggccaactcctatcctgagacccaaacaaagaaacccagattcagcaggtgggtcagaactaagcgacattcaggggatggcccttgaaataagctggcttctcaggcagggtcactgtattacattgtacagtttgtgtactgcacaaaggtccccagccaaaacacagaataggctactggcagctctgttctcagggcaaaggagaaagagattatgtctctgatccagaagaaaagagaaggtgacacaggacagatagaggtcaaaagggtttcttgggagcacactggatcagcctaagactggaccaagccagtgttgacccagcatgttggcgcggtaggcctatatacactctctttgttttgttacctctcatctgcaggcactggttcgtaagttattgggtccctcctaggccttatttggagtgtgggtgggagaaggacaggagtgtcaccctacttatgtgtcttgtttagccagcaagatgggatttgtttcttgggcagagggagtttctttggtttatgaatatgaagattttaaggcatattgttcactgcagaccgttatgtacttgatgtaggtgtttgagtgcaagaccctaacagggctaggcgcggtggctcatgcctgtaatcccagcactttgggaggccgaggcgggcggatcacgaggtcaggagatccagaccatccaggctaacacggtgaaaccccatctctactaaaaatacaaaaaattagctgggcgtgatggcgggcgcctgtagtcccagctacccgggaggctggggcaggagaatggcgtgaacccaggaggcggagcttgcagtgagcccagattgcaccactgcactctccagcctgggctacagagcgagactcagtctcaaaaaaaaaaaaaaaaaaaaaaaggggagaatcggcctggtttctggctcacacctgtaatcccagcactttgggaggccgaggcgggcggatcacgaggtcaggggtttgagactagcctgaccaacgtggtgaaaccccttctctactaaaaatacaaaaattagccgggcatggtggcgctaatcccagctactcaggaggctgaggcaggagaatcgcttgaacctggcaggcggaggttgcagtgagccaagatcgcgccacttcactccagcctgggcgacagagtgagacgacgtctcaaaaaaacccaaaaaacaaaaaaaaaccccaaaaaacaaaaaaacaaaaattagccgggcatggtggcatgaacctgtagtcccagctactctggaggctgaggtgggagaatcgctccagcccgagagccagaggtcaaggctgcagtgagcccagatcgcaccactgcacttcgacctgggcaacagagacagaccctgtctcaaaaaatatgtaaataaataaaaattaaaaaaaaaaaataaaaaaggccgagttcggtgactcacgcctgtaatcccaacactttaggaggccgaggtgggcagattgcctgagctcaggagttcgcgaccagcctgggcaacatggtgaaaccccgtctctactaaaatacaaaaaaaaaaaaaaaaattagccgggcgtggcggagtgtgcctgtagtcccagctactgaggaggctgaggcaggagaattgtttgaacctgggaggtggaggttgcagtaagccgagattgtgccactgcactccagcctgggcgagagagcgagacaccatctaaaaaaaaaaaaaaaaaaaaaaagtagaggatcatctgaagaaagaaattccaatcaaaattaaacaactccaaaaaggaacttttctagtgtcagtaatgggctggttgaggaggtctttgggagccttctttttattgattgactgattttttttttttttttttgagacagggtctcgctctgtcgcgccgctgcactccagcccagcctgggtgacagagtgagactacatctcaaagaaaaaaaagaaaaagtaatccggccgggcgtggtggctcatgcctgtaatcccagcactctgggaggccgaggcgggtggatcacgaggtcaggagatggagaccatcctggctaacacagtgaaaccctgtctctactaaaaaaaaaatacacaaaattagccgggtgtagtggcgggcgcctgtagtcccagctactcgagaggctgaggcaggagaatggcgtgaatccgggaggcggagcttgcagtgagccgagatcgcgccactgcgctccagcactccagcctgggcgacagagccagactccgtctcaaaaaaaaaaaaaagtaatccatgtcaaccatctgatggtggagggggatttcagatctctgtaccatactttcccttctccattcttaccatagcactagagcacaatgccttactaaattcatatccagtgtttactttgtaaccacatatatatcattcattgctgagccaaatgagcttcagtgattgcagttcctttcttgtaagatttttttttcctggagttaataattgcctcatttttatatttgcctaattttctttgacctatgactacttttcccatactttccaacctctgtacaattaatctgaggacaattttctgcatgtccaaatcttgaagaccatctgcaaatgggctgatctttttttgctttgtgtttctttttttaatccctattttctttaaatctgaaaactttttcaaaaagtttccaatcttccatttagttttattttctaaaacttttggccgggcgcggtggctcacgcctgtaatcccagcaatttgggaggccgaggcgggtggatcacgaggtcaggagatcgagaccatcctggctaacacggtgaaaccccgtctctactaaaaatacaaaaaaaaaattagccgggcgcgttggcaggcgcctgtagtcccagctactcgggaggccgaggcaggaaaatggcgtgaacctgggagccagagcttgcagtgagcggagatcgcgccagtgcactccaacctggacgacagagcgagactctgtctcaaaaaacaaaaaacaaacaaaaaaaacacttttatgaaatgcggtgggagtttttactgatttcaaatggggtattgtgttttggtgggaaattgtgtctgtcccacccagctaatgtcaagagctgagaaattaatccagagtttctgatatttgatattttgcttggttgaaataaactttcatcatttttcctaaacaacaacttttcagaagtaatgactgttagccccgggaaccgtggaaatattcagtattagtaaatctttaccctcccctcccccccgaactgattctacatttttagaaataaagattatttttaaaataattggcctttacccaggccatttactgcaagattcatgccctttatttacgttcacctcacggtgccttttatttgtgttcagtcatttacaagtctgcctttccaactagattgtaaattacttgagggggccaaaggtgtcttttaaaaattcacttctgtacttttggatccccctaggtcctaacacagcgcctcgcccttagcaagcgctccataaatgcatgttaaattcaaaaagtggacaaataaagttccagtgttctccaatcaggagccctaaaccgtggtaactctcaaatcctctctggcctcaacagcgccctgtgaacggtgggtaggcctcgccccccacccccagctgcctcggcaggttgcctctggggacagagttctggggtgcgcgggagaagcgataacacgttgaccatcgcgggagtccgggaaccagaggtcgtttctcaggattaaaatccgctccagcgtttcgaggaggggcgacactacaggccacgctttcaccagggacggccgccccatcgtccccgacctgggtcagcgtggcccgcagcggggaggggggcctcgggagggagcgccccccggcagcccgggaacgcccgcgcggcagccccggcccagcctgcggctccgcggtcctaccgccgggggcagcgccgcctgcgcagccgggccaagatggcggccggtgcgcagccgcccgcgtccgggggagaagcggcgacagccccgtgtcagccggggcgcgcgctgtcccagggcgcgaagccgctcctcctttacccacggggaccccgagggccagtcctgccacttcgtcctgacaggccccctgcccggagccctacctggacgggccccggctgggatcgggacggccaggaggatggccgcctggctagacatggtggacaggggaccagcggggaccactgggtgccagccccacacccaagccatttcttccagccctgggacacctctggtgcgcaattcgacattagtaaccgcaggtagggcttcatgccccgtaaaaacacagggctcaaagcacttgaaatcaggaatgtcttggaaaatctgctacttctggttgtgaaatccacggtattctctagtaaaggcagtaaaggctacagaatatgtgcggttcctcacatttgctgtgacatcggtatgcgcgcagtgtaggctgcctgcctcctaggacactccaaaacctgaggtccaatttaccagaaatggcattgatgaatgcggtgcattctgagtgatctcccgctgggctcaggttgggaggtcagaagggcccccaaagggagcagctaatgcaggtagaatcacaatggtagaaacagagaagtacccagaaacggttccccattaccctttgtaaactgggttgacacctcccactggttcaaggttccaaccaaagtttgcatgttgtttatcagctcagcttgagaggcagaatgtgaactttttggttttgttttggtgaaatagtctttctgcataacatttgcaccggcttgttattcttatggaaaacacttcctccacctaccctgggcagcagccacaccagcctttacttccttctgcaggccctcttaattacctctctcttgctccagtttaggcagcccccggcactttgttcaagtacagcaataaacccaagactgggcctaatcctctgtggtcctgaccttccccacagcgggcctggagtctggagggcctggagtctggagggccttcctgctcccctgattagggccaaggacgcagcttgatgtgttttgtgttttctcccctctgcacacttggtacttttcagagtgcttcactaaaaaatcagatacaagaaaaagttcacatcagccctttggagccaggcctccgtgagctggggtcaccccaccaccaagccaaccattcgacttctaaactgtagccagggccaatgggttaccgctgaccttttgcacaccgaattcctctcctagcgttagctcgggtggccagggagcctcagctgcacccacctcctgcccggtccagtcccgatgcccctcgcgggaagcgcggtaaccttaaacggcacgacaggcggctggccgagctggttcggtgacgactccctggagacagcggcttcgagcagcaggccccatctgcagcgcagctgaacgagttaagctgccccaggcgtgagcgtaccaggctggggcctggacaggagagaaccggcggggggccccggggcgcctaagccctaggatttccaagttgcagggggaaaggtgaacctgactcccctcccgaagggctgcgtggggggctcagaagactcctgtcaggggttggggaggcgcctcgaagcggggcccagagtgaggctgctgaaagggggcctggggggtaggcggtgcgccctcgaggccacctggtcagtaaaggcgcttctgtgctgtacaagcaagacagcagttgtagcacccgaccctcgggctccagtggcccacggtgcaggcgggcaggggaagagtggctctgcgcgcagccccgggtgccctaaggtcacctcctcatcccctgccgctgctgtgccgccccagccctacccccgccccgaaaaaacccggccgcgcgggccagagcctaagctgcacgggctcctgaccccggctcgccaggctcagcccagtccgaccccgcctcggcttcacaaaggccacgtgcggccagggccgacaaggaacgaccacgactctcagatctttaattacgctaggagtccctacccttccccccaacccatcgccggcttccagccctttaatcaatttcacgatattaaatattaatttcctgccagccacggtttctcggaggagggggaggggatgggcagggcagctccgaggctggaatggctttgcagggtgtgaccacgacagcagggcgcggaggacgcgcggattcctaagtgagctgtgcccagaactcggagccactgggttttcgctctgtagctggggaacttggagagttatgagcgcctgggtgcaggcctccaggaggggcagcgaggtgcgcggagagtccgggtgtgctgggcgaccgcctcctgctccgcgcgccccccctccccaccccagccgcgagtcagcctcacgcgggcccgcggcgcgctgcgatgatggatcgcgcctggcgggggtgatttggtgttgatcgcacattatcactggcaggttggactggttgctgatggacgacttctagcggcggcggcagcagcgtcttcagacaccgcgctgggactcgctcgctcggcgagggtctttcccccccccacaccccctccctacttccaggcgccaggagggcctgagagtccgagtggggtctcctcgcgtccaaggccgcccgctcccgtctgggtccgggtgtgggctgttggctgggtgaggagaggagccaggacgcctctcccacttcctcccactcctccttcccttgccgcctgctccccacccccttcctgcttccccaccgaaacccggaggccctgggtcactccgcgggtgatatccacgccgcctgaccctggccgcgggggtgcggactcctctgctccgcagcccccgaccctctcccccggtcgcagcagccgcggcactgcggtgcgccccttctcgcctctttttctaaagtgcctgcagatacaaaagcggtttcgtaatgccttccgtctgcgagagccggaggaccttggctgacctttcggaaactgattgcaactgcctgttaacagcccgtactgaccgcactgagcggagcggaggacaatcatttaagtgacagacggcgaggtggccccggctcagtcgagcggcctggttaagcccgccccgcccctcccccgaccccctcccctcccgcagctactcccccagccccgggcgcactgcgggccgcggcgggcgctcgggcaggcggagaggacgcgcgcgcgcgtgcgtgtgtgtgtgtgcgcgcgtgtccacgattaccggccgacgggttaaccctttgccgagcagccggtccctttgaggccgggtgctgccggattaatctgccatctgcaaaagaggaataacagggccgtctccgccgactttccctaatgggtaaactgtaccctgttagcgtgacccacgctgcgtccctgctgctgccagggaaagatccggacccttggctcttctgccgcggccctgggtcccctccctgcactgcccttcctctgcacagacacagacacaaggaacagcacgaggggtccaaaggctcccaggggctcgcggtgcagtggacgtgggtgttcccggtgttttctattttggaaactggagaaaggtggggtgggggggacgtagagaaaagccgaggtgggggaggggaggctggtgacagggcacctcgggcttcgctcgctccctctctcgggagagatcgccagctgctctccaacaggcagcgccctgaaatctatttaaagagagggaaaggggaggagaacaaagggggaggagggggacggcgagcggagcctgggcgagagcgagcgagcagggaggatccgccgctccgcgggcacatcaagcgctcacatctgtacactccgcgatcgatggggagaatggataatatttgtcagctgcagacctttctcttcccggttcctggggaggggagggggcgaggagggggaggggcgggcaggccaggcgagagaggccgcctcaaggacagcgcgcttcccgctgcagccacacggaaacccagagccatgaaagccgggggatttttctcttattatcattattaattattttttattattccagagcagccagcgaacgctcggtggcgcccctcccccgccgcctccctttgttgattctcagctgctagagcggcgggcccgagccgccaccgccgcagagcacgatctgctcttgcgccctcggtcgcagctgcggcccaggaagccggggctgcgtccccgccccctgccccccacggcgcggcagccctcgcaccccctcctcgcctcccgccacgaggccagccctgcctctccactgcctctcgctgcggctccgagtccccaacgcagagcagaggcactggctgctgcggccccgagcctccggccgcgcgggggcctttgccaccccctaacccccgcggctgcactctgatgccgccgtcctcacacatggtcttcattttgcacactagcggcgtgcttcctctcagctcctctcctcggggcttttcggagcgaggagggaggtttagaggaagttagaaacccagcgagcccaggggaaagggggaaaaccctcgctcttagtctcagcttccgaggcagagggagcgccccgcggggggtggggcagagtctgggtgccctccccttccttggatgcaggaaaggttaagtgaggggtggcggtcggaggagcgacagatttgcttttgctcatccacatgcctgctcagaccggcctgggtatcactgacccggcactctcggaacggcagaacccggatgggagcagatccgccaagcggtcatcaaacaagaccaaagacatttcagctgtcccccaccctcgggccttgggcgagggtgggggtgccccctgggtctttgcttcctcgcgcaccccaaggttggaaggccaaagccgacgcctcacagaccgggggtccgggccccctctctagggcggaggtgtgcagaaagctctagtgcgagtttacttgcggcctggctaccccctccccccgccgctgtcctgcgattccgggccagcctgcggcggcgtccccgactgctccgcggtcctgggcagggcaggaagctggcacggccgacggctgggcaggcgccacttggccgggcaggctgctcgctggaactcgcgcggcaccttcgcgccgaatcgggttcctgggtctccagcccggtcaccctgagcggtttcaccccccactttgaccatcggcctcccgcggaagtctccctgtctcctcccgccctctcggcttttcccttcctcattctgtctcgggagctccttaatgcagtcaaccgcctttcccgagattcaaaaagaagttttgtgtttccccgggggcagccgcctaatgcttcccttgttttccggaacaaagcagacattcagtgaggagggggcaggcgctgactccctcccctccccgcagcaccccgcactcctgcagattcagaacgctggctccggggcccgggtggcctgggggtggggtggggacccccttcccctaggcttggccacaaaagcctcgcccggtagccggagagaaagcggcgtggtgtttgggtgaggttcccagcccgggcggggagggcgtgcacgcggctgtttacagtgtgcctgtgctgctggaagctcacccgccgccgcttgacagcgtggggcacccgctggctgccagctcagaggagatgcgcagcggcgagccctccagcactccacccgaggcctccgcagcgccagggccagggcgcgctgggaagctccaggtctccaaccccgagttccttcggcccacatacccctccccgtaacaatggcctagatccggtagtatatcaaagggacggggtggggaggggtgaagagcgcacaaggggcgctcagggctgtcgaagcgcctgggttctgagcatatccccgccgccgcctgtccccttgcaggactaaattccccggcccgagtgagcgaaagacaaatactctagtgacttggaggtgtttctctctccggatacccccctgcaaccccaccaacccctacccaccgtgcccagtgaacttctctccaccccaccccgtggggaccgctgcactagctgtgcccacgagcgccaggccttctcgtcggcgcagcgctgccttagatcccgctccacctcttcccctctcctgggcctgtggccggcccctggcgcctccagcgcggcctgaaacttgatctcacgtcgaaaggacagtgtgtaaacaccaggcgcgctccgagaacccacgggaggggccgagcgagggccgccggggcagctcgaggccccgcgcccccgcctgcctgctcgcccgggacacgatcggcggggccgccgtctcgctctctgcctccccagttggctcagctaattggagccgccgccgccgccaccgctgcggcctcttgttgaattttctagatcgcaaccgttcagtcgtggctgcctgtcgctcccctcccccttccacagctgttacctctgccggcaacttggtggtggtggggacccgtccccccgctgaccctggcctcaggctccgagttcaccccagcagttccagggggtgtttttcttcgagacgtgggaagggaggtaaagccttatcggaactgtgaggcttcgtgccagaatccaaggctcgggtactagccagaggatcctcccggcagaaggccatggtcctccctgtcttacaccaggaggtagtgacagtcccggagggaggggctccaggaacaactctgctggcgacttctgttcattccaggaaaacattacagaagggtgaggtgatgggaggcagaaagatcccccctccctcctgcttgccccaatccctgtcagcacttgggcatttgggacttggtgtgtaggttccttctgcagcagagctcacctgcgccttgggcctaatccacccacatgccacaaggatgcttttcctcttggtttggagtacctggtgggtccaggggggaagtgccacccttagtgggttctggaggtacaactcccccatgctgggtcagttctatgcttgtaccaggaggccctcctgggccttggtccttcccagccatccccagccttagcctcctttccccttggccagctgtctcatgccttaaccacacatctgtgctagctgcaaaaggtcccgcctgtatggatctgtaagaggcccagagctcggccccatggttgaggtgggaagatgtgaagcagtttgctagtgcaggaatcatgaagatattgttgatgatggcagagcagttcctggtctccagcattgccttagaatggcttttcctcgtggtagaactttcgctagtgggtttcacaggctcagggcccaatcttgtgaaagtagctacactccccagcccggaaacacataaatacacataggcaaactcccaggaggctgggtgtaggaaccaccaccggggggatctgcagcagccagagaatgtctgcttttcctgtgatggttctgagaagggcgcctgttccctccctttgatggttctctgacaactgttaggtaacaaagagtggaggccacaggctcattaactgtcattttccacctctttcctccgcttctaacttttacccaaattactactttggagttttcctgaggtgttctctccatctatttataactagagcaagatttccaactcaatccttattgatttaaactatgataaaaatgaatccataaaattattattataatttggtgtctaagatgacatttcactaggtcaagttcacacagtttttggcatctaaaatcccccaggcctttccaatcagataacctaagtgtgtttcccactgtcagtttctcttccctttccgtagtggaaaaaaactgaatcctctcaaagatgtttattctccttcactcctaccccatcagtctgtgagaaccttgtttctgtttagggtaaggtatatttctatgttttgataaagaagagagtaatacatgttcctcttcaggcctgaaaagataattatgcatcctgggagcttgctcttctcctggctgtttaacggacaatctggattctggctctggagcaggaatgcttcgatgtcccagtctccttctcgtcccctttcctctgtcaccactcagccatcaccaggcctttaggcgggtcacacggcctgaggatttctgttctgaaggctcagagtgcctcagaagattgcagctcagagcctggtatcatgcattcacatttcttttactgtgcaaagcatattcggagccattgggattcctgttccatctctctgaaagcttatgccaagagctccccatggggcctatggtgatggatgtcatgaggcccaggaaggagccatcatggtgggaagagttgagagcctgcatgtaagactcagactcgaaccaaacctaagtgcaaataacaaggaaaaaaagcaactccgcgcacctggctggtaccctgcttggaaacaaaccgtacctccccaccctcccatctcaaagctagtagagcctaggggcacaccattcctttggcttccctttagcttgacctgggaatggcgcagttaagcatatcaggaagctgagatgcatccactactcctcacttcccctggcgctgggctcagcttggctgaacttgccgttcctgtctttttagaagagctggttgtgttcccgaagcaggatcgcactgtgccgcctccccaggggtccccagctattgatttttaatatccgtattcaatattgtgtattaaacattgaatccatgcacaagaggatgtgatgcaaatcaccagccgtgcctgagactttaatagttgttttattgcccggaaaccacagttggacgcaaggcatcctgcagccgaggctgggggtggggatgacaggctgagaagagagctgagcggagcggagcagagcagaggatacgagatctctgaaatccgcactactgaaggcacagccaggcactaacagctccccccaggcaggctggtggggggccggctccaggctgttgtggaaagagcaggggctgttgtgtgagacccgggcagaggaagaggtgtggggctgtgttcttccttcctggacttccctaactggactgtgcattcctgtccggcagtccttcccctccatgcagatgctcacccagaaacacatacacaacgatggaacaggaaagttaactttggggcaggaaaccccaggcctcgggcctcttccaccactcttcgcgctgtgaccttagcacagacctctctcaacccgctgggccccatttccctcctttgccaatgggggtgatgctatctgtcctacttccctcacagcgctggtggtgaggctgccgcggcacatgagataatattcggggaaaaggcttttgtaaattgtcaggccccacgtaggcaggctgagggattagtgctggctttccctttatactccctctctcctgcaggctgtgtctcctggctgccttctttctcagacatgggcctcctcccccatgaagggccctctcttctgtttcctcggccacctctgcttgatctctcaggcttcctgctctgcctggactctgcattcaggctaggcaatccggtttggaggaggcccagcagggagaaaggaagggtgagaacgactgagtgtgtggtgggggtgagtgcagcaagtgtgtttaaagccaacagcctcgggagggaggagaagcacactcggtagctgcggccctgggttgcggagcccgcgggggtggggccgtgggtggggggcgttgatccgccccgtgtgcggacaagcgggagaagggttgagggaaacctgagtctaggagtgtcttcacgttacactgttgctggttatgggaagtccagcttgaatcccgattgctggaaggctagggtgtgggcagtgccttcagggtattgcaattgcgaaggccaaatggaaatgcggtggaaagtggcagccctccagcgccgccaagtcagataaaaagttgcccgaggccctgagagtggaggcaccagctctctgatggccttgtagacgccctgagaacagtccgagctcctcaaacccgctacctttgtcctgggctcaaggagggggcggaaaccagaggggcccggattcttgaagacctcccctggggaccccactgtctgctgggaaggcctcagccaactgtaggcccaagccctacagagaccagctctggcaggaagtcatgccaagagtctgtgtccgcgtccttaggcgtgagaatggggctatgccaggctgggcctggctgcgcacgcctccgcttcgggactcgggcggctgctgctgccttcgttttcgggtcttcgaccgagcctccctggctctctactcccgctttgtcttgctgtcagcttctcgcctgtcctcgccagtctcctaggtcggcgggtcgcgctctgcctctccgagtgcgtctttgcgcacatgtggcggtcttcctgcaacctgggtcagctcggcctcttcccgcggggtacttggctttgcctttggatcgctgcgagtgtccacttcttgcgctctccttctccccacctcgccttaggcagacgcatcccgggcttggcggtcccccaaacagaaatatccccgggtttctggtttagctccaccaaaacaaactcgagggattggggtatccttcacttgcgtttcccgcttctctcagccctaggccgaaactggagggtttttttgttttgttttgttttaatgagacctactttgcagagttgacggggaacatttctgcggcagacttcgaggtctgtggcgctctcccaactttcaagactgtaagccgccaagaaagagaatttgggtacatgattttgccgctgatgtgggctgggacgagggtatccagagtgcacgtgcatgtgcggatcgcagggactctcggtggattagccgccaaaagctggggagcgccgcgtatggacgctagggctgggggccagcggggacctacaaacaccccaggcggccgagcaggtgaaggaaacgttccgagcccgccccctcctcccgggcccgcacgccgccggcctttgcggcggaaacacggtccaactccttgaaagtaaacttgccgccaggggctaggggcgcgaagaaaggagggggctgacagcggtgtctgcgtcggggaggccaggaaggcttgtgtcaaatttcagcccccaatgacactcggtggcgaggtgccaaggccctgggaacggcggcgggggttctgggtgagagtgatcgcgccgcagggcccagcttgcgaaccccgaggcgcccgcagggcctagggaggccacgggggcgggcgcggcgggcggggagggggcgctcctagagcctcctgagcggagcggacgcaggcatcttccgcaatccattcatgcactgaagcgcgtgcagagctgctgatcgctgccattgttactcgcgggcggtgtgggagctgagcctccactctggcgagagataaatggcctctgacagcccctcctcgccaagagagctcctcggatttcaccgcgcggcggctctcaggtctgtgcctcgctcgcttcccggtgagaacctttaaatcagcctctcggccctccctcctcccggacactgtcccccgcccgctcaggccccggcagggccccgggcgcgctgtgtgcagtctcggggtcctctccccacctgggggttaaacagagtgggggcgcagggaggacctcagggccgtggggggaggcaccgggctccccagccccggctccgcgcctccgcgggagcggagccccgcgccccgcctccgcgcccacgagatggatcaggctaccgtgcggagagcgggctgtaaatatttaaaaagtctctcgcgcgccggcagtaatggctttcgcagtcggaatgtgtgctaggggaagaggaagggcgacgtgtactgtgttgcagggtggggaattgttcctacgcttccccttaggtccggggtgggctgcatgttcaggcttcccgatttcccgccctccgcctctccgccgccgcgtcccacgatagcatcgagaacgccagtcgacagggaacttgagcatagccgggcaacagaggcccggtcgaggtgaccccggagccaccctccccaccggggtctcccaagctcgtgggttgcgaatggtcccagacccctaatccgggtccgcttctcgctgctgcacaggggagggcgggaaacgcacagattggagccccctgagtttgggtggtcgcaaaagcctgggccggggtttctgcagagggggcctggaccctgtttgtgcctttgctaccctccccagccgctcttaaaccttgatccgctctccaggagacccccacccctatctgaatctgaaagtagctttgtggctgctgggaccgaaacctgggaggaggcagcacggagagtttggggcggggagggggtagcctccaggcttagtggaggtcacacgtggacctgaacggggactcttttgcctttctggtgagtgtgggcctgggatctttaaggccaagccctgccggatggtagaggtgggggagggggattcagccttctcggcttggctgggagagacttaatgggcccaccacagggtgtgtgtcgggtgaggttgtcccctttgccagcggccactccctagcggggcggaggggctgagttgcccagagctggggcgggccgggcgccgcgggttcgcgcggaaggttccaggggtgtgggcccagtccggagctgttcgcctgcgccccgccggctctgggacctgccaaagtgtgggtgctggcggcgtgtcaggacgcgccaggctgctctccgcgttcgagcgctgggagctcccgactcctggcagctccgtgcagtcctcttccaggggcttgtgttgcgcccttctcgcttgtttgtctcgtgtgagcctcgtaaaccgccttgatttattacccagactaaatgcttaatttgtgaatatgaaacagattaaaaggggcggggggaggggggttgaggtcggcatattttagcaatcagaccaaagcagctcggcagatgtttcaaatttgtcgacattttcaggctcatgtggaaagccagccagagtggtcaagaggtcctttctccttccttcaacctgagaacttggcagtgatcaaaaggaggtgattagtagctacagagaaaaaacaccagcaggcaaggagttaacagagactgagccgttcacctccaggattgggatttggcggggagggggggcggtcacaaaggcaagaggaatcctggctaaacaggcgcaagtcgtggaagccaactctgaagaacaaagtggagggtccgttaaaagttaattcagtaaataaacttcattggtgataaaacaaataagaaagatggaaactccaacttaaaatagccaaaagataagaaaaataaatcgcttttatgtggcctgaacatgtgcatgtgtctttggtcaggtccccgcaatgatccacctaacaaaggcctctcctgagtaccctctccctttgaataccccacatgtatagccagtgttttttggcgtttgtcattttggggcaacttcacacatcaaaggcgagcaccgttttcttttcagctccctggttccagccacccagtgaagcagatacaatttctataaattggccttcttctccaggtttcgattgatcatcaccatatgagattactgaaagtctaatgtcttatttcactttctccaaggagtgaggaggggaacagtttattgaaagtcaggccacgtgaagactctggtgttgtgcaatagtaatttccattagcctggatttatcagcctcctgatactgccacctgatactgcagtctcctgcaggttccttgtaccaccttccctcttcccctccaggtctcagcatctgtccccatgaacaggtagagttcaaaccggagccttcctattggtaaggagaaaatggctgatgaccaaaaattaggaaacaaaagatttgttgttgtttctcaggacggagtcttgctcttttgcccaggctggagtgcaatggcccgatctcgactcactgcaacctctgcctcctgggttcaagcgattctcctgtgtcagcctcccgagtagctgggattaccaggcacgcgccaccaggcccggctaattttttgtatttttagtagagacggggtttcaccacattggccaggctggtctcaaactcctgacctcgtgatccacccgcctcggcctcccaaagtgctgggattaccggcgtgagccaccacgcctggccaaaagatttgttttttaacatatttgttataacttaagaatcccctctttggcttttgtttcctactccaaagttttttgttcccctttggccttgataccatctttcgttttattaaagttgattatggttcctctgtcttgtccctagccagacaaaggcttaggagaagtcaaaggacgtgttaattatgtttcttgtaaactgacttttcatttccccctaacacatttagttggcttggtgtttagtttaacaatcaattgctacaaatatgctgcttaaaaatgctgcttttattaaaacaaataaatgaattcaaagacctttctaatttcaactcgtgtgggctagaaacagaagagaaaatcgaaagcaagagagagggaaaggcggcagggaggggagagaaaggagaccaggaaacacacacagacacacacacacacacacagacacacagcattcctgctgccatccctccggaagccatgttaaactggtccatacaattgtccctggctgccccctgcagctcgccagtccttctggattttccatcacttggcgcctaaggcgatcattagctgagaatggacaacctcctctacctgccggcagctcagctcgtcatttaccagccaggggaggctggccccatttgctcaacccgagaggggtccttggtttttgcccctgggtgcattggtgcctaattaaactctatccagggcaacgtgcactaaatatacgtaggctgagaggaagctgggaggaaaaagcagtcattacctaggaagagaaagtgaatcttccgagagagaggaggaaggacccctgcgatggtgctttctgtttaccctcagcagagccttggagtgcatgttcacttgggtgctgaaatcaaggagaaatggaaatcgggaaaaaaatccatagcccacacatacctgaacagggcctatgtcaccacagagcaggagggaggtctgctgtagctccagacagtgttggctgcagaaaaatgactcaggtgcccttgtggcatcggagttattgctcatgtgccacggccccctcacgcacaggagctggagctgtataaatggccgtggggacagaaaggaacagatgtgtcaagagtccaaggactaggtgtgtgttgtaaagccaaacagatggtggaggagcaggggagaaccttcagctgaaggctaaagaccctactagcacctgggcccaggcaggatcgaagtgacccaacctgaagctaaaatgacagccggcaaacaagaatgtatgcagatgtcatacaagagccaccagggctttaattgagctctgtttaacccagtggaggaaatcagttgagagggtgaaaacactagctcagggtgacatgtttgtggcaaaagagaccagaacccagagctcccagcttcagaaaacagccagaggaggaaagtgactgctggttagagaaagatccagagtgctcttggtcactgaagaggcctggtattttagtcatttggcatttattaagcacttgctgtgtgcaaagcactatgctggcatcaaagggggctaccagcactatgagccctcaaaggactgagcagggaagactctcccctttatatgtgcctggtgacaaaggccatgaaagacagtgggtgaaggggctggggaatgggaggaggaagccaaccactctgggttccactcttgaagatagcagtttacaggtgggcatcgaggccagagggcaacctgtagcaatggacccctctatggcctccctgagccaaaccctacctggctaagcacctgcgcctgtaagattgtcctcccagtggtgggagtgcgagagaggccatcttcacttccccttccttggagggcctgactttgttgccctaggcaggccaggaaacttattctaatgccaacgaaggaggcaacttttctagctagaaaagcacacgctacagctctctctcttgccctgaacaagcagaagagcacagcttatccccaaaagctcctggacaaatgtaggctctctgggggagctggtaagggaatactgcctcccttaacaaaacaaacctgagaatctccaaggtttagcactgcacacggagtctcccagcagagaagggggctagcttaagtgccccatgcattccacctgccccttggggcgctctcagtgtgatcacaggtgcccttcctcaagccatctggcctgggcccagcctctgctcttggtttccctaagcagaggcgaaacacgctggaaccttcaaagcacattcctaaacactaagagagagctgtggggaagtgaaaacaaagaggccaaggagcgctggagcagttcagcttccagagtctgtgggccaacagggctggctcaagttcagtcagacttactggccctgggccaaccagagctggcagcgtgccctcttcagcccactgctcaggccccgtcgccccccaaaaacctgggcacaccccagagcaagcccaagccccaggaagccctgctgccccttggcagccctctcagaccaccccctcccccttctagttgtgggttgctagttccagagccagggaatggcttccaaaatcccttcacccagagcttcccaagagtgagtgggttgccaatgggtcaagacggggatcccccagcccctcagagtgaaccaggggtgacccaattccttggctggcagcttcaggccatgttgggcaattgtggacactcggtcactgtttaactttgtgcaacagaaaaatatcacattctgtgctgagaatcactgctcacttgtcataagtgtggcatccatgctccaagagttacccacacatacgaataggaaggatattggaccacatggtccttcgtggatggtgaacacagcatagtcagtgattcaactagcattcgttcaagcctctcttgtctgtcctgcactgtgcttgtggctgttggggtggctcggggaaacccccggttaacaagacccaggcccctccttagagaacataaagtctccccaagagagataagccccatggagctgaaaacttcattgtgcttacactaaaaccaggagaaagagcaatccctggtattactcctcaggcatagttttttggtttttttgtttgtttgtttgtttgttttaaatggggtctccatctatctcttgctgaggctgtagtgcagtgaggtgatcacagctcactgcatcctcgacctcccaggctcaagtgcttctcctgcctcagcctcccgagtaggtgggactacaggcatgtgccaccacagctggatcatttttcttttttttttttttgtagagactgggtctcaccatgttgcccaggctggtctcgaactcctgggctcaagtgatcctcccgcctcggcctcccaaagtgctgggattacagccgtgagccactgcaccccgcttaggtatatatatattttttaagccaaaggtctgatggtgtgtttctgcccactttacacataaagctgggaaactaaagactccctcatactcccagcagctgacctgctgaatgggacttgggagctgggaattccgtgctttctctccaaagggtccgcccaggtgacatcaagttcatggcagatgttatgggtaacacctgcacttggcagaaaattctaaggctataaaaggatgtttggtgcctctcccacccgcatttctcagtcactcagtttgcctctctgaaggcaaccagtgctcccagtttattgcttactcttcccaagatagtctattaaggctgattttttttttttttttgagacagtctcgctctgtcacccaggctggagcgcagtggcacgatcttggctcaccgcaatctctgcctacctggttcaagcgattctcctgcctcagccttccgagtagctgggattacaggcgtgtgccacgacgctgggctaattttttgtatttttagtagagacagggtttcaccgtgttagctaggatggtctctatctcctgacctcgtgatccacccaccttggcctcccaaagtgctgggattataggcgtcagccactgcgcctggcctattaaggctgatgcttaaaaaaaaaaaaaaatatatatatatatatatatatatatatatatatatatatatgtatatatattatatatatatatatatatatgtatatatattatatatatatatatatatatgtatatatattatatatatatatatattttaaattttattttgaaaaaaatcccaaacccacagaaaacttgaaagagcagtacaatgaacacccatatatgaaggcaggttttcaaaagcattatatttattcaacacgcctacccttggaaagaattcaaaaccccttcaaaggtctgaattagtttaactttatcttaaactgttacttaggagtacttttccctcatagacatgttgcctgcttgttcatccccctcctcccagcccccagcaccttattagtgtgcctcgtgcatagtgggcatttcctaaagcttgcaggattaaatagcgaagactatgtcgtagttagtatgggggagccagactgtctgggttcaaaacctggctctacaacttgaccagctgtgtgacctgaggcagttactctcgccaccttacttcccccatctgtgaaatggagggtagtgatacaatatatttaatgatgttgggaggattagttgatggacataaagcatgtaaaatagtgcctgggccagacacggtgtctcacgcctgtaatcctagcactttgggaggccaaggcgagcagatcacctgaggtaaggagttcaacagcagcctgaccaacatggcgaaaccccgtctctactaaaaatacaaaaattaggcaggcgtggtggtgggtgcctgtaaccccagctactcgggaggctgaggcaggagaatcgcttgaacccgggaggcggaggttgcaatgagccgagatcgtgccactacactcctgcctgggtgacagagcaagattccgtctcaaaataaataaataaataaataataaaatagtgcctggcatctagaaagtgcttaataggtgttagggacacttgagacttaaacacacttggtattaactttgctttggtgattgcatgtaagtcatttggccgagttgatggcctccgagttttccttggtaaccatgagagagacccaagaaaaccgggaatgtggcttcgtagtcgtccctcgcctgagaggattgcctacgctcagcacataagtagcaggggcttcttgtgaccagtttccactcatggagagtttctagctgtgcttattaaaaagatatttgaggccgggagtggtgactcacgcctgtaatcccagcactttgggaggccaaggcgggtggatcacctgaggtcgggagttcgagaccagcctgaccaacatggagaaaccccgtctctactaaaaatacaaaattagccgggcatgatggcgcatgcctgtaatcccagctactcgggaggctgaggcaggagaatcacttgaacccggaaggcggaggttgtggtgagccaagatagcgccattgcactctagcctgggcaataagagtgaaactctgtcttaaaaaaaaaaaaagatatttggagggaaagtcgccccccgtccacttcccttttatagcctggctagttgctgccctgctaatagaaccatctttgaagaaagagctagcatttgttttacccacagaccggtaagatcttctctctcagggtgaagcctaggctcacaaaagcctgagatcagaaagtcaagggttagagagagcaagtaggtgcaaccccagaaacctccactgtctggcaagccagagagtcttggggccccccaacagacaaagttgtctggaattttcttcacataggaagtgtagaatggtagatgtcttaagagccagaggcaagagaggactggggaaagataaaggaatttgtttattttattttatattttattttattttattttattttattttatttttgagatggagtctcactctattatctaggctgcagtgcaatagctccatatcggctcactgcaacctccgcctcctgggttcaagtgattctccagcctcagcctcccaagtagctgggattacaggtgtgtgccaccacacgtgacaatttttgtatttttttagtagagacggggtttcaccatgttggccaggctggtctcgaactcccaacctcaggtgatctacctgccttggcctcccaaagtgctgggattacaggcgtgagtcaccgtgcccggccaggaatttgtttaaaggtatactctgtgctataaaatactgcacctaatgttaggctttgacggctataatatctgactttgacattgaggtgtatctgccatataatttaattaacgtgtgatgccggcacaatgccagagagtcaaacattctgacagctcttggaagccacataagtccctttgaagttccccccagtgaagtgacacacagagaaacctcctatggttgaggacagcccctgatacggtatccagaaatttagctgcgtcttggttatattggatggcactggcaaagccacctgctggtttgccacagttctggaggtctgctgtggtttctaagggccccaaccatggagactggctctttggggaagaagaactcattcttcatcagggacaaaattgggaggtctcctgtttgcatattttgttctacaaaatgtttttttcttcctcaactttgcttagtgcaaagtcattgagctgcacacaggaacgtaaattaggtaagaggcatattaaccaaggagaaaaaagaccatagacatctattttgcacataattatttaacacccaccatacgcctaccaaagctttggacatttatagcaggaacaaaaacaatatcttggacatcataaaactacattttactggggagagaaaaagtacatgagcaataaaaatatataatattgcaggttgtaataaatactcggaagaattaagaagggtgtgaggctacagagagatggaatgttcttttatgtagttagttatttctatctacagcaggtagaacgagtgttcttttagatggtaggttgtgcagtatgagccttgggttgaccgagtaacgtgctcaggcgatatatcaataagctcttgtcacaacactgttgtatcacaaaccacctcaaaacatcagtaagcacttatttcctacatacatgtcagtgggtcacctgtggttcactggtctagaatgtgctcaacagggcttgactccaagtgtggattggatctaaagctgctccacgtgtccctcatcttctacggacaagtgggctacctgggacatgttcttctcatgacaatggcaaaagtgcaagagggtagagtgcaaatgcaatgactcttaagtccgggactcaaaatttgcacactgttacttctgcctacatctattggccagaagaagtcatgtggcctgacatcggtgggatgaagaggcatgctctacctctaaaaggtgtggacacagggggaggtgaagcactgggaagagtaatgcaatctgaaacaggtgtttcaaaccaaaactatgtatctctagctgtgacatttatatatacaaacacatatatcaaatgataaaacgacccttgttgaaaccttcagttttagattaaatttaaataaatccatgcaataattacattaccctccccgagatggtttatgatgtcaccagaggcttctgggtcattgccgccaatctcaggaaacctgggaagatgggccaccggccatcccaatgctgagagacaaaaaggccatgaagggccgggcgcggtggctcacacctgtaatcccagtactttcggaggccgaggcaggcagattacctgaggtcaggagttcgagactggcctggccaacatggtgaaaccctgtctctactaaaaatacaaaagttagccaggtatggtggtacacgcctgtaatcccaggtactcgggaggctgaggtacgagaatcacttgaatccgggagtggaggttgcagtgagccgagtattgtgtcactacacttcagcctgggcgaaagaatgagactcttttctcaaaaaaaaaaaaagaaaagaaggaaaagaaaaaagccatgatggaatggagacctttcttcctacaggggtttcccttgcaggaaaggtacaggtgggaaagctcagaggagaccccagaccgagcaagtttccttgcttacctctaagcatgtcttggagatgtggcataggatccaggaggtgtgactaaaagctagacttttagccagtctcgcaggctgtgcaggacacaccttcatctgttgtatgaaggtatatgagctggccaaagattcgcgttcttccttgcagctccttttccccccagttctgcccacctttctcttgctgtccttgaataatgtgggggggattcctaagtgtctctgcagaaagtgatgatttctaattttgggcctcctttcaatgaattcctccagggctctgcagtcagccaagtactggaacctagcccttccctttaggaaggaaagctcttggttcaattgattccgatggttaatggaatctcatcaccgttgcccagagtggttctaatcaaaggaatccactgtctaaaaattcaaggtagcagcatcaaggtttacatcttgtaagcaaagagactggggcactggggcagatatgttttatggtggagccccatggggattcagtctcttatttgggagaattctggctcctggctccaaaggtgtgtgagttgatccatcttctgtaactaatcctagcctggacttggaagggggactgccttttttattttttggtgtttggtttttgagacagggtctcattctgtcacccaggctggaatgcagtggtgtgatcatggctcactgcagcctcaacctcctgggctcaagtgatcctcccacctcagcctcccaagaagctgggaccacaggtgtgcgccactacacccagccaattttttatttttagtagagacaaggtctcattatgttgctcaggctggtcttgaactcctgggctcaagccatcctcccgcctcagcctcccaaagtactgggattacaagtgtgagccaccacgcctgaccatgtccttgatctgtaaatgacagtagcttttggaaactgagaaaataaaaatctggatcagacttcaagtcccctgacccctctctgatctggtcctcgtcttcccctctcctctggttccacagctgccacagagcacacccctggggcagcccagtgagtccctctacccattcatgccctcctgcttgttctgccctgggagggagcctcagcccctgagccccctgcctggagtgatccccctgctcaccctgactcccagctccaggccccacctcctctgcggagcccctcccaaatttctagggggttacatttcagtctaattctcccagatgcctttgtgcttattgtcacagccacaaaacttatcatttggttgctctgaaatgactttacgccttatctcctcgcttcagttgtaagttcttagagcacagggaccacagagcctagcaaggtgttaatacacatgagtgtacttactggttggatagcctcccatcaatttctgtctcttagtggtgtgggagtagaaaagactccccagatgttagggccaagaaggttgaaattgaggccgggcgcggtggctcacgcctgtaatcccagcactttgggaggccgaggcgggcagagcacgaggtcaggagattgagaccatcctggctagtacagtgaaaccccgtctctactaaaaatacaaaaaaattagccgggcgtggtggccgtcgcctgtagtcccagctatgcggcaggctgaggcaagagaatggcatgaacccgggaggcggagcttgcagtgagccgaggtagcgccactgcactccagcctgggcgacagagcgagactccgtctccaaaaagaaaaaaaaaaaaaaaaagttgaaattgaagtagatggccgggggcggtggctcacgcctgtaatcccagcacttcgggaggccgaggagggtggatcacgaggtcaggagttcgagaccagcctgaccaacatggtgaaaccctgtctctactaaaaatacaaaaatgagccaggtgtggtggcatgtgcctgtaatcccagccactcaggaggctgaggcagcagaatcacttgaacccaggtggcggaggttgcagtgagctgagatcatgccactgcactccagtctgggcgacagagcgagactccatctcaaaaaaaaaaaaaaaagaaaaaaagaaaaaaaagaaattgaagcagatgagctcagatcatgagggattttctgaaactgctatattttgaagaaaaccttgctggtcccctccagttttctgtaataacctggctgagcagtgggtttcactgtccggttcacgcactaactgcttcagggtcacctggggtgccagttcagaattcagagtcctggccccacgcctgaaaatactgactcactaggcctggggtggggcctggaaatctctatctttaacacgccactgctgactctgacgcacagccaggtttggaaactagtcgagtctgaaaagaatgttctcttcttggaagtgagaaaatgttaggggggcaccgtgagaaggggctatgatttggattctgagagaccaggtttgagtctcagttctgccacttaccaggtgtgtgaccatgggcaagttattcagcccctctgcacctcagtttcaagtgggaacaccacggatctgttttgtgactagtgccatgcaacaaattaccccagaactttgccacttaaaacaactctttggccgggtttggtggctcatgcctgtaatcccagcactttgggaggccgaagcgggtaggtcaattgagcctaggagttggagaccagcctgggcaacatggggagaccctgtctctacaaaaatacaaaaattagggtgagaggattccttgagctctggaggtcgaggctgtggtgagctgagatcccaccactgcacttcagcctgggtgacagagtgatactgtctcaaaaacaaacaaaaaaaaccccaactctttgattttgttcacaattctgtgggttaggaattctggaacggactcagctgggtacttctcacttgggatatctcattcggttgcagtcacacatcaacaggggctgcagccatcggaaggatatccgagatggcacactcctgtagcaatcagttgatgctggctattggctgggagctctgctgggctgttgactgtggcacctatgttgtgagtctctgccatggcagtagacttcttactgacttctctcagagcaagtgccccaaaaagagccaggagcaagctgcatggcttcttctgcctttgtcttacaagtctcagagtgtcacttctgttgtgttgaaagcagtcacaagcccacccagacttctagaagtagagacagagaccacacctcttggtgggaagagtgtcgaataactagcgggcgtgtttaaaaccaccacggtatctcatggggttgttatgaggattcagtgagatgatcttgctgaagtgctggacaagcatgagttcccctcctccttctaatttgaggcctggaggctaacagggtaaagccagtgccaggtgccaggtctccagtcgcttgcagttgttcatgtctactgggccatagggaccgtttttctcagtcttgtctcctcttctcttctcttctcttttactgacagagtttcgctcttgttgccgaggctagagtgcaatggcgcgatcttggctcactgcaacctctgcctcctgggttcaagcgattctcctgcctcagcctcctgagtagcttcaattacaggcatgtgccaccacgcctggctaattttgtatttttagtagagatgggatttctccatgctggtctcgaacccccgacctcaggtgatctgcctgcctcggccttacaaagtgctgggattgcaggcgtgagccactgcgcctggcctgtttttctcagtttctagtcatttctagtccttttggatagtaaatgcagggtgcagtgagcaccttctcattctgaccagctcagctctctcaggaggttgggactgcaagatctgtggttcactgtcacccccatatcagccttacccatgtgcctgatctcaagtgcaagctcactgggctccgaatgggaacacctggctgagtactgagtgttttcaggtcagacaacctggtttggggcccaggagggtcatctgttgcaatggtggcctgaggggcagctggagagaaagagagcagctttggttggcgtgggtcttctgtctcacggtcatgagtgggccccttctctgaccttgctttcttcacctcaggtctggagacagtggaggagctgaggaaaggtcacatggagaccactggggccagcaagccagctccccagggaaggtggggggtggcttgcatgacagatgcctcaggatgaggggcattaagagggtggctgggttccaggggctgccagagtgggtaggatttgccaaatagggtacccttggaaggcaggacacaagagggaggagccattatgtgcctgctgcaattcactggcatttgtggagggggtcgtttgcccctctggcccacacccttattcctgaaaaaggcagttgggcctgtgtttagcactccgaggaacctgctctctctggtcctcttcttttccttctggggctcctgaacctccccaccgacatgcttccctcattaccaccaagcctcacatgcagcagctgccttgctgagagcagacaggggtaggcttggagctgcacagcgatgcgacacatgatggggctccttctatgtgccccacacctagccaagggctaaaaatggtcacacgtctccatgatctcattgacgaactcacaccatgggcctgaaggagtgatgtgtgagtcagcaccccggaatccctggcagagcgggtcttggaggaccaggaagaccaggggaaacctcccagattgagtcattaggataggtcatagtgcaggctgccctcccctcagtctccatgcctcagtttcctcacctgtaaaaggagagtaactaagtgcccacctcatagtgtgaccacaaggagggaattggggtgcacccttaatcaggctgctctccacctgttgaagatttagatgaagagggacagggaaggagggcaggtgcatagggagttgctggggcaggggaggcagagtcatggaggagaaggcccggagggtggtagaggaggtgcctgctgcacgggtgaagtctgttcttcttcttttttttctttttggatggagtctcgctctgttgcccaggctggagtgcagtggcatgatcttggctcactggttcatacaattctcgtgcctcagcctcccaagtagctaggactacaggtgtgcgccaccacgcccagctaatttttgtatttttggtagagacggggtttcgtcatgttgtccaggctggtctcgaactccggacctcaagctatccgcttgcctcagcctcccacgcctgctgggtttacaggcgtgagccaccgcacccggcaaggagtctgttcttagaggcagagccaccactcctgctcccaaggaaaggacagtgaaacagctttcgcccataccccaacccccacctccctaaggccccgcagctcctccctccctccgtctggactgtttccccttctccctaagacatttcctggaagctctgcccacagttcttccttctacttatatacctggcctggccccagccctgccactgaggcctggcccccccattatgtgaccagcttttcctcttcttctttttttttttttgagacggagtctcactgtcgccaggctggagtgcagtgacatgatcttggctcactgcaacctctgcctcctgagttcaagtgatcctcctgcctcagcctcccgagtagctgggactacaggcacgtgccaacatacccagctaatttttgtatttttagtagagacggggtttcaccattttggccaggatggtctcgatctcttgacctcgtgatctgcccgcctcagcctcccaaagtgctaggattataggcgtgagccaccatgcccggctaacttttcctgtttctactcacttgggctgagatccccgttctcctatgtcaccttccttaaacatcacaccttggctaagaggaaagactgtccatttgggagtctatgcccactagctctgcgacctcaggagagccgcttaacctctctgagtctcagcttcatcatgtgcaaaatagggtcatttagttgtgactagtgcctcattttgaccgtacttccatgaggattgaataagggaatgcattgaatatgcaacaagtacatagtaggtacttaataaatggcagctatttccatggtgattctaggcctgtgtatccagagagtatttgactaatagacatctgcacgcctgtaatcccagctactccagaggctgaggcgggaggattgcttgaggctgggagtttgacaccagcctgggcaacatagttttttacaaaaagccatctgagggtatgacttgcatagggagccacttattattggagggcagataaagaaaaggaggtattcctttctttcccctgatgattcaggcaaggtggtccctgctcccttttatttcctgagttacatctatgctgtgccctagaattggaatcagtaagcacagatgccattggagtttttccccaatattcttttttttggagacagggtctcactctgttgcccaggctagagtgcggtggcgtgatctgggctcactgcaacctctgctttccgggttcaagcgattctccagcctcagcgtcccaagtcgctgggatcacaggtgtgtgccaccaagccgagctaatttttgtattttttgtagagacggggttttgccatgttggccaggctggtctcaaactcctgagctcaaatgatctgcccgcctcggcctcccaaagtgctgggattacagctgtgagccgctgcacctggcttctaacccaatatacttttttgtttttttgtttgttttttagaaggagtctcactctgttgcccaggctggagttcggtggtgtgatctcagctcactacaacttcctccttccgggttcaagagattctcctgcctcaggcacccaagtagctgggactacaggtgcatgccaccactcccggctaatatttgtatttttagtagagatggggtttcaccatattggccaggctggtcttgaactcctgatctcgtgatctgtccgcctcggcctcccaaagtgctgggattacaggcgtgagccacagcgctcggcctcttccccagtattcttgctgccttttttttttaaatttatttatttatttatttatttatttatttatttatttatttattttgagacaaggttttgctctggagcgcagtggcatgatcatagctcactgcagcatcaaattcctgggcttaagtgatcctcccacctcagcctcctcagtagctgggactgcaggtgagagccaccactcctggccagattttaattttttttttttaagacagggtctcactatgttgcccaggctggtgtcgaactcctgggctcaagtgattatcctgcctcagcctcccaaagttctaggatcacaggtgtgagccactgcctagtcaacagacttgcttctaagacttttggatggaaactcttctagagtatatttcaatgagatatatcagtttgctattgctatgtaacaaaacactctaaaccatagtagcttaaagcaacaatttcttcttctatcacaattgggtaagttggctgggctgttcctctgctggttacatctgggtttactcatgcagctgcagtcagctagccaacagctgtggggagatccaagatggcctcatgaacagtgtggcagttggtgccagctgtcagctgcagtgaactgtcactcttctccctgtggcctcacatcctcaagtatgtgagactggcttccttacgtggcagcctcagaactgcctgagagggtgaagcaggaagctacaaagtctcttaaggcttctcctcagaagtcacacagtgtcacttctggtgcattctattggtcagagcaagtcatgatgccaactcagatcctcgaggaagagatggagattccaccctagattagtctgctggggctgccataacaaagtaacatacactgggtgactcaaacaactgaaatatattgtcttactgttctggaggctgcaagtccaagaacaagttgtcagcagggttggttccttctgagatctctctccttggcttgaagatggccaccttctttgttgtgtcttcacatgttcttcccaatgtgtgtgtgtgtgtgtgtcctaacctcctcttttttttttttttctttttctttgagacaggctggagtgcagtggtgccatctcagctcgctgcaacctccacctctcaggctcaagcaatcctcccatctcagcctcctgggtagctgggaccacaggcgcacgccaccatacccggctaatttttgtattttcagtagagacagggtttcgccatgttgaccaggctggtctcaaactcttgggctcaagccatctgcccaccttggcctcccaaagtgcgagccactgtgcccagccagatgattcttttttgttgttgttttcgtggttttttttcttttcttttctttttttttttttttgacggaattttgccttgttgcccgagctggagtgcaatggcacgatctcggctcactgcaacctctgcctcccaggttcaaacgattctcctgccttaggcacccaagtagctgggattacaggcatgcaccaccatacccagctaattttttgtatttttagtagaagtggggtttcactctgttagccaggctggtctcgatctcccgacctcaggtgatccgcccaccttggcctcccaaactgctgggattacaggtgtgagccaccacccagccccagatgattcttttttttttttttttttgagacggagtctcgctctgtcgccaggctggagtgcagtggcacgatcttggctcactgcaacctccgcctcccaggttcaagcgattctcctgcctcagcctcccgagtagctgggactacaggcacgcaccaccacgcccagctaatttttgtatttttttttttagtagagacggggtttcaccatgttggccaggatggtctcaatctctcgacctcgtgatccgcccgcctcggcctcccaaagtgctgggattacaggcgtgagccaccgcgcctggccgactcccagatgattctttagtgacttcttctgtctgcctggaggctgtgagacatgtgccctctaggcttgccattaacttctgtgaacacactcagctgtgacagctctgagggaactcacccacccccatattagttatctaatgctgcataacaagttgcccaaaaatgtagtggcataaaccaacaataacaatgtattctatctcttgatttctgtgggtcaggaattcagataaagtacagcagggatggattgtctctgctcacaatgtttggggcttcaggtggaggagttgaagctgggatgctggatgatacatttccatggtggctcactcacttggttgggcgtgagggaggaaaaatgtagtgattagaagagactgaagaggtccagatgtggtggctcatgcctgtaatcacagcactttgggaggtcgaggcagatggatcacttgaggtcaagagttcaagaccagcctggccaacatggtgaaaccccgtctctagtaaaaatacaaaaattagccaggcgtggtggtgtgcacctgtagtcccagctactagggaggctgaggcgggagaatcacttgaatccaggagacaaaggttgacttgagctgagatctcgccactgcactccagcctgggtgacagagtgagactccacagtcaatttctcccataatcaaccaccttctccaggcagctgctggagctgctgccccaatgcatcacttcctggcacatagcaggctgcagggaccacctcatctgcctttgccacctctcttcccacttgttcagctgcccttgagcagactggatggccttccagaacaggacaaagcaggctggccacgtgtgcttttatgccctcctccccaacccgcccccccgacgccacacacacccctccatcctctgtctgacccaacactccccacaagatgcctagaatgtctttcccagggcggcctcccttaagggtatgtcttacttattttcatagctctgtacatatatgtaaggggtgtttcagaagggtttgtgggccagtcacagtggccctgtaatcctagcactttgggaggctgaagcaggtggatcacttgaacccaggaatttgagaaaatacaaaaaataccaaaaaattagccaggtggtggtggtgtgtgcctgtagtcccagcgactcgggagactgaggtgggaggattggttgagcccgggaggtcaagtctgcagtgggccatgatctcgccactgaattccagcctgggtgacagagtgagacccccctctcaaaaagaagtgtttgtggaatagaattgattttaaaacctttttaaaaaattgtaagggctaggtgccgtggctcacgtgtgtaatcccagcactttgggaagccgatgtgggcggatcactcgagcccaggagtttcagacaacatgacaaaatcccgtctctacaaaaaataagaaaattagccaggcatggtgatgcatgcctgtagtctcagctacttgggaggctgaggcgggaggattgcttgagcccaggaggtgaaggttgtagtgagccaagatcgtgccactgcactccagcctgggtgacagagtgagatgctgtctcaaagaaaaaaaaaaatgtatatagagatggggtcttgctatgtttcccaggctggttgtgaactcttgacctcaagcgatcctcctgcttcagcctcccaaagcactgggattataggcatgagccaccctgcctgaccaatagttcaaaatctttatggtccgcttaagtccgtagttcaccatattcccctgagttctctcaattcccaaagttgcaaagaggccagtggggattctgaaggtttctcctatcagcttctctggtgctcattctcccgctcccaagggccctggccttttcccaggattcattacatggtggccctttctcaccatgtggcatccttaaaagcatggggtttgaacattcagcctgagttttgcttgctatggattggtggaatggtagtgctgggagagaggaaacatttctgcttcctctgaaccctcttatgcgtgcgcgcgtgcacacacacacacacacacacacacaaccaggaaaccttctcttcccctagcccacgtctcctcccagtctgtgctcttgcacttccagagccagataaatggaggaaaaacacagctgcagatgtagccaccccaagagaaatcagaaagtgtggaagaaaaaaagaaggccgggcgcggtggctcacacctgtaatcccagcactttgggaggccgaggcgggcggatcacaaggtcaggagttccatatcagcctggacaatatggtgaaaccccgtctctactaaaaatacaaaaaacttagccgggcatggtgatgcatgcctgtaatcccagctactcgggaggctgaggcaggagaatcgcttgaacccgggaggcggaggttgcagtgagccgaggccgcaccattgcactccagtctgggtgacaagagtgaaactgtctcaaaaaaaaaaagtgtgcttaagtgactgctgtacccctactgactatacaccaccctcccctccatattgctctgttggagggtccctaagaccccttctcaatccttgttctcactccctgccactgcacacagagcttgatggcaagccgaatatggtatctccttgaaagtgagagaaacagttgcatttagaaggggaattcacctagcaggttaaggaaatggcccaaatggagatctctaatccccatgcctgtttttaagttgccatttgacccacagtggacatctctacaggaaggccagtaagtgcccgagactcccaggcctccgagctgccccagggcccaggaacgaggtcagatgtgataacggctctgatgtggccaaaagcttccatcatgctaagcagttccaaacagtcccgctcgtcaggcaggcccggggcagtggtgggtagcgacagtgtgatgctcggccttgcccccaaagcttaagcctttgatggcaaaagcacactcggctctgtactgagctgactgcctgaaaatattatagaaaacatctctcccttggcggggagagatctaagccccagtgaccggggagtttaaattttcgggatgggtgaccgaaggctgctaagaatatccagtcacaggcctgaccacaagccagttaacgccccgagtggcggcttccatggtccttggggcatgggaagaaggagccgactgggcagccagtacttgtggagtccctcagcaggaattgtgcagacacaaagtaaggagtaaaataacattaaagaaaaccaaccacctgatcgtgccctcaaggaataatctgagaagggaagacattgacctaccatggggtacttactgtgcgttaacagatcaaaacaaggacaaccatgcagaagggaacagtctccgagacaccaagtgccaacaagggaccccaggctggcttcccacagccagatggggtagttcttgtggcctggcagctggcagcctgacagaaagtcaggtaggcccagggtacacattctaccctctagccctcagtttcctcatctgcagagtgaggggtttgggagtcctgtttcgtcaacattttgggtgtctgaggccctctgggactctgatgcatgtacccctggcaaagtggacatgtgcacgagggccaccattttcacagcatttccaggggtgtccggccccaagtagaccagccccagatctcaagtgagggctctgaggtttttgtatagaggagagactgttcttggagggctggaagtggctgggaagagttcatggagaaagcaggatcgaagtttgggcagaaatgagatggctacaccttcattcaatgaatgccatgagcttcaacggtcagcaagcccaagggatggatgcgatgacaaagagaccagagaggatctggaatcgtgtgcagcaccgtttccagctggagagagagagcccattctgctccagccatgtgggctgtccttctcttcctcaggtggtccaaggttggtcctccttcagggcctgtgcacttgttgctcggctacctgaaactctctttcccccatactcatgcagctggttccttctcagctcaatttttcaaagaggcctcccaagccatcctggctaacactgccttccctcccactactctcagccacactgctctgtttcatcttctgtgtggcacatgtcatcatctaaagttaccttatttgctctgtttatggtccatctcccataggataaggaccttgtcagtcctgttctccacggtgccctggcacccaggacagtgcttggcacagagtaaacaactgccaaatttgcaatgaaccaaatgaagtaattatagccttaacgctagatggctgtgcactggggaggcctgtggcgtagaggaagggcagggtggtttgagagggtgaggctgagccactaaactggtctggatgactgtttggggaaggtatcttggaggaagtgctgtttgaacagagttgtgaatgactaagtgaagcgggtggagggatcgcaaatctaagccagctcccggtggcaacggctggatgtgggaaggggctggaaacagaagcccagagccaaggtctgaggggcagggcccagtagggtggctgagggcttccatctttatctcaatagtgaaagccactggagcaccctcgctctggctgcaggatcaacccccgccccccttttacctgtctgatcattcttcctcttttgcaatctggccaccctagaatcctggttgttccttaaacacagcaggcagtctcctaccacagggcctttgcactggctttgcctctgcctgcaaaactctcacctcagaaatcttggcttgctcccccggctccgttgagtctttgctcacatctcactttcccaagagacctcccctgagcaccttaatcctgcaaatccttctccccacaccctgccttccaggtgcttctttcctgctcccacttttctttccatggcatacatcactgtccaccatccatggtaattttgtgacctcttacctttattgcttatcgcccatctctctccttctggaatacaagtaccccgaggacaggtatttgttttgtttcctggggtgtgtcgggagcctggagcagcacctggcacccagcagcagtggttatttgcgggtgtggttgtggctggtggctgctgtgggggccatggactgcagaggggtaggagccagaggagggggcccagtgaggaggccattgccatggcgtaggtgagaagctgtgctaggcagtgcagggcgctggatgtgggggaaatggatggactcctaaaactgcgcagagaaaagaaaacggatttggtgaagggtcggtttggggagtgaagggattggagaggtcaagggtgattctcaggtttctggaatgtataaccaggtggttggtggggaccagggagaagaagcagttttaaggggaggaagagagaaggggcattcctgcagggaacatgcatgggccacaatggggaaaggctgtgtctgctccgggcatagcggaaaacccaatttaggctggagtggaagttcctgcagagaaggtgaggaagacagggtgggggcctaggcaacccgttaatgctgccaactccacgctttcactctggaagcctgggccatgcctagggctgccatgatgaagtgctgccaagcctccaatacggcacatctgcctggcgcatcactctcaccccgctcctccccccgccccaactgtggagcagtaagtttgcttctattcacgtgattttattaacaaaatttgcttccttgctgtctctagaagcagcacactgccctcccccaaccccccaacttggctcagagcaaccccacactcctgctatcaggtcatctgcccagagtgtgattgcagttttaaaactgattcctccctggtttattatttttttttagtttctattttttattttctggaagtacagcacacagacagaaaagtgtacaaatcctgagagtacagcttgatgaattttaacacacccatgtaaccagcttccagatcaacctgcagtgttcccagcccccaaggagtcccactgtgctccccatctccaaggataactccatcttgactcctcttcttttttttaatgagacagagtctcactctgtcacccaggctggagtgcagtgctgtgatcacagctcactgcggcctcagcctcctgagtagctgagactacagcacgcccaccacacccagcttatttttgtagtttgtgtagagatggggtttcaccatgttgcccaggcagggcttgaactcctgggctcaagcgatccacccacctctgcctcctaaagtgctgggattacaggagcaagccactgcacctggcccatcctgacttataacaactcagattaaaacctttgcccactttaaaacttgacataggcaaagcgccactgcactttagcctaggtgacagagtgagaccctgtccaccccccaccggcaccaccaccaaaaaaaaaaaaaaaaacaacacccaaactagatgtaaatggaatcctattgtgcatattcttttgaggctggcttcttttcatttgcaaggtgttgtgtgtgcttgcatcttaaaaaacagagtctcaggccaagggtgatggctcatgcctgtaatcccagcacttcgggaggccaaggtgggcagatcacctgagctgaggagtttgagaccagcctggccaacatggcaaaaccctgtctctactaaaaatacaaaaattagctgggcgtggtggcgcatgcctgtaatcccagctactcgggaggctgaggcaggagaatggcttcaacccaggaggcagagattgcagtgagccaagatcgcactactgcactctagcctgggcaacagagcgagcctccgtctcaacaacaacaaaaacagagtctcccaagcagcctcccacctgaggcaagggatcagggcccagtctcaggaggcccctgtagcctgtggaatactcagtagaggaactagggggtcagtggagactttgtgtggggcagaggacagcattggtgttttaagcaaatgacatgctaagcattgtgttagatgctgcctggatacaaaagtggaagatgcggttaagagggggtgaagggaagataagactggatctagagtcggccaggttgtaagaatgtcttgggctgggcacagtggctcacacctataattccagcactttgggaggccgagacgggtggatcacctgaggtcaggagttcgagaccagcctggataacatggcaaaaccccatctctactaaaaatacaaaaaaaaattagccaggtgcggcggtgggcgcctgtaatcccagctactcaggaggctgaggcaggagagtcacttgaacctgggaggcggaggttgcagtgagctgagatcgcgccactgcacaacagcctgggggataagagcaaaactctgtctcagaaaaaaataaataaaataaataaaagaatgtcttgaactgcaagaagaggaaagaaagtgaaagctcacacctgaggggaggacagaaaggtcagaagggttgtgactccccgcctcccaaaaagatcccctcagtgctacccttaaagtcactttcctgaaagggggggtccttgccttgggggaggagacaatttcagttctattatctcagtcatccagaaagacttctctgtgcctgtggtgtgttagagagaagacagatagggagggaggaaaaggggtggggggggtggagagagagagagagagagagaaagagtgcgagcatagtatacttcctgggaaactatctctcgaatagtagttctaggaagcctcatgccagagggcagtagtactggcctctgccttcttgatggtgcccttggacgtcagaaagaggaggaagcctcagggattggcagagacatttgagagtttcagaagctgaagtccagagagggtgagcgacttgcccaaggtcacacaccaagaaagcaagcattagaaaggggatcgagtgtcccctccatggtttttccatgatcgtgtaccaccctttcactttacaaagagcctagtgttgccaccaaaatagctgaattacctcatttttgaaaggcgttatgaattcacttctattatgtggaatggggcagagatgttgtgagcaggcatgacattataattcatattccacttcttctatttatctttgctgggttttgtgtatctttggaagcagccttaaatcattattggaacaaagtagggagaaaaataataatatgtaattacaaatgaggaatagaccgtatgatcctattaattgccttccctgcaatctttatttttggtattttcagaataattaacggcttaggtctcgattggtggaggtggtgggttagcactgaactctaaacagtaacatcacctactccaggaatggcccagtgcgatctgacacctgggacgctttcagggcaacaccaagggcaatgctccagtctgtatttactctcttctgaggagaaactctggcagcagctggaaaataaaacccaaagcaaggaagaagccgaaaagaagaaatactcaaatacgaggcgcattaatcatcggtgtcagatctagagcagaggacaatggctggtttgaagaaagactgaacctaaattatcttggaaactgatcttctctcctccgggttccctgtgcctgcaagcaggggtcccggtgcagccactggcatggaaccgatgggggcatccactggctgaccagcatgctttgtcacaggacaggttagagatgaccaccttctgtctgtggatcatccatagcttctgcttaggaagctacagaagagaaaaggcctctcacagggacctgcaggacaaattcattgcccatcgtgtcctcaggggacatcatttgcatgccaggatgcagtaaggccactgccttcagatccaaataaagcacccaattagcatgaacttgtgcaattggcagagtaatgaagctgaccacaggtgcctggaaagtccgaaatttagttgctagtgttgcaccgtgatggcaggggctgtgacggcatgaataagtctgggctttgggaatgggcagtgagcttccaggcaagcaggcaaattaattatcctctaagcctcagtttccccatctgaaatgggaataataatagtacctttattataggacagttttttttttttgagacagagtcttgcaccgttgcccaggctggagtgcagtggcgctatctcagctcactgcaagctctgcctcctggtttcacaccattctgctgcctcagcctcccgagtagctgggactacaggcgcccaccaccacacatggctaattttttgtatttttagtagagacggggtttcacggtgttagccaggatggtctcgatctcctgacctcgtgatccacccgcctcggcctcccaaagcactgggattacaggcgtgagccaccgcgcccagccatataggacagttttctatatgacatgagattattaatgtgtataaaatgtttagaactgtgcctggcagatagaaagcccttaataaattctagctattgttcttctaggagctgaagaacattagtgactctcttttcctcaaatcccaagagctcttctgcttcagaagagctgtgtgatgagttcttcccatgttatcccttcgtgaactaccttttcccatggtaaggacaagagtagtctttatggaagctcaaaacggggaaaagtgttgcccaggaatatgaaagggcaaggtagcttataatctcgccagacattgagccataatttagtattggtggaggtacaggtatttttcaaacagaatctatttgttctggggaggaagtccttcccttgaacatcttggccccacacttttttttttttttttgagacacagtcacactctgtcacccaggctggagtgcagtggtgcgatctcggctcactagagtttccgcctcctgggttcaagcgattcttgtgcttcagcctcctgaatagctgggatcacaggcgtgcaccaccacacccagctaatttttttatttttagtagaggcgaggtttacgccatgttggctaggctggtcttgaactcctgacctcaagcgatccgcctacttccacctcccaaagtgctgggattacaggcgtgagccaccgagcccaggccggccccacactttttcaaggcttacctggaaggaaggcaactcttcattcagatgatcaattcttaggttcccatggtgaacacaacagatgagctgaggcctgctgatcccagaaagaaagaaactccttttatgatacttactgcagttggcgagttgccaggatgggcccagaaggatgcaattgcagaagctatgtaggatctggtcccagaaatagttaaaggtttggggaaacagtgcatatgcatgacagacaaacaatataccctatgggaaagagcctaggtttggagtcaggtagaatccccgtagccacactctcctagattagccatgtgttttggcgcagtggctcacgcctgtaatcccagcactttgggaggccgaggtgggcagatcacaaggtcaagagattgagaccatcctggctaacacaatgaaaccccgtctctactaaaaatacaaaaaattagtcgggcgtggtggcaggtgactgtagtcccagctacatgagaggctgaggcaggagaatggcatgaacccgggaggtggagcgtgcagtgagccgagatctcaccactgcactccagcctgggcgacacagtgagactccaactcaaaaaaaaaaaaaaaaaaaaagtgaatggtaatacctaagccatagggttattttggggtgtgagtgagataacttggaaaagtacctgataaagtaactgaaatgaacaaaggtccttaataaacagtagctatttttatcacataggaattattcattgttaaaagacttgctttgctatcaaaaacagcgcagggacacagttactgttagaggtcaaatggcatggaattcagagaactccaattgcccagggtcagctgtgagaagaacctacacttctggtttcttagggtctcaaggagaaagacagtctcaatcttctgccactaagttaaggaccaaatgattggcaataggcaaagtactctaagaaggctctggtttgggttttgtcttccttttggctttctcatctcctggggatgatattctgcaggacttagttaaggacaggactcccaaggcctccccaccagcatgcacaccaggtcacttggctcctccagccgacagagacctgtacacaggtgtcccatactcccacgggcctccccaaaagacagtgtctcccccagccttatgcttcactttcctaatttcttctgccccaatcctcaccagaactacagagccactccccaccagtccaggtaccccctttcctatagcaccctctccacaactgtcttgttctcttgaacctggtttcttctctagccaggatatagaataccgattcagttagcaaaaatgtattaagtggctggctacagtggctcacgcactttgggaggctgaggtgggcagatcacctgaggtcaggagttcgagaccagcctggccaacatggtgaaaccctgtctctactaaaaacacaaaaagtagccaggcttggtggcacacacctgtaatcccagctactcaggagaccaaggcagcagaatcacttgaacccgggtggcagagattgcagtgagctgagatcgtgctgctgcattccagcctgggtaacagagtgagactctatctcaaaaaaaaaagaaagaaagaaagaaaaaaaaagtattaggcatgcaatacttcatttattgtttatcagatttttttttcatcaatatgtggtgagcaccatgctaggcactgggcacatacagccagaaacaaaattctgagaacattatggatatatgtacatcgctgcacactgatgcaagcttagcacctggtgatgatacactgtaccattatggacgatacggtcttgctgagggaggtgacctcccagggaccaacccgcagagcctattcaggagctgatagcaggcctgtgtggttggccttcagagggtgagctaaacactggcaagcaatgaagtggccttgttaaggcatttagattttgttctaagtgcagtgggaactagtggggtagtgacattcaacactttttttttttttttgagacatggtctccctctgtcacccaggctggagtgcaatggtgcaatcatggctcactgcagtctggaccttccagggttaagcaatcctcccacctcagcctcctgagtagctgggactacaggcgtgcaccaccacacttgactactctttttttttaagtggagatgaggtcttgatcctgtctcaaaataaataaataaataaataaataaataaataaataagatctttctagctgccacgttgcgggtggactggaggatagcaaaagtggcagcacagagattgctagaataatcatcctgtataataatccaggcccaagatggtggcctggcctcaggtggatgtaggaaaatgggaagaagtaggcttactagatagactatttggaagtagaatgggttagctttgccagtggactggaggaaggtgagggggagatgaatgaaaatgggtcaaaaatggccccctaggattctgctttaagcacctgagtgggtgagccattttctgtgatggggaagggagttaaagcaaagagcaggttctaaaggaaaagctcttctctatctaagagacatttgtcctgctcaccactgtttccctagcacccgctacaaggcctggcatttattaaatgcccccaaatatttgtaaattaattcctctttttagaattcagttgtggctgggcgcggtgctacacttgtaatcccagcactttaggaggcagaggcgggtggattacttgaggtcaggagttcgagacacatgccaacgaggcagtgtggcaaagtgattaggaccatggactctgaagataggactgcctggatttgaatcctagcaccaccattttctaggaatgttcagtaacttctctgatagtttcctcatctggaaaaaatgtacataataactctgcctaccttatagggcagttgtaaggattaatagttaatttatagaaagcactttgaagagagcttcaacctaacaggcgtgatgtaaatgcttgctattgttattaagctgagcgtagatgcaaagttgagataccaagtttgaagtttgatatggggatttggaactagaaaaaaaaaatgtaagtcatcaataagtaggtggtatttaaagccataaacctggatgagactggtggggaggaaggggaggatccaggcccaaggcaactggtagagcatagaaaagcccacaaagaaattgaaagcggttctcagctaggatgaaaaccctgtgagcaagcagctcaagggagcagtggtcatggtgtggtaaatgcttctgggaggccaaggaaggcaaggactgaaaaacaacgccgcccccccaccccggcccccactcctggcaacaaggaagtaaccagtgatcttgagcactttctgcagaatggccagggaggatggaggggttgaggagtgagataaatgaccatgtgtctatacagtgaaattccaccagcctggaaattgacaaggcctgtctccatgtgttgctagaaaagtaagatatattgataagtttcataggtgaggtacagaacagattgtgcagtgtgttcccatttctgaaagtagaccagaggacatgcatatctacagagaaactgggggggaagggggcactcccctgcagtgttggaaatctttaatgcacacacaaatatgtgtctatattcccccctattttgtttttacacaaactgtagcagatggtacacactgctctgtaccttatttttttttccttaactgtagaccttgggggtctttccatatcaatacacagagcagatcttctttattattttaacagctacagaatattccattgtatgcatgtgccatcaatgtcactgctgactctttaggttgtttataatcctatgctgttataaacaaagctgcacttattccagtgtcttaaaataacttcatgactagctgatttttagagtgaacatgaggtaagcctgcagaaattccacatggatggagacacctctttcaagaagtccaggtgtacagggaaacagataaatagggaaccagcaaaggagatgcgaggttaagaaggggcattataaagatgggtgatgcttcaagcaaagaagtataacaaggggcctttcaagaaagggtatggggggtgagggtggaggcagcaaggaaaagcctctaagaaggtgatattttagcaggtatgaaacgatgacttaaaacagtgtgagatcctatgttgggtgctgcgggaacatcaggatggatggacagacactggccttctggaaggttcaactccagcagggaagctgtgctgtttcacaaattggctgcaatattgttagaaagtggttgattctcggccgggcgtggtggctcacgcctgtaatcccagcactttgggaggccgtggctggtggatcacctgaggtcaggagtttgagaccagcctgaccaacatggtgaaaccccgtctctactagaaatacaaaaacattagctgggtgtagtggcgggagcctgtaattccagctacttgggaggctgaggcaggagaatcacttgaacccgggaggcggaggttgcagtgagccaagatcatgccattgcactccagcctgggcgacaagagtgagactccgtctcaaaaaaaaaaaaaaaaaaaaaaaaaaaaaaaaaaaaaaaaaaaaaaaaaaaaaaaaaaaagaaaaaggaaaaaagaaaaaaaagaaaagaaaagaaaatggttgattgtcttagaggtacaggatctacaaacttcccactgtggtccctgctggtgaagtgtgctcagagttccagaagttccctgagttcctgataagacaggaagctaggggagaggagaatattttgcctgaaatgttaagatttttttcccccatagggattcaatgacacgcatgccctggaaggtttcaaaaattggaaataaataaaaattccaagaagaatttatattcctgatggctatgctgatggtcttgtaaattgtatatttaatcaaagacactcaaatgtcttttttttaactattgaagagctatttaaatgtcaacataagtgattccctcccaaatagtgctgtttatacattacttcccctaatagaccataatgattcataaggaggcatttctcgcctctaaattgtaggcctattgaaatataaattaagatgataaataatttgaccttacctgagagtactaagtatttacatgtgtcaaatacgaaattaccctgaacatcatggtccctaaaaaggcagccttcctctcccgggtgaattcattaaatgaaacgggtttataaatttctcttagagtgtggaagagagagagaacacacaaaagaacgggcccggggacccggccgtccccgccctccagctttcccatgaggcccggggggccgcggaacccactccccggcggggagaggcgggtgcagaccgcccccgcgcgcttcccgcgctcccctctccccctccttctgcgacgccgcaggagtttcaaaacatggagtttccacaggaactttgccaggccgagctcgcagccctcccgggctcccgcagcgggattcgccgagtcggcggcgccgcgcggcctccccgccccccacgccctccggggagccgctgacccggcggcctcgggcagctccgcaaaaccgctcggtggctgtagaacctggggaggcgcgggggctccggggctccgcacccccgccgaccccgtccgggccccggagggtggcagcctggcgccctccgcggggccggcgccgagtccgtccgccggctctgttggcttggctccgccgcccggggccggggccgaggagcggaggtcgccggccatggcgagcgaggctgggtacctggccgcccgctctggagttttgttttgaagcccggcgtgggggaggggcagcacctcatcaaggagaaatttcctgttcgcaagcaagactccgcttgcagagtttctgtcctgcccttgacctgacaagtggatctcggctgcgcgggtccccgagagtcgagccagccgcgccaggagcgcgcgggggtgggggtgggggcacccgcgccgaggaccggggagcccggctgagcggggccgacgcctgccctcccggttcccgggcgcacccgggagcgcagagccgagcggtgactaatctgcggctccgggcctcttggcgcgcagcccgggttcgcctcccgccccctcgtctctcctcctccccgccgccctcccagcccagcagcgcagcgctccgccgagcgaatcgtgcgggccagggccgccgccgccgccgcgttcccgggagtgtgggaagcgggtcgaggcgggtggctcgggagccgtctccagtcggcctccttcgacccgggaccgaatgtgcatgtgttaccttccccttaagcactttgatcagcgttttctcctcgcagccgaggagccagagcgaaccggggcttttaaccccctgcgtgccggctccaccgtgggctgagggaagagggtgccgcagggagattggtcgatacagggtgcgatcagtttggtttagcaagcctgagccaggaggagcccggccggatccgaggagcttgcccaagcgcgggacgctctcctgtggagagcaggccgctgaggcccgaggcgactcgttaatgttcaagctctcccaggggcagcgctgtaacgcgacctgcctggccaggcaaggtgcgggcttgaaaggcccggcgggcggaggcttctggaggggcccgggaggccatggcgggacccgccttcacgcacccggttcgttggcgcgtgggtggctcctaaccccggtggaggctttgcgctcgcctcgcggactcggctctggccgccgctccctcccctggtccaggcctcgcttgggagttaatgattgatttactggctccgcgcggccggcgccctcccagctatttgtccaagctgaggagttgctggcgagcagcgcagtaggccaagagagcgggggtcgccggggaagggaagccacgctgccgacgggaaggagaggccactagattagctcccacttggcggctctagctgtgtcggggcaaaccctcaggaagccgggcccgggcgaagggagcattgggaagctccacatgtaaatgggttggcagctggcgattaggccgcccgattttatgagtcataatgggcctcccgcctggccctcaacctgctcgctgtggatccggcgcgcttggggcccaagtggtggaccattccggccgcgcagagggacatgcttctgggggcccaggccgccgaaggagttgagaaggactttctctcctttcttgtagaaggcaacacaaacaccctaaatcaaaccgctccgacaatcgaaggctccacacagacacatcaataaggatttcgcctcccgcgtatgaacgcacagaaacacttgtcctatttttatgcaaatgacaccacacaaatagatctcgcaggcccgggagaggggcgggaggaggaggggcgccgccaccccagccagggggctgtgagaggggaggggcgccaaacccgcaccccagggcccgcgccggctcgggcgcagcggggctggcactggtcaggaggcccgccccgcgggcagtggctccctgccagcgccgccaagtcggccgcgtccccaggctgcctgcagaggcggattagggaaggagcgaagcgagcctgtgactaatcgcggggcctcggaccggagcaccaaggccatgtgcgactgacaggaccgacactagcagaggacacggcgacgcctcgcttaattgcaggcttaaaaaattgccgcctgagcagctctggcgcggagagccacggcttgcgcgtcgagctagggagcgcgcgcgcttgggtgggggcgggggttcctgctctctcgctccaaggttggaacgtttggcgtctcctggaccgagggacctggcccttgcgtcccccactctgctgggtcgccccgccccgcgtgccgaccaagtgtggctgagcccgccaggagagtacgatccagcctccagggctaggtttctgacccgaccctttccccctaaatccgacgtttccccgctttcgccctagatcctatacgggagggggctgtgcagttgggggtgacagattccaacaaatccttaaaataaaaaccacacgcacgaaagaaacactttctcttccctccccttcttcaccgactgatacaaagccccgaatgaccaaagggaaagaggtaagtcggggctgcagggagcaaggtcatcgagtgccaaaacctcggggctcacagacacgcactctgagttcttcacccctggtcacagtctctgtggcccagaccttcctggagcactggggcctctcgggggcgaagggagaagcgtcgggaggccggcggctctgtgttggggagggggagtgggagggagcggagaacccagcgagagaagtttccaccacgctctggccggctactgccaaaatccccggacccctccccgcctgcaccgccttccgttgccaccacaagtttggtttaacgagagctcgggacaaaagcaaacgttttctatagaccccgaaaacaaaggggaaagagacgcgcggggccgcggagaagcggctgctagcgtaatggtgccaggccgaaagcagagcattaaaactgcaaaagccgcgcgggcgggaggaagtgcgaggcgggaggcgggagcgcggggagggcgggaggcgggagcgcgggcgggggaggggcgctgcgccatgtttccgtgtcacccgccgagtcgtcggcgctgggctcggccgccggctcccgcctgcctccgtaacagcagaaagcgtgcgattagcagccagacaggcggggactccgggcccgcggggccgccgcacacgccgcccgcggcccgagcccgcgccccccgcccgccgggtaatcatcctcctcgctgcagcgctgtgtgcactctcattagagtagggaggcttttctctgtgcactcgctcggctcccgctggcaaaacaacgccttcccgggccgggccctgggccaggagagtcggggagggtgggacggaggtggggggtgggtgaggcagggcaagccttgcaggtcagctccgccgccggatctcctccggacacggaggagacggggagcgtccattggcccttccctaggtggagtggcaaagtccgagccccgcagccgaccctacgtccctacgtggaggggggcgggtggagtaccggtgccgccatgacctactcccgtcccccgccggaggctagagtagggctgagggggagatgagtgtgtctggtttggagagcgggggcggacactgggaaggctcccaaaacaggttttgccccatctgttttatgaacgacctcttcaggccagaagccggatcccaggggtggcggcccttcgaccttcgaaaggagacccgggcccccagcaggccctctggcttcgcgctctgtcgcctgcagtgggtgggagatgggggtggccgaggcttggctgctcctggccctgagcttcggagccctattttctcctccgcgatctctgcacacaacagtaggcagcctctcacagcagcacgcgcccagctgcagggcctgggagcaggtgttcctgcccggccggagtggcggctccgcgcccctccggtcccagctgcggagctgcgagcggtgcgggggggcgtgcttatggtggtagcagagggacagggacatctcatcggaccgcaggaagggtcctctcggcttacaccgggataccgcagggcccgggtggtcgcctggggcgaggagggatcaggggtgacgcgcggccagccctcgtctggaacagccctggggccagcggaggccgctcggggcggcgcgagggcttccggtccccgtgactgcggcggcggcggcggggcggccgcgaggagcaccctcccctggctgctgccgccgcgcggctctcggaacggcgccccaggagcctctctgcgtctggcagcgccgctttcggcttgcgctgggatgggggccgcagggtggtctcggcccagcccccacggggaggggcggggaggcggggtccggagaccccgcgggaacggccgcgcgcctcccagcaccccctcctcgccgccgccgccgctgctgctgatatggcgggcacgtgaagcgcagcttggcgccccggcgccagccagggagcggcctgccccgccgactcagcttacccgcgggcccaggaacgcggaaccgagcctggccgggctccgcggagcccgcacctccgcccgcagctcgctgcggccccgcaccctctccccgcctgagcccggccttggggccgcgccaggcggctcgcccgaggggaactcgggctgactaatgggacgcgtgtgggccttacgtgaggcccggctgtcagcggatacccgcttgctcggagcttagaccgcggccaagcttttcggggaagggcgagaggaggggtttccccgctgggcggtttcagctccccagggacaatccgtccgcggcaggccccaacctttggatcttgcagcctggcttggagacggtagacttggcatgtgccggacgccacggtgccgacccggtcgggggcagggggtgggagcctcggggttgtgagctgggggtgggcagaggctaggtcagcttggtctggggcgcccgccttgaggtttgcattctggggctagccactgggccggggggaatttgcagggcgctctgaggtcgtggagtctgataccaaaaccttcctcgacaaagtcttccggaaaccccttcgcgaaattcctgtgcggaaagaaggatttctaaaactccccgagggtccggttcggctgggagctttcgggttctagggagtgtgatttcctttctctccctttataggggcctataaatatcagaagagtttcttcttatttcgcattaacaaccacttcatgttgacatagttatatgaccctcccaagtataactacctgtttagtttgaaggcactgagtgcgatggcgaaacacaaacatcgaccagtaactaagagaaggaaaacccagccgcgagcttgggttggatacaggataaatcctcatcacgcatccctggttttattcagcctaattgcactagtaatcctgccccccgcgagaaagcctgaaatcctgcagtcgaggtgcgacttttcctggggagccccgccaatggggggtgggttgtcagtggaggggaggtgggttttaaatgtcacttccaaatgaaaatctttctttcttttctttttctctttttcttttttgatccagttttcgaaaagagcatttttgcgagataagaagtgaccgatcaaaatcgctaaggggaggttgtaagcagccgctttgccccagcttagcgttatcttatctctcacacttgcatggcggaaaaaaaaattggcttatctttatccccacccccttctcgccttaattgctaaaaaacactagtgtgttaaaccgggaggaaggaggtctctggagtgtcagtggaaaaggaagattcaaaaatgtgggctcccgggggaagcaagggtggcagaatttattctttcccccaggcctttctggtacaacacagggtgtagtccagggtggaaggctgggtggctctttttttaaattattattttaagaacaaaatctgggcttggccttgggtcgtgtggcttccccaggcctcgctttctgaacttctcccctccttcatctctcaaaagctgctggtgggtctgggttgaggcctctcactctgccttcatcctccctcctctagacacatcctccttttggggagggggggatgcaaggctaggacacatagcctgctggaaatcattaaaatatatgcgagtgtctgcaaacacacacttttaaatcatggcgtttcccctccacgctggtctatttaaactccagagcgagctggatctcctccctctcagtcgtttgtctgtgtcaccgacaggccgctaatggccgggcttccaggcgctgtgcattatgcattagcctcctccctccgccgcacacagaaggttctgtcaggccgcaccacacaaaccaccctgagcccccccaccccaccccccgcactcagggccgggggctgcgcggctgctaacgcgctgggaacgcaggtatggagaggaggatgagcaccgagagcagagtggttcggaaggtggaatgggagcgggtgaaatgtgccgaagattacaccgtttggaatgcccagtccgttgtgagccccaaagctttgctcctggctgcgaccttctcgaggcaaccatcccgcgccactcacctctgtgaccgactttgttgggggcgggagggcagaggtatttagagacagatcagcaccgctttcccttctgctggtccgtacccaccttcctgctgcaggcgaggggctggcagagccttctctacccctccagttcgggagtggtaccgcgaaggggttcggggtggtgcgtcttcgcagggacccggtgggagtggaggagggaagctggatacaaaatggctggggccggaggccggcacactgggtccgaaggcgagtagttggtggttccccgccccctctcccggcggttcccactcactgcccccagccgggtaaaatatgcgcagaaggcgccttgctaaataagcagccgaggcgggacgtggcgtccgggtttatctgcaggagcacccggcccagcgcggcggcgtcgagggctcttaagcccttgccgagcgcaagaggcggccagcctcccagaagcctcctgtattatgcccatttggtcgacacccaaccaccctgcgggcccccgtagtgtagatgccagttcacccacacgtgcctgtgttcggggagctcagggcctgacccaaatcgagcccagaccagaaattccaagatggttgctaggaaccacggagaggctgcccttagggccttccttccccaaacacccaataaccctccaaaggctaggaagaagaaagaacagtcatgttcagcctggcgacccttaagtccagcagtcttctgccctgggaggcagctacctttagatgtttccagatgagtgaaatcctgggaggaggatgcgcctcctgtttgttacctcgtttgagtttcagaggggaagccagctgtgccttgtgcttggaggatggggcagcggatgttttttaaagtgccattggataagcccagagttcttgtacaaagtgaccagaagactataagtgtgggtgtgtttttaaagaaaggctacctcacattatgtaaaaatacattatctgtactcatccgagtcccacctgttccagtaccaagtgtcatcgccctgagaacagcctccgaggaggaccatcggaagcctacacatacgttataagctttatgatgtggatcctagtatacgttataaataaatcttgcacacaaggttagaaggccagggtccccccaaacacaggatgcctggcctttcccctaggccagggtggagctggaggtgtgtgggagaggccctagcgggtcttgcagagtcaacctgccttgagaagggcagccaggctcaaggcctgctcctagaagggccagctcgattgcccagttgcagggcctggttagcctgaggtcgagtggtttgttataatcaggagacacttccatgggaagggagattggtggcggaggggcagcccccgctgctccatccgcagcacctctcatttcggcacctatttctttatttctccgtgggctgcacggcctcccctcccatgcactcctttgctcactctctcctcctcctctgttttcattgaaatcctccccttgctgagtgctgggtatagcagcctgacccccgggtcagctcccgaagggcttgtgggagggcaggagaggagggggcaggagaagggccaaaccgccggcacccattgcaggccccgcggcatccccagctccctgagccccttcttaagtgaggacacaagatgggattgcccttcgacagctttctgcttgttttccccagaacaattggaactaaccgggccaataggtgtaatctcccctccccccctctgccttatagcgcctcgggaaaatcccacattttaattcccagtgagtcacgaatcccccccaccactcatgcctcttaggactcccttaataagatatttttgaaatcccacggagttgaaaaatgtatccctaggagatggaggagaaaccctttaatcctaccagcctaccgtggaggcaagatccctagaaaaggtgggggaggatgttgcaaattacgtcaaaggcgaatttactggcctgtttgtctccagcatcaaatttctcccccagtcagccctcccctcggccccttcgcatttacagcacccccaccacccctgttcattttaactctaggacttttttttttctttttcttttctttttttttttttgagacggagtttcgctcttgttgcccaggctggagtgcaacggcgcgatctcggctcaccgcaacctccgcctcccgggttcaagcgattctcctggctcagcctcccgaattctaggacttttaaagttagacaaacaggcctctttgtcagcagccccgggaggccgtaagactctgagaggctgcaggccccgagctcggttcctggattttctaaaagttctggacgtttacatgcgacttcgaactccgagaaaagcctgtgcctgggggcagagttggggagacgaggggaggggatagaaggtggctgggcgccgggccagggcctctgcggttcggcctaaccgagccggaagagcctggcacggctccacactggcccaggccagttctcccgtccagcctgcagcagcagagcggcctcctcgcctggaaccacgttcagagtttccccacaaatacccagcttcagccttcccggttatttttgacttgttttgaataaaaggagtcgcttcaaaaagaaatgttgccacaacacacaaccagaggccttttctccagctgtgtctgtaactcgcatgcgttcaatctaataacttttaatgtctggtcctaaaatgtctttataaaaaatagttttacagcataatagtccaggtgtctttctgcttgttaccggagattaaaaaaatgtgtgggttggcttgcagagatatccacccccagaaagaccaggaagaaaaaagcgtgcattccattctgcaggcgctggtcctggaagcgttcgcggcccagcctggctgggcactgctcgcgggggcacttgctcgcctgtcttttgcatcagttgttataagcagctctggagcatgaagatttaattctgccgaagtttcgggtttcaaacggtagagatgtttcacttctgctttgagaagggctgtttttataactatgtgctgagaactaaaacagaatgaataaaatcgcacctaataccagtcccacagtcagtagtgagtctaatttttaaaagggaaaatatctgctagctagagctgattttggccttgaccttgacttagtaatcaacttgagatgcttttgattatttttggcatggggacactccaggatattttaaaaactttccgtgtggatttacaagccacctccatttcagatttatgtttcatggagcctgcaccatcttgtccttaggcagaaagagacaccccacccccttcccagtataaaaagaccctagtgggcagccgaatggggtcaccattggccgcgaagtccgggcccgcagtctgggcgcggttagtccggaataccccctcccccactcctaccccttcccgccagcttcaccaactagggcttctcggctcgcccttgaggctttgcgctccggggaggccggaacctcgcttctccgcttccccctccctcccgcctgcccccgccctccccccgcgcccagagccgcgccgggtgcgctggagaagctcaatacgtgtcaattgaattgaactgctgcgggcgcaggctgtacgccgccgccaagcaccgatcagcacgacgttaccgagtggaaatttatggggcgaacggtgtaagccaaaagttgctccctgtcaaggaaaataaaacgcgggagataatctcccaacgccggggcgaggggcctgggcagcccctccaaccatcagaggtacagaccgtgaaaatgctcgagaaccgggagaaatacaggcggatctccgctcgccgaccgccccccacacgcctcccggtgcctccacgggctgctccccccttcccccacctccaaacaattcccacacaattgaaacgtccggggaactcgggcgcggagttcaggcggaacggccaccgttgcctggggtggtgttttcaggtagcttttaacaccgaaatgggaaagggctcctctgggaggaaggggcaaactggggtgggggtgagcacgggagcacacaggccacgctccgctgggtctcggaggggacgaggccgggagagcgcagcgctggtggcaagaggcggcggcagcggctgctgccgctggggtttgacagctttggctgagcggagtgcgaggcgctttatggtaattgcggtcctccactggccttctgggtagcgaggggagtctcggcgcgcggctgggagagccgcccccgccgcccccatcccttcggctctggctctgccggcagccctcgccgccgccgccgcccaagtcggtctccggctcgcccaggacgtgcgcccgggtcgggcgtgcgcagccaactcggcccgagctggggaggggaggccgggggacgaggagggggggcgccacccaagtggtccggggttcggatccagagaggccaaaacgtgccgggccgtgcatcgatgacggccggggaaactcgggcaaacctttcctggggaatcacccctcccgaaaccccgccgcggaggcgccgcagcggagggtgagcggagactggcggagctcaaacttgcgagagctggaggcggcggcgggcgggcggctgtcgcccgagcgctgcgcctgcggggggaggggaggcggctgttgggagggagggaggtagggcgggcgggagggaggacgggcggagggagggggaggaggaagaggagggaaccagggaggggggacgcgttgggatcgcggcgtgcggcggcagacggagcctgggctcccagcggcaaggtgaggcagagctgcgctcctcgctgaacgcgggccgagctcggcggctgcgggggagacgcgcaggagcccagaccgcgaccgagagcgggagctaggcgggcggcggcggcggagggggagcccgcgagccgccgggcggagagcccaagccgcgctgtcgccgcgcagggacgacttggccaacactcacacacactcacacacacccagcccgagcgggcgctcgcggcgaaccgtcaacatggcgctggggctcctgcccgagcgcgggcggcggcggcagcgcgggagctgctgagctcggccaagcccagtccagctgcgggagcccggaggatcgcacggggctgtcgccacctgcccggaggccccgagcccgccccgccccgcccccacccggcccagagcccacccctcggcggggccgaccccgagggcagccggctgccagcagacggcgagggagtcgagtgagcgcggcgccgcgagcgggctgcgggcagccggggaccgcaaactttgctgctcgccgcgcttctccggcccggctccttctccgctcgttaacgtcgccaaccccccccacccctcatatctctctccacccacccaaccgccccccgctccttctcgccgcctcgagtccgcttgggggaaaacttcaaagagccggatcgcaggctccctgcctactcccccaccggggatttcaggtcagtgcccggaacacctttcccccgggagaccgcggacgggtgggcgggcgggcgcgctgagggctgcagtcggccccctctcccggggccccctcccgcagcgtaccccgcgaagcttttgcctcgcgcttccctttggctgcttggctcgctttcgtttttatttcatagctatgttatttaaaatgcagccaacctaagcggccccgcgtgggcaccagggagggagggggcgcggctgggggcctggcgcctcccggtgggccaggaggagagcagggagttcgcagagtggaagtttgcagcctgtgtgtgtctgtgcgcgggagcgcggtcgccgctgagcgccgcgagtcgggcggaggggggggaggtgggctggaagctgggaagctgggttcggcgttagctcgcgagcaggaaggggagggcagcgggttgccgtctgctttctttttcgactcgggaaagaactgtaaaaacccccagccgccgccaccgccgcctcgtctcgcctctccgggggccggtcgttcctccaagtggaacgtcggcgtgtgcgtgcgcgagggtgtgtggcgagtgcctcgggccgagccgagctcgacctgccgccgctgccgcgcaactcgggaggggagtcccgttttttcttggcttgccccaaagcacgaatcacgtggattaaaaaaaaaaactactaagaaatcgagcagagcaaggggttccgacttggcccgcccgccagccaggtcagacgctttgttttgtaaatgttcttttaagattataatctgcgatccccctcccgctttccccctcctctccctccccgatgttcagcgtaggttttaagttatgagcccccaggggtgggtgtagaatgtgcttgtgcgggggcagcgtcgtggagggagggcgggggcgggcgagacctgggccctccgctgggcaatggggagtctggtgggtagccctgatgggcgtgtgaaagtctgcggccggaggaagttggtcccactcggagggcgtgtggcaaggaggctgtaggcgaagaggaacttgcgcaccggggcaagatcctcggccaaggcggggagggcgaggcgccgcggggcccgcgctcggagccggcgggcggctgcgccgcagagcctccgccaactcgggggctcgcggcggcggtgacgagcgcctgctgtttacggagagagccttggggcaccgtgtgtggagtagggcggccgaagtcacgcgtggtcccggcgggcttcccgccgctcgcacgctcgagtgggcccttcccggggtcccggagacggacgagtctggcagcgtgtaggccgtggccgggcgaggcgtaatttgctgttaatgaatcttttccagaaagtccgcgatctccagctagaggctgtgagtgcccgcgcgccagggcgcgcgccgccggcgtctggagggtgggggtggggggaatggaagagcgaagaaggaaggaggagggttatgtgtatttagaaacaaaccttaaaaagaaaccaacgcgcttcaaataggtattcgcacagcctcgctgcgtctagactagacagctcggggttttagctgtgttttcccccccttttttcgttttgagaagacgctagaggaggggtagtgtggtatttggttctaggggtagtcttttggagaaagatccttaaaatggcctgggagtaaagactaggaggaaatggcccaccccagaaggtggtgggtggtgagtgcagacagacttgggtatttctggccatctgacacttcctgtggcactggaaacggacaccgcgggccgaaatcaatccttacgaagtgttgggttcggttttgccaacagaattgcttgcgtggaaggcattttaattgtcagcctcaaagattcctgtacgtggacacttagggaatacgctcgttccttgaccctgcccactcctctctcgacctgttatctggtgtgggttttgcagtgttggttttcgtgtttattttgggcagggtttcagcgcgtagagcggagtggggggggaaggcgatgattaatatgccatccaggtttaatccgaggctggccttcagtgtgcgggtatacaccgccacgcacaccaattgccttggggtgtttaggggagcgcgcgggttttgggcagcaggcgcccggccggcaagtcgcggctggggctcggctggccccagcgctgtcctttgaggcgctgtcaccagtaggtgactgagagttaattaggaagtgttctccggatcaatgggctgcacagctcattagcgattctctccagccctttgcagggccgtcctggcctccgcctcccacacaggccggggcctcgctgtccaggctgcggggagcgccgctgggaagtggggaggggccggtagcgagggacggcggggaagcgagtgtaacttcgcggggcggcgcgttgcgtgcggcgcctcgaggcccgcgcagcccgctctttcttcctgcccgcggtcgcctccactgtgtctttaactcgctcccgctcgcgtcgctgcctggctgctcctccccgcctcccgcgcctatctcttgttctctaagcacgacgcctgtgctccccgcccagtttaggattagacaagataaaaataggactgcccagcgcgcggagctgtgactgtgccccggcagccgggctggtgggagcgcggggggccggagctggagaggacccgtggtgcgctcggagcggccagtgcctgtgggccccctacccccaccccgcaggcaccgtcacgctccccgggttctgtccgccgtgaaccgtgcgggccgggggacctgggcagggtctccgcgctctcgcgggtgttgttggtgtgccggtgatagatcggtctagacaggcatgcaggctccctcccggctgaaggactggaggggggggaggcgcggagatggcagcagactctgtgagctgcgagtgagcgagctagcctccgggcccagcgagctgggtggagggaaggccgtgggggtttctcttaaccctttaaaggccgtggtggggtagtgtaatagggaaaggggggcaaagagcctagtggaaattcctggaggcagagtagctcgcagtggggaggagctgtgagtctgggcctagggttttcctttctcttatgtgtgcacggtcacatcttggtgcatcgggctcgattcttccacaaaccaaacgcagctgctagatgatctagtttgaccaggtatttctcagtcggggagctgtgaacacacacaatgaacaccctcactttaaaaactgagtttggaagacagacgtagactcaatgttcccaaagagaattcatgcgggtgttcaaggacgggaaggtctgcacatagctgtagtcgggtggggcctctgactatgactgctgcagaccaaggacctgagcctgaaatgccccgccagcatgtacaggtatgcactgaagagagcaaagcggtctttgagttgtctctatataaatagacatacttttaaccaggaacttgtgaggagttagatatgtgcaaggagacagcctccaaagaggagctggacactgatgtgttgtgagatccatcgtttgtgtgtgtatatatatggctaatattaaattggtctaaaattttaatacacctctgcagacatttatctagttctttcttcagcttgaaatgggcggatgggttaccctatacataaataactcattactaacattccagtctcctcctccctcctcttcctttctttaagagtttgtgatcttaagggatcctctgtttacatttaaactgcaaacccatattggtctggcctgggaaagagccacattataggcaaagcaaaaagaatggaagtagtacgaatgctcagattaagatgtgcgcttgaatgacatgtgctgagacaaatcaagacacttgggctccgttgcccaaatggaacaagagatacataagagataaagaactggccaaggggaatgtaaacatgggtatgcaaatacagagatgtatagcgatattctgagagaaaaatcccagactttgttgagctggaaactggggcagaatttctgtaagtgcgttccagagacaatagcccatttaaaggtgtgaagagggtcacttggaaacacaaaaagcattcatatgcatacatccatgcttagatacacaggctgaatgacaaacactcctcaatgcctgacgaagactttcctgccgagtgagtgagaccgacttgggtacagaagagtgggccacacaaccacattcacacacttattcacagggaaataatgtgtctttggcttgaaggaaactgagggccacgctagcagcctaaaggatggatggtgtgcagtgaactaggattatctctggttatagtttctttcccttctaggggtgaggtggagtgggcagcgggttggtgacgagcaggtaggagcctttctgaagagattttgagttcctgaccttgagtggctggatcgtgtagccacaagaggggtagctttccactttgtggtcagtaggaatggctgttgcactgctggggtccaatttgctaaggtggagcagggcctcagtgggctgggaaggagaacaggaagaagtgcggcctctgggaggaataaaagggaggtatgctttctttcttttcttttttttttttcctctggaggagaccgtggcggggacagcctgtgttgggtggattagcaggcgcctcggtgaccccagacgcgcacgtaaactccggctagggtatggcttgcccgcggcgtcgatttgctgcggtccctctttgtctaagcccagccgggaattccagcttttattgggaagaccgcacttgggtggggcccgcgccgggcggagtggggcagggtccggtcgcgctgggcgggaggcttggagcccgcaggacgttccccggagctgcgggcagccctggcaatgccaccccggtggtttcctcgaggacaccgggcccggcggacccggagaggcgcggcggggcggggaacttcctgggtccatctcggccgccccgccccacccttctccctccggcccgaggccgaaaggagctcacaaggccctttgttaggccccgaggtcacactcgtgccccgggggccgccgatgggtgggagaaagcagtgctgcgggtcaagaggagcctccttattgcctcggtgccccagcccatcttctggatcgggcccggtgggggcctcgcccaaagctgggtggggaggcctgggccggccctgacccgccccggcttctttgccagtgtttatggccgacgggattccgtctgtttgcaaaaccggacgcgctgctgaggcctaggtggtagagccaggagaagccgccggggcgggagtaaatggtctccccccagccgccctggtggtagccgagccgcgttcgtcgcgcgcacttggccgggggcgtccactggtctccagccctgcccgacggctttctctggttgccctcaacgtgttcatcaggaagggatatcttactttttgttgggtggagttcattaacgatgcctttctgcgatatttctgtagaaggctcccttttggggcgcaagctcacctccatgtgtttacaatcgagggtctcagaaacgggggtcctcactccgtcattgttttagagctgtgtctcccacagccggcacccacgggctcggctctccatgattagagaagcggggaagtccactcggagaagatcctgacagcataaaaaataatttgtgatctaaaagacagtttccagtataatctcattatgcaccacagactcccgatgttattttgtggaaggcggacaatgatcaatttacattgacccggggctgggcgagcttttagatggtaattgccatattgatttgcatgcaaaaaggagacctgctaaaattaaagaccggaagctaaattaaactaaatttattgtctaggtgcaaaccaggggaactgttgggggatgggattgactcaggtcagggtgccaggggcagagcaggtgagaagccctggagcttcggaaggtcacaacttgggaagcgatctttgcccttgtgatttcatgtggggagggggaatgtgtttaaggaaaaaagttataaaaagacaattttgcattgaagtcactaggatctttcaatgctaataggaacttagagggagaggagaggtttatagggttataggggtcttccagcaccatttccggcgtcccccctccatttctattgttctgcctggccagacgctcgcagtcgtgctagggacaccaaaaacctcttgcatttgaagagttaaaaaataaataaaagcagcccgtcccccccttcccgccttgctctctctcccctcccccttcccggagcattagacttttcggagagagcgcaccgcgggcaggccaggaccgttggcgctgtagggagttcctccccggacgctgcggtcccaggcttggctggacggcgatcgcttcgggaagccgccctctccaggtggccacagtaggcgggggtggggtggggtggagcaaggcgtctgccctggccgccgtctagcggtgcccgggacttggggggaatcgcctccccggaggggttaggagggccagccccgccccgccccgcccctccccgaactgggtgggggccggggaggactggaaaccctgcccgttcgccaaggccggaaagtttaaaaaagagaaagaacgccacttgcagagggctggcctgcagccaggggtggccggcctgcgggggcgtgctcggctggctagcggggtgagcgccccggcgccgccgtctcccctccgtccctcccgccgccgaggcccctgcacactcggtcgcactgcggagccatttcgcacatccggagcttcagcgtctggaggagtaaccagtccagggccgggaagcccgagtgtccggtacccctgcctgtacccatcgagccgagccggaggtggctttggcaggctctgcgggtgtaggtagttcccggaacatctgaaagcctggggcagacccggaaattggggatagggtggggaggggatgttgggccctgaggtttgctgccggccgcttctgtaaagaaacgttggggaaaggacaagatagcctatcccccggcttgcgcttttgtgggggactctgggtggcccaatagaacatcttgctggcgtcttccatcttaattccctctcccacactactttgttccctggggtttttcctttaaatcctaggaaaggtagatggaggagctccctccaaagggcttttgctctatctagataatttgatttattgctttatgtggcgaaactggggtggcaagcctagctcctagtaccagtagtcagcacttttcccagagacctgaaaggagtcgacccaccttacccctgactattctggggtactggaggaagggaaaggggaggcttgttgagagcattggccttacaccagggtataacagtgtagggagatttgtaggatgtagggggaaatggtgaaagactttgagtggaccaggagatgacttagatacaggagaaactgggttcacggctcactgtagaccaagtaacataggtgttaaacactctttgcctcgttcttgggtacataaggcctaaggaagcttttcagaggagacagtatgtgaaaatcaggatttcaaatggcacaattagaccaataattggctcctctccgcaactccaggactgagtttgaccgtggcccattttttactagctgtgtgaccttgggggcaagttatttatggcctttgagccccagtaagttttttcatttgtaagactgggaataattatccacctttaggatctaaatagaatgcttggcacatagtaggccccaaggatgaataattgctttgaatgacttgtcatgttcctataggttgctcctccattccctgctgcccctgagaccccctgagacttgctaggcctgtgtcctgggacccaaggatgcagattaaatctcccctacgagggtattctaggtccaccttcctgggttcccctttccctttgttaccgtagtttgcattctgccttttaaaggattccatatgaaaagacttgcttctcccctccacccccaagtgggatcattatatggttaggaactcatttcagaaccgtcatctaggtacccttcggcaaggcttcctggcattatttcaggggggaaccacggtgcctagaggggcaagacctggttggaagaggtgagagggggtggcctggtgcagaggccagaggtgctgtggtttgtttgatagggattaagtccggatgttatgagggctcaatgtggttttcaataaagtctgccagggattgcttcttttatatcaatatgtatttaaaaaaattactagcatgagaagaaaaccagacctgtatggatccaggctggtagtaagctactgtgatcaggtttcctactcgactcccagaggggaagtcagtgtttgattgaagctacacttggttcttgactctcaggggatgcctgctctgaaacaggagccctccctccctttctctcctcctctccccctcctcctccctctttttcccttcttcccctaaaagcctttgtgctgaaagagcttcagtaggcacgaatccctggtccctctctaaagaatgccttacagcctttgctgacattgttttgtgaacagtgggttttaccaggccagcagtttccccccgattttagcgcacgattttaaaggtagtgtatggacaagatgcgccttactgcagtgattgcctcagtgtgtagcctgggctggggcttggaatctagagacgccttaacctttgccctaggggccctcctggagtggggggtgaaggtggggagctcgaggactgattgttttcgaggatctgtttgttttgtccagccaccgaggctgaaggtggagttgggcaagtctgagtgtatgttccagctttgggtctgattttaaacttggtttaattggagaaactcctaggcatttaacagttctgtacaaatgcaaacttgaaatagctcgaggcctacgtcatttaggaaagaataaatgaagtacagaaatgtccaaactatgtaaatcctagcgttgtctgccctcccataaacacatgacaagtgccaaggcatttccagtcaaaacacccatggaagcagcagcctccatcctttgtatttattattttattaacagcattttacacagcatttaacaagcacagcgtgcctgctttgcaccaggactctaagcaggcgaaagggtggaaaatggatggaggtgggggaggagtggttgctagaggacatcaactagagaaatctcatcagatgggtagggaaagcagcaccgggggtttatttctactggccacaaggaagacagacatagtgctttggaggaagaaatcctctctcccatcccaggaggaaagttgtacagctgtgatatgtctggtctcagctttgattccagagggtaaaacagggtatgtttcatgatactctgcccatcggttattggtgattttcaaagaataagtatttgtctgctatcgttattctatatcctggtggaaagtttataacgaaaagtaatgcctttcttaagtcataaaatgagccttgtatgcttatttaattaaaatctatttaaggaccgattaggcgtgtaatttgcactaataatgacgattatggaaatgttcaacttaaccaaaaatcataaaggagacattttgatcagtggggcggccagtaagtatttagtgagttgggcaatttccgaaagacaggaggcattccgctgagggctgcagaaagcacagacctgtctggcctctgtgacatggcatggagaggggcagacctccctgtcccggccccggccccagcccggccagaccccactttgctgagcatggaaaccaaccctgcgagtctccacaacctttattctcgtgatgcttcctcgagcttccagaaggagtaaactctcggagagggctgatgagccacacggaaatctctgcgaaatggcggtgctcttttgctttaacaaacagcgctgacaaacgcatgcttccttggctagccttggctggatcccggaggggtagggggagaaggggtcccttgttccggagaaacctgccagctgctgggcttggtgtgaaggcagcaaaggcagacacaatgctgctgttgttggtttgatctctaactgtggattgttagtctggctttaactatgtggtaaggggggaatgtgaaggctgtttacagcgagtgcaaataatgtgacagctgttggcgcgcgagcagcgctgcgcctcctcagcacttacacaaagcgcgcactatgcaggcccatggacgagctgcagaggtggcggccagtttctggccagcgcatccccagatgagagaaagctccacggcacacccgccctccatccccaacacacatctttatgacttcccaggattggggtggggtgcaggatggtttgtatgttgtggtttagggaacttgtggtgaggcagaggtggcgggagaaggcccacggggccgtgagtgtcaccgtgttggtggggtttggccaggatccgttgaactgggtcctcagctgtttatggctgagtttttaagatttgtgaaaataactttcagccctaagtaagcttgttggaaagaatgtgttattaactgaaagctttctggaaattgcagaggctctgaaggccgttgttcccctctgaaatggccctgttattcagacaagttagagacaggcgggtgctgtgttctgtgcactcgacactgtttccagcttggaaatgcaagtgtgcaggttcagtaccctaaggggggtgtattttggggggaagggaggacagattggcttttgattacccacatcccttaaccttttcttccaagccttcccgttttcaagagcacatttgccttcaactgcagcacgcaaaggtgccgtcctgaagcctgcccacagcaccacctactctgacttcatcaactagatgcccacagcaacaggctttctttgagttcctggtaccccgccaggccctgcagagaggcgccagggtgggagggagagcagttggtggtggcagttacccactaggccagtcctggaggttcatggctggcccaagcaggtggacttaggatggccaagaatgtggacctgcctctggaccgtcctggggcaagctgggtgtaaaaattcactcctctcccccatgagtcccaaggttgaagccttccaagccctggcacctgcctggtcctccttgggttttggaagatcatttagggctgactttggtctctgggtgtacagcctacaggatatctgcaaatctacttcattctctcctgtcccccccaccctcagcacctcccctccctaagtctactctctaagttttaacatggacttctacatctagttgggtttccgatggggagctgggagatgcttctggagtgagacatgaacttcggtgccagttctataaattggtctctttttatgacgtgtgccattttctgtaggaatgttgcttgcaaaacgagtttcgccttggaggaaaggcggaaagataaacaagcctgcaacgccaaaacactggcagtctttccctccttccagctctcttaaagcagccgggctgtatttccaggattagacttgtgcatgtgaggagggactcgcgttggctttttttcccccaagcaaatgcaaattagagaaaaataattttctttcaacgatatgcaatgtattagtcacttgttatcgtgctccgaggcaggcctcatttgcgcgtctgccagctcgctcacatctgctcagcgctgttcggggcattttaaccttggcggtgtcgtgtctagtcccatggatcaaggaggagtaattaagccctgaacagctacaaaaattcgtgggcccccatctataccatagttgttccatggctttgttttgggtgctctgagttccatgactgagtagcagacatgggattcctattgttccttgtaaagaaggtgggtgcccctctccttctctgaccctcatcccagcctttctgggactcccaggctctgcacaatcagtgagagactcgcttgcagattgcaggacccctgcattttacacatcttttatgcattaaaagttcctttgtgcttcctgtgtatactaatgatagctgttgttattagccttacggtatagcttgttcccttcggtggtggtggtggtgggggggggtggcggcgacggcgtttgtgttttactcctacaaagccctggtggaaacaaaagtgcattgacacagcctttggaggcatggtgtggaacatttattctggatttgcccccaggttgtgtagattcccaagtggggacccagttctgcagggactagatcaaagggggcaagtggtttctttttgcgtggagggaagatagtaaggagggattcctggcttttgacttgggtttctgttgccgggtggcctcctgtgaagggacacctgtttctaaatttgccctctcttgaatacacacgtggtttcctgactccccgtgtggcaaaaccatgaaggaaagtgaaaagaacaaaaagccggtggggtggcctggacagattatccggggagacgggcaagtgtcccccgttggcctgtgagagagaggttgggggcacctgaccccgggccatgggctctgcctggaggaggggagtgtagcggacaatccaggttcggcagcgaccctcagggtcaacccctgcagattccaccccggaccccaacgcccgagattcgcacccctcccacgttacagtaggcgacgcttggctcacatctttgtaaggggaagcgtccagaggagcagcgctctagtatgatcggaagggaacccagaacgatggcgaggaggggtctgccgtgcccattccccgggtgggctcggcggcgtttcccgggaggtctcggattctccctgcgcccacccaaagtttcttttcgtcagattcgttgatggggagagaaggtgcggcggggcctcgggaaggggcaccatggagagcgtgccaggccgcagggtccgaggggttacctagggtcgggaactgggaaggtcgggccgcctccggggaggctgctggagttcctggaaggcctggcgggggcgcgccgcgagggcgtgagtgtgtgccgtggtgcggccccgcgcgctgggacctccgccgaggagcggggaggaggagcgggcgagccccgagcagcacgggtgtgtgtggtgggagagaaaatccctttgttgccgaccgatcgcgctccgggctgaagcgcctcagcccggggagggggcgcccctccccctttcttcttcgccggggccaagttcactcccagcccaggtggctctccgctcagaccccgacgccccgggaggaggccgggaaggttctgggtgctggaatggtctgggccggcgagtttccccttccccctcccccttactaatgcaaaacttggaggtgtgggcggggacgcccgtgctggctacggctaaggctgtggcttggagtgtgccaagaggcagcacctgggccggctggatcacttccctcacccccaactctctcgggggagggggtcgggaggggtgggaccgggccagccacctccctcgaccacacccctggaagcctgcggttttgcctcccagggacctggggggcagccttggggtatcttactctccagcagacccggaggacccatcccacactgcacatccggaagagctttttcttctcatctcccactcccacacaccccacccccacccctcacatcctaaaataggaacttcttcacccctcccttccttgacacccggagcacagcgctgctgctgtgacgcagtctctgtttggagcaaccccaggaagggctggcgggtggtgagctttgggcttctgtaaaatctacacagttctgctgaagttccctccctgctctgatcccctctctgttgctgcctcagcctcccccgcaggatgaggtggtagtgccccaaagaaactgtgttgtgattctggggcttattacacagtgtgtttattggagtcgggtactatttagcggggttaaacgtggccagcgccagctattgccaggcaaaactcaagtccatagtgcagcttaatcctttggaaaacacagtgccaaatatttacagaggggaccaaggttggagaggttcagccacctgcccagagacacgcggtgagtgagggtgggagccgggaggctgtggtgaccatgttctccacagagaaccagccatgcagtagcgagacccctcccctgaagagtcctctgccagaggaccccagcacactggctgggaatgcctgcctggccacctgagctggaagcccttgcgaacctctccagttcttctggctgttaactgctggatagctgccggtgggggcaaggggaacctagtgagagagatcccaagaaaagaccccgagatgggccaccctcaatgcctgtgtggacagcagggaggcgtgagcagagttagtttggtggccatgctttccaaattgtcagtgccacttgacaagtgtaatgtgcagacttttaactgatcggcgcctcaagggtgggggcagtggaaagtggccctagtgcaagagggggccagggttgggggtggggaaggaaaggggccaaggcttgggacctgtggtctgccctcacatcttttcacagagggtgggtgtgtccctactcagggatgccaaggttggagtgatggcttatgatcttggtccctcgacgccccccttctgccaatcaggccttctcccccgtgtccgggccaagctcaggtgctctcatcataacccttggctgaagagcgaatgactactcagagtctgtccagggtgacccaagctctcctatgtgttccacttccttggtgctaagagctggagaccatgcagtatgcagtgtgcacgcctgcttctcacaagccaggtctctccacttggccctgggtgttcctgcaggcagctggaacagttcccagtctgttctttagagacccacaccctccccatctgacctcttctcagctgtctttcctctccatccctatccagcacctttacccacttctctccactactagaaaaaggggttaaaccccagatccaaggtgcagcttcgcagctcacagtggaacaggttggtgcttgtaaagtgcttttcatgagtgacttcacacatcttggcacttctggaagcatagcctgcatttggaagaagtggggggtggaggtgggcattgaaaaataaaagcaaacgagcttcatctatagctgcaaagcaccctgaggctctgtttgtcattgaaatcaggtcatttgccctctccacagtgttccgctgccaagggtcagcaacatcagtttcgaagcacttggccttagaggtaaaaaagtccccagctatttcaacagcagcttctagaagtttgatgtccctatactttgcctcccagtctctttttgtttcttaccccagtgtccccttcgttgtacatgacagagaaaccagggtgggctgtaggtaatggtgacccctgttcttcagtagaggcttggtgtgagccgtatggcctttgcaaaggaggtccctgcttttgtaggtttggactgctctttgtcacccaggaggagggcctcctgtgagccagggccattgctcattggccctttccactcctctccatctttggccaggaacccgaagagttaaaagtctttagcttgttgcaatgaaattatggctggcagtggcgccgctgtttgttcaacagacctccacttttaaacagttcacaaaaagttcatggggcagctaaagattataagtgtgtgtgtgtgtgcgcgtgtgtgtgtgcgcgtgtgcgtgcgtgcacgtgtgtgcgtaagtccacagcaggatccaacaatgtgttccccccttttgcttttatgttcagccccatcctccaccccttccctcccaaaacacacacacacacacacacacacacacacacacacacacacacacacacgacagtgaaccgctctgctagcctcaaccctccatctgaccctgtgcatttgagaacactttgttctggtggctggtatcatttatctgtgcgccattaatatggaaagccccaaaggaggagccctggagaaggggagatgctttgaaagcacccagtaggcccaggtgcctgtaaaccgcagtcacctttctgctaagtccaggtggactttgctgaagaaaggctctttgaagggaagcagctgctggccttttcggggctgggcctcagtataatgattctgtttcccaagaaggtgccgggaggtcctttgcacaaggtgtctacttaagggaggtgggtaagaggcaggttttttgtttgtttgtttgttttttgagttttgctcttgttgcccaggctggagtgcaatggtgcgatctcggctcaccgcaacctccacctcccaggttccagcgattctcctgcctcagcctcccgagtagctgggattgcaggcacgcaccaccacgcccagctaattttgtatttttagtagagacggggtttctccttgttggtcaggctggtctcaaactcccgacttcaggtgatccacccacctcggcctcccaaagttctgggattacaggcgtgagccatcatgcccggccagaggcagcttttttaaaggggaggccaatttttaagaatggggacaccagaagattgaggttcattaggcacacgcttcttccctcatccttttcttgggggtttggttgagtgaccctttggctcatgatgtaatttctgtatttcatcatggcacagtgagggggtggcatggtgcagtcccactgctgcagcccgatgaccgggacacactggcaccggggaatgatgttccaccttctctattatcctacccagaatgtcttccttttgttagaaagggcagcaggggccggagaggggacactgccactgcacaagggaatgtgccttgtggtctgcccagccctagtggtggccttccccacttgatttgtgtatttgcaagatggaagaaaagcccacgaacccttatagaaccttccccaacagccgagtcggtcctttgggggcgctgtggctagtcaactggaagagccgctgtctggagacacttcctagggaaatagctttccagaaccccatcatgcctgatgcctctgcagatttctgcctttttcttgggccctttacctctcttccagcctcattgttgagctctaactgtacgtggtgtgtcgctgcatgtggattttggttaacagacgttgttctatggggatgggggcccatgggggatgctggtggacaaaagacctagttaggacaaagaaatgagaaagtacagaccggctttgggattccatcccccaggtgtccccttaactcccaccctcagtcactctcacagaagagtccccggacctggtgcctccaacccaaccgacctggcagtctgctccgtgtgctaaagtgtaaaagcaagcatttgcatattttttcctgctaacaaaggaaatgtgtcgacttagggaacatttgggctttcggaaactgtgtgggtgggtgtgtgagggaggagaaaaaagttcccctgatgatctgcacaccaattatttcacacccaggtttgggtcccgtggaaaaatgccatggccggtctggacaagggacactgagatgtgtttgtgagcagggaattgccgagggccatcggtcccaggcattaaaggctcccctacttattaacccagcatttaacagcaggatatgggctgaagcgcagtcaaaagaaacggctcaacctccaaagagcaattaaaatcctgcacgaggataaatcacgcgccgtgataatcctgttaataaaatgcagcttgtcctgacccttcactcatgcagcaaactagaatgtgatgtgggtgggggcggtgggcagaggaggtaaaggggggtgggtggtggtctgagctcctctgccttggcaacctcccgctcccggaacgtggaaaatgggtggcttctgccggctccccatgtgccagcggcttggagcccatcagccagggctgctaagacttctgtgctcgctaatgatttctcgtccccagtgagcaggcgtcattgaattactcagccgcctctctctgcagcttccaggcaaaaccacccgggttagctgcttaatctaatccagggctctggtggggcggctcaccagcccaccgactctttttcacacttgatctgtaagttgcacacacgacagccttggaaattcagccctagaaacgcaggtagtttgagagctggacctgccgctcacctcactgtggtgccttccacccttcttgcacccttttggccccaggaaagatcagttgtgtgcctcccagtgatgcagcatccctgaacctattgtcagagcctccccttgttgaatcaagtcttctttaccttctttaacaagtggcaagaatgaatgaccactgtacactttcagaggaaagggagtgggcgggtgctgtggtgtgccctgaatgtgttctgtgccttggatgaggctacctgtttcgaattaaacttcttccccagccccagcacctcctaccagggaagctgcatgcccctccgctgtcccttcgagtcaggtgtctgtccttggctcccagaccactgtagacagcaggcacagcctgccttccccatctgcatcctttatgaatcacctagaaagaggccttctctagcgccctgtttggctctcctttactgaacctcctgggattttttttctttccttttaacagactagacgcttgaagcaaagctgccatcccagaagacgacatgctctcagcaacccccctgtatgggaacgttcacagctggatgaacagcgagagggtccgcatgtgtggggcgagcgaagacaggtgaatgcgcccatctgggccgggcctgagtggagcccacgcccatgctgaagcccccctcaacttctcacagccaccgtgggcccaaaaggggtgggagagaaagagcttcccgcctagtaggccgctcttgatttacagttttaacaggcaacctggctcagtgaagcattgccgccctttaaaagattagcccctaaagcggcctttcagtgcactttcgtccttaatttattatttcatatttatgaaggagaattaatcccagtctatatactgctttaactctaaatgtcaggagtgtgggcccaggtggagcagcattctatgtgcttttaaaacaaatagtttgctcagtaataaatggggagagagccaccgttttccttcattgaagcccaggatctctcattgtcctctgctgcctgttcccagaggccactggcgcctgcttttggtcgtcagacagctctgttatgcttcctaatcagtaattttggagttgtggggtggaggcagctaagcagtagatgattgaagctgctcttcggggtaatgaggaaacttttcctctgccgcttgtcagcgatttttatcctggggatttggaagttggcaccaagcactttctttatcgatgctctctgataacaagtcccagggcagccgcagcagcctggcacagatgtgcagcttccttttcagcctggaacagctgacatttgtatgatactagtgtgtatccccctgtcattttgacaaaggcagtcaaatatggcttttttatcaccatggaaaccagtttcgtaggacatggtccctaactttgttttggaaaaagttttgaaagcctaccctcctgggtaacacggaagtggttgatgacacgaccagccttccagccccctttggtatttggctgtgttaccacttcatgtctaccctccaggagagtttataagggttggctgggacagccgagctccgattggcctacttggcctctagagaaaaaaatctcgagggagaagtagttgtgcttaatttctggcttacctaccttggggacatcatatttgtgattcatgtcctcacacatgaaagctttgcgtttcctttgtttttcctggtcaagttgaatcaccatttgggggcgactttcaatatgggccattgacagctggtgggggcggagggttaaggacagttttaaaaattgggttagtagaaactggtctgttctggggagatctgtgaaagatggattcagtgaggaatgctttcatgaagttggtgtatctttttaaataggaaaatccttgtaaatgatggtgacgcttcaaaagccagactggaactgagggaagagaatcccttgaaccacaacgtggtaagagattaatagcttctgttgatgccatatctgcatatcagtgatctgtaatcaatcgtattaatttgcatgcccttaaagggtggggaatgggggaggggtggcagttcagagcagggctgagttggaggcctctgcgagaggacaaggcccccacccaagctcttccagtcttgccttcctgcctcgccacacatgtccctgtcccctagtgactggtgggatgtgtactctcttttcttccataagctggatgccacatcagcgctcccagctggataaatttccagcctccaagtagccccttagggtttacctttccagtaaaatacgaaacacaggactgtcacttcagacacaagggagaggaagtcaaaagacacaaccacagtttgacccatggcctctatattgatatagaaatgaggctgctaaagtcctctgttcctgttgtcccatcgaagatcgtttcttgttctgttaagtcatgccttcctgcacccaggggaaatgaagcgaacacccacccccaagcctgacaggcccagggagggttagtgtgaattctgtaccccatgagggtgatgctgagagttttggagttggtgtcctagttgtagcaaagaatttttgctgagaaggtaaaaatcttcagacttttttatttttattttttaattttaatttttttagagacagagtctcgctgtgtcgcccggcctggagtgcagtggcgcagtcttggctcaccgcaacctccacctcccgggttcaagcaattctcttgcctcagtctcccgagtagctgggactacaggtgcacaccgccacacctggctaatttttttgtattttagtagagatggggtttcaccatgttgcccaggctggtcttgaactcctgagctcaggcaatctgcccgccttggcctcccaaagtggtaggattacaggcgtgagccaccgcgcctggccaaaatcttcagacttaatagatgactgaattaatatatgggcctcaagtccaaagggaccaatgttttccctgcttccaggatactagttgagaggtgagaaggcaggcagcaaaggggtttggataagggggtggggaaacagaccccccacccccgccccgccggaagcctgtctttaaccctttgtgcttggatgttaaggctgatggcatgttgaactagttggcagtgtctttgggtgctgctgccttgaaggagtatcccagtaacacccatgttgttcttctgcaaaggtggatgcgagcacggcccataggatcgatggcctggcagcactgagcatggaccgcactggcctgatccgggaagggctgcgggtcccgggaaacatcgtctattctagcttgtgtggactgggctcagagaaaggtcgggaggctgccacaagcactctaggtggccttgggttttcttcggaaagaaatccagagatgcagttcaaaccgaatacacccgagacagtggaggcttctgccgtctctggaaaacccccaaatggcttcagtgctatatacaaaacaccgcctggaatacaaaaaagtgctgtagccacagcagaagcgctgggcttggacaggcctgccagcgacaaacagagccctctcaacatcaatggtgctagttatctgcggctgccctgggtcaatccttacatggagggtgccacgccagccatctaccctttcctcgactcgccaaataagtattcactgaacatgtacaaggccttgctacctcagcagtcctacagcttggcccagccgctgtattctccagtctgcaccaatggggagcgctttctctacctgccgccacctcactacgtcggtccccacatcccatcgtccttggcatcacccatgaggctctcgacaccttcggcctccccagccatcccgcctctcgtccattgcgcagacaaaagcctcccgtggaagatgggcgtcagccctgggaatcctgttgattcccacgcctatcctcacatccagaacagtaagcagcccagggttccctctgccaaggcggtcaccagtggcctgccgggggacacagctctcctgttgcccccctcgcctcggccgtcaccccgagtccaccttcccacccagcctgctgcagacacctactcggagttccacaagcactatgccaggatctccacctctccttcagttgccctgtcaaagccatacatgacagttagcagcgagttccccgcggccaggctctccaatggcaagtatcccaaggctccggaagggggcgaaggtgcccagccagtgcccgggcatgcccggaagacagcggttcaagacagaaaagatggcagctcacctcctctgttggagaagcagaccgttaccaaagacgtcacagataagccactagacttgtcttctaaagtggtggatgtagatgcttccaaagctgaccacatgaaaaagatggctcccacggtcctggttcacagcagggctggaagtggcttagtgctctccggaagtgagattccgaaagaaacactatctcctccaggaaatggttgtgctatctatagatctgaaatcatcagcactgctccctcatcctgggtggtgcccgggccaagtcctaacgaagagaacaatggcaaaagcatgtcgctgaaaaacaaggcattggactgggcgataccacagcagcggagttcatcatgcccgcgcatgggcggcaccgatgctgtcatcactaacgtttcagggtcagtgtcgagtgcaggccgcccagcctccgcatcacccgcccccaatgccaatgcagatggcaccaaaaccagcaggagctctgtagaaaccacaccatccgttattcagcacgtgggccagcccccggccactcctgccaagcacagtagcagcaccagcagcaagggcgccaaagccagcaacccagaaccgagtttcaaagcaaacgagaacggccttccaccaagctctatatttctgtctccaaatgaggcattcaggtccccaccaattccctaccccaggagttacctcccttacccagcccctgagggcattgctgtaagtcccctctccttacatggcaaaggacctgtctaccctcacccagttttgttacccaatggcagtctgtttcctgggcaccttgccccaaagcctgggctgccctatgggcttcccaccggccgtccagagtttgtgacctaccaagatgccctggggttgggcatggtgcatcccatgttgataccacacacgcccatagagattactaaagaggagaaaccagagaggagatcccggtcccatgagagagcccgttacgaggacccaaccctccggaatcggttttccgagattttggaaactagcagcaccaagttacatccagatgtccccaccgacaagaacctaaagccgaaccccaactggaatcaagggaagactgttgtcaaaagcgacaagcttgtctacgtagaccttctccgagaagaaccagatgctaaaactgacacaaacgtgtccaaacccagctttgcagcagagagtgttggccagagcgctgagccccccaagccctcagttgagccggccctgcagcagcaccgtgatttcatcgccctgagagaggagttggggcgcatcagtgacttccacgaaacttatactttcaaacagccagtcttcaccgtaagcaaggacagtgttctggcaggtaccaacaaagagaacctagggttgccagtctcgactccattcctggagccacctctggggagcgatggccctgctgtaacttttggtaaaacccaagaggatcccaaaccattttgtgtgggcagtgccccaccaagtgtggatgtgacccccacctataccaaagatggagctgatgaggctgaatcaaatgatggcaaagttctgaaaccgaagccatctaagctggcaaagagaatcgccaactcagcgggttacgtgggtgaccgattcaaatgtgtcactaccgaactgtatgcagattccagtcagctcagccgggagcaacgggcattgcaggtgagcccccccacctgaatttcagttactttaccagttgtcagttttttaatgtgtaaacaggattgggggagtatggtagggcagggcaccaggcagatttggtgaatgaagcttgtggtaatttgaatatatgcaatgtggccagtaagagaacgtgagtggtagcactgaggcgtgtctggatgctttaagttattctgtagattataagggaactccactcaattgctgataaccgatgttttaattattgtgaagggtatctaaagactgcatgacgtttacctatcaattgctttgatttctctgcctgtaagatagcaaatatacctagaagtgctgcttagaatgccttacttgatacctggtagagatgtgtagcagccgcatgtctgtgggattcatgcaaatttttcaccaaaaagaaaggaaaaaaaaaagaaaaaaggttgcttaaagggatagagtatgtatttaacttgctagtgaattatgatagatgttgtataggaatttccttaagatattttacttttaattaaaagatgaataaagccaaattgttttgcaatgttaagaaaaaaattggtttatgcttataaaaatggatgaagttatctaaatgatccattgagtgcccattttaattacatagatggaaggattacaagaggacagtattttatgtctacccgctgcttactgtgaggtcagttcttcaaatttttattactagaatcttacataaaccttttgagttaaatttcatttccaaatatacaaagggaagtttgtgggccatggtcgtctttattcattgtgtattttgtttcttttctgttgtgtttttgttttgttttctttgcgttgtgttttcgttttgttttatttaccttcaaaagagaatgtctgtctgtatgcaatagtgtatgtgtggatatacatacacatcgcatatatatctatatacacatgactttatgaataaagaatgtgtgactacttatatatagatactcttaagttttatctgttaaactttaaaatatctgagttacatctcataagctgtggttggttttgggcacttttctttgaaaatactttcctttaagataaggcaaatgaaatagcttttatggtaaggtgttgtttttttttttttccatctccgttctctttctagcgtgcaatgatgcgcttctcagagttggagatgaaagaaagagaaggtggccacccagcaaccaaagactccgagatgtgcaaattcagcccagccgactgggaaaggttgaaaggaaatcaggacaaaaagccaaagtcggtcaccctggaggaggccattgcagaacagaacgaaagtgagagatgtaagtaaacctgagcagtttgcttgtgttggcctcaggtccggttggcatctgcttggagaaatgggctgcttttgccatgcatggaatgaagggccgattgtccttatgaatggtggcaaccaggaacgaggcgtctgtgaaagatagtttcctgggacacatctttttttccaaagaagcactggttctagagttgataacagtctaatataacgcagtgtagcagaggtatggcagtaggaaattaggtgcagggacaggttatattttgtagcagtggaatgacacttcccagccatctcctgccccacccctgtggtgacagtctgatgtggaatgaagagtccttatattctccctccaaaggcatagatgttgttgaagtaggatgaacatggtgaagtcaccataaagatgagcgttacgatttaccgtggggggtgggggagaattggccacagaatcccaaggcagcctggcatgcatgagggggctcttcccaccggacagagggcagcttgcattttggagggcaagtgatgtgaagagaaggctagtatcttcctcagtacactccctttggtccttacagcaggtcccccaccccaccaacagggttgactttgggatttgctcacgagtcttctagggtgctaagatgtgttggcagcaagtggaggtcttcctctttatttcttaaatatgcaagcttgaagctttaggtctgcttgcaacatgagaaacctcactgggcgaaggggaattagggtgtctgggtgaactaactggaggagtaggtgcaaagtcctcctgacacaggacacttggaagtgttgggtatgtttgagagctccccaccatgggccgtcggaggtttgacattcacaacacagttcatcggtgcctgacagagtttgggaagaatgtgtgatcagggagagtgtgcttcttgatactcggagcgcacacccctccctccacttccagctcatccctgggagcagactaaggccacctgccaggatcctgggtaagctaaaccaggactgatttgttgtaagtcattgctgaagaaagtagtttctgctgctaataggtggtggccttactcaagtggcagggactcaatgtacctgaagttgctcactcttcctcaaagagtggctacagggcagtgggaggtccaagccactcttgggtgaagtggcaaagaaagccttcctcctccctgatgattgctgccaactcgcagcccccactctgagttgcctcaacaccagctcttgggaaggttgtcagagggacctgggagaagtgggcaaggccgagttgatggggaaggtgcttctaaaagagggagtgccatacataagaatccctctttgttctgagtagatggctgggggcctggaggaagggacaggaacttagccagcttccagccttcttgcccttgctgtggtttttgagtaacatggccagaccctccgttcacatctgagtaactcggtgtggccaatggggagcagggcccaagccccacatgatgtagaaaggcctccctttccctttctgtaagtccctccaagcttcataccaacaggctgtgttcttggagcacccaggacagggccctgcaagccataagtcaccacgtagtgctcctcaggtaatgagccatggcagggagagcagaagaagagttgggggaaggtgaaggctgctttttaaatactagggccaaggaagagctggggcaccataggtttgtggttgatcaagaggaggaacctagaggaaatgttgtccttgctgctgccactgccatctcatccagggtacagcatgcgctggatccgtttggcttcaaattcactgagctatctcggccatcacgtctcttcatgggtgtcactgtggcccagagccaagctgtgagcatatggaaactggggtggggatttggggcaggcaggggtcacaaagagggtacaggatgcctccccgaagcctctcccctccactcctacagcaccagtagcttctgagatggcaggtgccgcctgtgcggcctcagctgcctgcgtgtgggtgcatcttgttgggagggcttgtttaaaaaaactgaattaactggacaacaccgtggttaggattttcattgactcttagtgatagtatgggttgctgagtttttcatttagaaattgaacaaatgagttaggagtgtccccaaactcctaaggaatgataagtggcattttgaagatggggtagggaacacggaggtgttgggcccttcctttttgtttttagttttattatttttattgattgatttacttttgttgatacatattagatgtgcatattagcccttccttcttgaatttgggtgtctgtctcccttggtagccacttggcttgtgtggacctaggactcactcagtggcaatgcctgagcgggagctggagaaagcgttgagtgaaagtgaaagggtttcatgggacttcttggctcaggaaacttctcttccaggacagcagcccctatgtactttgtaaactactttgagtttgggcagacagatgactaccaatgcctctgctgctggagagggtagaagttataacatggttggcctctgctagaggtgatgttgcctgcagagggagtagatgtcatgggcagtcctcaaaaatctcagtcctctgccatcctgtttagggcttactgggcgtggttataacagtggtgaggttgctttgttgccacggtgacttgtaaatgttgccatggcgatgcttccaggaggtattgcaatggcatagccatggtaaattatgggatgtatgtgctgtgccttataggaccatgatgcaaggagaaagtggtagacggtgtaggactcagccatgttcacatctgcctagatctcatgaccaaaggcacatggcattccactcacagaagggctgtaagtagttgcaatggaagaggaccctgatggttaggacccctatctatcccttcatctctgtctatgcacccatctcctttgccctcaagagtaatttctgtgggtactggtaagaatagccccatttgagggaggtccaagtgaagtgtacaggaaagtgacctggagcctctccctcatagctgtttgccatacgtatcttcggcagtcaaggtgggtgttctttgggattattactggcccatggagggaaaccctagcataaggtttgggggccttcactgaggggaattgggatgtttgccttgagaggctcaggggttgaaggaaggacaataggcctcatttgcggaaagatctcgtttgcggaaagatcttcttgagagcggacaagaagcatctacactgcgtgtgggcaggcatgattgcagtgaaccccagatgcagcagtggagggctcccgataatagttctggactattcaggaggcagaagggggccctgtccggctgaacggggaatggtggggacttggaggaggcatgtgtgtttcgcaccccttatcctagcctgctggcttccccatgaatggggagcagaaggtggtgtgtgcaggggagccctccccacccccactgggcagcttttcctagatggggagccccagagaagacagatggcaagacctccccatatctaatgggggtgctccctagcagagagactaggtccccagttagtcactgcctgttgatgccagtctgtgaaataagtgattacaagtcttctaggtggttttctgtggacaaaatatactggcagtttgggcataaggccaggtaggtgagatataaactcatttcactattaggaagtttgcagtgaaggtcaaaactccaatggaaaactttctccctgagaaagatgccttagacttggttgagattgttacaaatacaggtggctgtgtgagacctggagttcaaatggaagctgtggaagtcaaatccaaagcactagggttgagagattcttaatctgatggggatttgatgggggggggggggtgtctctgggaagggtgccaagacagggcagttcgttctgggtggggccccacactggctaagctgctgcctcattttgacccaggaaggcattgtgacattacctagtcacctctgctttcaaaccacttggctcaaaccctctctcctacctaaagggaggggaaatgagtacactttaaaagtataaaagtaaccttgcatgtggcgcttcgtaacacagtctttacatttttacattgcacccccagcccctcccacagggctttcaggggcggctgattggctccagaaagtcaaatagtatataactaggacaatcagttcacatcttaaactttcataaatatcagggctaaaaatcaagctggtctggggatcatagcgtccttttgtaagtaatttctccagccttaccctctgccctgctgcaccgtgtttatgaagcccaccgggggaggtggcttgcagtaatagtcccactttacaactcaagggggccaaactgtaaagtggcgctgttactgccagagtggttaagacacagagcaactcgagtcgcagcccaccctctttgcgtccccaggccaagctgagcacagtggtcaccacttctgcatagtgtaagttttgggcagcttgtgtgttttctcctgttgctgctgtgacataacaccaccttggccatgtttttggacgcccatccgttgctggttgtacctacagagacctggggtggtattccatggtgggggcttgggtgccgaatcccagtcccagccatccctgtccatacagtgcactgtcgtgagtgaggatgaggaggaacggttggggagattctaccattcctttgcaagaatagatgcagccccatctgttcccccttagaacacccttgaagagaaggtgaatgggtccttgcaccattgagagcacaggctagccaacacccctgtaaagctcacccccacagctgactgccgtgaaccgctggcaatgcccccgagagaagcgggtgagcggtgctggtcaggagtgggagtaatatttgaagtgggttggggagaggaagaatgagatcagcggatgaggcgtgtgcttatttcatctagaaattgacttgtgtgcctcagctcagagttaccaagacaccagactcataaccctggtgatgagagggatcatttcagcgggccaagggctgacaccttaacctcgcagtggtcattaagtagttatcatttatattcattgtgtattagaaaaattgtgaccagcaaagcagttaatgagctatttcttgggctagagcaaaaataggaagtgatgttgggctgaggtgattcaaggaaaagccccaaggcccgtgataggccgagcacagggttcctggaacgagcggttttgcaagcgctggcctggcatgggaaggacacaccaacaatgaggagatgtctgtcgatgcttgcctgtgacagagggtgtgaagaggagtgtcagctggggtggccagcatccccaagggggtccctttgtgttggacaggaaatgggaacagcccaacccattggtttcacatctgtgcatccagcaaatcgagttttttgaagttttctctgaactcgtgtatgtgttaggaaaccttgcctttggctttgccacgcccctcttcccagcagcctgggtctgcctgggttccctgcctccctctggcctggactgtaggcccagagccccccaggagtgagggtcacttctgcccatcaaggacctaggctttctttcaacactcttgtctccagtccattttcatctccccggttggcctaggtgaatattggtgttatcccttcgatagatgacattttggggatatttggtcactttatcctatcagcctgccatttatttcaaaataatgacctcagcaaatgtttccataaagatttttaggtcagccccagcttggttgcatcttctgctgaaaggactatagtgctttaaaaaacgtagcattgacgccccatctttcttggttccctcttgcccccaaccataagaagggagaaggagaaagtcaggagtgtgacatgcacctcactctgctttacttgccactcgtcttcaatgtaccctccctctggaaagttctgtttctgagggttttgtgctaaccatgtgtgaggaccccagtctccaaagaagcagctgtcaatagcagattaccttgggcatggtggtcccacgcactccccagatcctgccttctcatggcgaccttcgggcttcattaatgccctcttgtctcccctcccccaggcgagtatagtgttggaaacaagcaccgtgatccctttgaagccccagaggacaaagatcttcctgtggagaagtactttgtggagaggcagcctgtgagcgagcctcccgcagaccaggtggcctcggacatgcctcacagccccaccctccgggtggacaggaaacgcaaagtctcaggtgacagcagccacactgagaccactgcggaggaggtgccagaggaccctctgctgaaagccaaacgccgacgagtctctaaaggtgagccctgtctgcttcgcccgcctgccggggggtgggcctttgcatgcggccacagtggatggacaggagatgtggatgtgcggcgcgctgcccccgtagacagagtcggtgaggggaagccgtgggggcgcagcagtggagcggacctctccattcccacactgcctcgtgaggttcccaccctggagcccccggggggagccgcccacacctcccctcccccaaagccagaacccagatggccaaagatgattaggccccttcccaaaagcagagaccagtgaccacaccccccctcccccaccccattagtgatgcgtaagacagtttgttcccccccggggggctttttgattaatttgtagttatttctccattagatgactggcctgagagggaaatgacaaacagttcctctaaccacttagaagacccacattatagtgagctgaccaacctgaaggtgtgcattgaattaacagggctccatcctaaaaaacaacgccacttgctgcaccttagagaacgatgggagcagcaggtgtcggcagcagatggcaaacctggccggcaaagcaggaaggaagtgacccaggccactcagcctgaggccattcctcaggggactaacatcactgaagagaaacctggcaggaaaagggcagaggccaaaggcaacagaagctggtcggaagagtctcttaaacccagtgacaatgaacaaggtatgcgggggccaccccttgagtgttcaccccgctcctggagggtgggtcatccactctctgtaggaaagggcttttgaggagatcttagaaggccatagcaattgacttcaacgaagatgtggcaggcagggagttctctcttgatgtccttgcccgtggttgcacaggaaggaagtctgaacaccttcattccagcctcaggctgtctccagtctctgggtcctgagcaacccagacccagtgggtagggggcaggaaagcaggaagagccagcttctgtcctctcttccgggccctttgaagcaacttgccacttggcgttttgtgggttaacttaggtgccgtttgaatgtggtataattaaaatattaatgctttgaaaacataattggtgtatctttaaaaactgaagccgctccagtgatcagtgttaacaatgggcttttcttcctgcactggctacaactgtgtaacgcccgcttcttctcccgtctcccatccgcccgccaccccgtcaccccctccgtatttaggcttgcctgtgttctccggctctccgcccatgaagagtctttcatccaccagtgcaggcggcaaaaagcaggctcagccaagctgcgcaccagcctccaggccgcctgccaaacagcagaaaattaaagaaaaccagaagacagatgtgctgtgtgcagacgaagaagaggattgccaggctgcctccctgctgcagaaatacaccgacaacagcgagaagccatccgggaagagactgtgcaaaaccaaacacttgatccctcaggagtccaggcggggattgccactgacaggggaatactacgtggagaatgccgatggcaaggtacctcttgaccccggcttccctctggggcctgtgcgaacacatccccgcctgcctgcttcccagcttgaggggacaaagctttccttttcctggactcctcccccacaccacacgtcactcccctgtcctagaggagcatgtcttctgggtggcagcgaagtttcaaactagtaagaatgaaatcccttcccccaaaccctcctttgacaggcaccccccacccccaaaaaaagataaggaataaagtgcctctctccacgcaggtttgtcacgtggggaggaggaggggaagcagcggctgttagaaggacacgggcttaaccgtgtgcgctgcttggttttatgataggtgactgtccggagattcagaaagcggccggagcccagttcggactatgatctgtcaccagccaagcaggagccaaagcccttcgaccgcttgcagcaactgctaccagcctcccagtccacacagctgccatgctcaagttcccctcaggagaccacccagtctcgccctatgccgccggaagcacggagacttattgtcaataagaacgctggcgagacccttctgcagcgggcagccaggcttggctatgaggtgtgtccctgtgggcgctccctggggctgcaggctggggggcggggcctgcggactgtggtgggcgaggggagggacatggagagcagagctcagccccctccacatcggggctgggccggtgctccaacaggatgtttgtgttagccccactctcactgctgtctctttggtggcttgttcaatcgcggtgtggaaagaaaggcctctctgatgttcagttcgtgttcaggcaggtaggctgctacggcatcctccagtctcgctaacttatctctgatataaaatctgacacaacccagggcttggcgactaggggaattttaatgagcccttttggattctgattagcaagggggagagaagttattagctctatctggggctgcttgtactgtttcgggtggaagggtggccgtgtagggggagtaggcaggaagtagctgtgtaggtcacagagggaggggggtggggcagacctaaggtctctttctgagtgggggggtacagtagccttagggctgagggctctggagggagggactgagacttttccctcaactcactgcttctccccagcccccctgctcatcctcctcctagcatgggccatgacaatgatagcttacgttgacggagcccctaagatccaaagtaactcatttcaccctttcatcatctttgtgcagtagtaactaatattattcccgctttcagatgaggaaactgagtcccagaggcgttacatgatttgaacagataataatccagcagcctggctccaaagcccagtctccccccatccccccaaactcggctcctctccaggactggctcccattggaatcacgcttttcacagttcaaaacctacgtctgcccctgtgcgtctccccaccacacacttgtcagttgagatagtgatgtaatagcccacagtgcaaagacatttttttttatgctggcatcagctctctaggagtcgtggtgaaaataaaatgcggttcagcaggctgagtgtgaagtgtggagaagcacccgggcgacaggatccatgccaggccatgctcagctgtgggctcccggaattcagccagagcccaggctcatgcaccttaaccatgctgcagtcagcagtctgctgtgccttgagcctttcctgatggggtgacccagctgccagtctccctttgacccagagcccaccctggggcatgattgtgtgggtgggaactgggatgctggctcacacctgtgggatggtcctttgaagcactagctaggtatttttggttgtatgtgactttgtctattcataccagcttgtttcttatcgatatctctggattatctttgagggaactctctagaaggatttgaaaattagctcagttacttgcagattaaacccaagtggcagccagttggtttcccataagctgagagcagcggcgcctatgaggacagggtagatgcagcgtgccaggcagggccactcattcctacgcatgattgggaaaatggacttgtgcttccagcaaacaccagaggtaagggagggctccagggcagcaaacttgccggccatagcggggtagggctcctggcctggtctttgatcctggcttcatttctgccagtctcacctttctgagcccagagcttcaagagacccttgtgggtgctctaaggaacagtttccattctggtggttttcctatagcaggcctggactaaggaacactgatccatgctttcttaggctaccaggcctttggtgcaagaagccttgagaatgtttatggaaggacaacttttccccttcaaatgtaaatgtcattatagaactttcccaggtcatcagttttgatgctgaatgttttaattactagatgaaagctttcaactttgaatccaactttctgggatttctttagtcagaaattaaaatgttaggatgatagtccattcagatgtggcagtgtaaaccctttaaaataaaagaacagtttgcttaacaggataaggtacggtatgaatgcacagctttgggagaggtttcccaaaacccctctttatcattgtcttctgcttagctaaaaagataccacatgcaataaaaaggctgctcaagctttgttttctgttaatctggttcttgaggtttagaaacaccctctgtcttcagatctgtaatagaccacctgaaaggccagttacagttgaacctgtctgttcttaggctaagatgccaatgtggaaccgcatgtgtgtgcatttagtagtgatggttaagttttctatgaatcgaataaatcatgtttttaaaaaagttaatgaggcatttaattaattaacaatgtcgggtttatggcctttatggttacattttgcggttaatgtcattcagcttatagctgcttaacagagaattgtccaacaaaaacagtttgattttgtttgggaatgggcgggctgcccttcaaacactcccatttccagcgtggagaataaaccaagtaatgtaatgggtagacagacttgtctggcttcttcattctctctgttggtgacagcggttgccacccatttaagatcccatcaccctcccatctaggagagtgtcattagcctgcttgaccccaacagaaaaggtgcaagggatgccggtcatggctggattgcagccctctagccagggcccttgattgggcctttggaaacttcccagcagacccgttgccaaaagacctgagttatgggtctgatactttgtgttaattgaatatggggcttaacctctctgggcctcaacttccttgagtgttgaatgagactcataccacttttccttcctgagatctcacaggtcactgtgggatatgacatacacatttgggaacatcagaagtgttacggtggccaatggcaaaacgtctgacctggttgttgggttactgttgtcttgcctgccatcctccaggataacagagttgacttacccttcagcctcgacatctttcatttctatgttccctcagatcagccctagtagtgatgaaggtttccaggtgaaggccataattgtcagagcaaataaaccctgggttgataggacaccaggccggctgccgggatccgggtagattgatctgtgcacagcagtcggtggcgcttagagctgatccctgagtcacgtgacagggcctctccctggctgggtacacagctcattagcttgcagccgtccactcgagtctggctagtgagggcctgctaaaagagcagcagcttcatgcggtatcctggataccagtgctcggggcaggtggcctgggagctcagaggattgtgggctttctggcaggtgagggcctgaaggaagagacgcatctgtgggcatgccttctctcttcctccccttgatttggaagggagctgccgcagtgtcctgaagcaacagggttaccggccagggttaccagcgtgcagccttaggttcacagggggagcatctagaacattctagttagtgttcaagtgagtgatcacctttgactgatgtgtcttagaaagggcataaaagaattttcagaactcacctcacgtttatgggtggctcaaatgctgcctattttaggttatagatgagttatttaagagttgtcacaaaggagagcctgctgtgacccatcaagctccccccttgccaagtggaacatgtgttgggctaccccacatgttctggctttccccccagtcttcagaacctgacagctctctgctggccatgactgctaggaaaacagtgtaacctgttgtctggtggcagatactgttccatgtgtttgaaaactttcttaatcaaggtaataaaacatggactaaattactgctctgcttactgggagcggttcattttaatgttttaacacgccaaagaagtgagattaataacagtgattctcatgcaaactgttgatgcggaacacattctgcaaagggggaagggaaggattgtcttacttagttcttgaaatgcgtaggttgtggtatgtggtgtattagattcctgtcattaacttaagtaaatatgaaaatatattgattcagccccaagtggggcggagagtgaagcaaaaagaaggtagggttattggaagcgttgatgtcatttgttgatgagtatgataccaacagaggcactgccgcccaggctccaactccgggtctttccaaggggcgtgaggaccagcctaaactcctgggcatcctcctctctgtgaagttgagaaacgttctccagctcatttaattgttcattatgccttgattggccttgcttttatctaaacttgtgtcgtcatccactactacctattggatgaatcgattgagtgaggaggatgtccttgtacttattcatgcgttgtttgaaacattagcaaccaaatccctctgtactcactgtgccaggcactgagctaagggcttgtgtgggtctctaattacagtttcttagcagcctctggtaggcgctgttactctcctccagaggtaggaaaggaagctttggagaattaggagcataactcgcccagggccaggcagctgggcagcagacccctaaatgatgctgtccctgtcatcaggcgcttcgcacatgtgtttccccctcaccaagacatccacagcccgcccgagaggttctcaggttctcaggcctgagggtgtatgtctttgaaagctacagagaggtccaccttacaaggtcattgtgcagtgatctgatggcattcttccctcccctccccacaggaagtggtcctgtactgcttagagaacaagatttgtgatgtaaatcatcgggacaacgcaggttactgcgccctgcatgaagcttgtgctaggggctggctcaacattgtgcgacacctccttgaatatggcgctgatgtcaactgtagtgcccaggatggaaccaggtcagtgatgtgtcttgttctcagcctggctctgctgagaccaagcttccctatctgtgcggtggtggttctcagtgtatacgggaaattccaggaggaaagacagagggtgactgtaagcacactgaccactgggttctctggaattgaatccagcagacctttctggcaaatgtagatgtaaagctcccaattttgatcagtcctataatgttcctgtgaaccaaagcttctgaaaatgttgaggcctgcatgaataattgggggtgttgccttttaagaccctggactcttcatcaccatctatgaagtcactgtatttaaaatatatttgagctgaaagtcccaggagtacacacagagtgccagctgcccctccgctggttcagcaggacctgccattgccacccacatccccagccgtggccctcaccctgtccttgaccctggtttattggtcagagacccaggtctgagtcagcctgaacatcttcctggttgtgtgagtgggatgctgccatgaggctgggcactgggggtttcctgacagtgacagaaatagccaaacggaaatgtatttggtgtttcacactttgcaaatagcattccctcagattgggcagagacccatcttctccctgccaaccccaacccccagctccatggacacaggtaggaggcctctgtatcctgctgagaacacaccccaccaggcctgtttcttctccccaccgttcccttggcttctgggccagaggttaatcactgatctgtgtgaggtcctgggatcaggctttcaggagagtctctgctaatctctttgcatctagtttcttttaaaaacagaggtggcttttttttttttttttttttaatgtgtgacagttgcttgttgtattggcttccatgatgatgggacctcttttatcccctgtaagttaccttcatatggtccatgactacttaaatttgttgaaaatgttttcattttgggcttgacttccttcttaggccttggattaagatagggtttgcagctgggcagtggctctcttgcctgtaatcccagcacttttggaggccgaggcaggaggatcacttgagcctaggagttcaagatcagcctggaaaacatagtaagaccccgtccctacaaaaagaaaaaattagccaggtgtggtggcatgcgcctatagtcccagctatgaggaggctgaggcagaaggatcacttgagcccaggagatcgaggctgcagtgagccatgatccgccccactgcactccagcctggacagtggagtgagaccctgtccacccccacccccacccccgcaaaaaaaggatagatttgggtttgagatttaggcctgaaatagtctcttcatctgccctgtaaagggttagtcatcaaaataacagtgattcattgcttgacgttgagccactcactgtagctcagtttccctatctgtgcagtggcggtgactgtgcacacctcctggatgaaatactgtgcttaggaggctcagtacccaaggtgcacatgtgcccagctttgcctgttgcttttaaaggagacaactgctttataagcaagtgtggcttgcatgagcataattctattgcgcctctcttcctaggcctctgcacgatgctgttgagaacgatcacttggaaattgtccgactacttctctcttatggtgctgaccccaccttggctacgtactcaggtagaaccatcatgaaaatgacccacagtgaacttatggaaaagttcttaacaggtatgacaaagttcaagaaatggtcttattcaaaaattagatgataactcgatacaatagatgattggaatttgactaggcagaaatcacaaaggctgaaactgtaaagcttttaggagagcagccgagtgtttgaacttttgtgtggtttgactttgttctagtgaagctaagtcatctattcaccctaatgttttaaaagatttcctaaagttattcccattttccacacatgcattcttaacttaggtatggctcataggtttacatcttgagtctgggaaaaatgactcaaaccttccatacatgaaattatttggacaggtttatggtgttaggtcatcagataacccattacttaagccctgggcattacaaagtgcctaaagcagaagcacaaggttttcatgagtgtcaggcacctgcagttaaagtccttatcaggcacttcctgccaaagaatgccactaactcactggtgacctgcccttgtttaccttaaattacactcacttgttggaagaagcagcttagttaggctatcaaagaagagatacataagtaggccggacacagttggctcacgcctgtaatcccagcactttgggaggccgaggcaggtggatcaccaaaggtcaggagttcaagaccaacctggccaacatggtaaaaccctgtgtctactaaaaatacaaaaattagctgggcatggtggtgggcgcctctagtcccagcttgggaggctgaggcaggagaatcccttgaacccgggaggtggaggggtggaggctgcagtgagccgagattgtgccactgcactccagcctgggcaacagagcaagactctgtcaaaaaaaaaaaaaaaaaagagatacataagtgtaatgctactttattttgctgagaaagaggaagacaggaaatgaccttccagcctgtcatgaatgtataggaaaaaatgccacgtggctctgccatcattttgttctcagcagtagattttatcttgtttttttatttttctctccctccagattatttaaatgacctccagggtcgcaatgatgatgacgccagtggcacttgggacttctatggcagctctgtttgtggtaagctgcattgtttgctctagttccgtaggaggtgaacaagttcaagtccatttctgtctggtatgggtgagggaaagtggatggtgggcactggaagcaggactcacttgggaaagaatcttgttatttaaactccttgttgttgttgacaactgtggacatcttgctgtagtttactgattccttcctctcttatttgccctccattagaaccagatgatgaaagtggctatgatgttttagccaaccccccaggaccagaagaccaggatgatgatgacgatgcctatagcgatgtgtttgaatttgaattttcagagacccccctcttaccgtgttataacatccaagtatctgtggctcaggggtgagcatggctgtcatgtgattgaaaactagctgagctgctcttgaggtgacaggagttagaaatgcgctttgagcagatgagggtgggtgggtgagtgacctccttaactgtccacgaacctcacacaatgcagtagatattttccagaaagggtacacatcagcttccttacacccagtgtggtggggggtggggcacagcatggtataaacctgccctcatcactaacaccaaggcttaagtcactccccagagaagtgggtgactggaactttatggaagggtcagcaccttggatacttaaatccttaaacactttgagaaggtgtcctccctaggactgcctgcaacagaccactgtaggatgttttgagatgtacggactacactgataaaccaccttgtgtaaggttaggacaatcattgtacatgacacttaggatattggtgtgtcatcagatttagttaatcccctctgccccctatggttgagcccctattcgccagtgaccaatcatcttgggtgtacttgtcaagagactgctctgctgtgtgttgacagagctgcttgatgagtaacatcctcctcagccctgaagctataaacatatatgccattacaaacagtgatggaaatcataaagtatggtaggttgtatgcaaggaatgtaacaccttccttctcaaaagtgtcactcccaaaagaatggaaggatgggagtggacatgcctgaatggagagacagccttgtgtgtttataatgctgttagtgagggtctgaggagagaagagatcaaagaaatggggatacagacttactctcccagtgactgttgatagcagggcacttggataggcttgaccctagttgtggtcacagctgaatgagcaggactttacccccagaaaggggagaaatggggcttattcagatggtcctccctagatggacagatgagtccagagttcctactgctagaagtagttactctgcctcaccttagaaaggaatggcgatggccgggcacggtggctcacatccgtaatcccagcactttgggaggccaaggcgggcggatcacgaggtcaggagattgagaccatcctggttaacatggtgaaaccccatctctactaaaaatactaaaaagtagccgggcatggtggcgggcccctgtagtcccagctactcgggaggctgaggcgggagaatggcgtgaacctgggaggtggaacttgcagtgagctgagatcgcgccactgcactccagcctgggcgacagagcgagattccgtctccaaaaaaaaaaaaaaaaaaaaaaaaaatggtgatcagagagtaggtatggtgagaaatgaggggtgggagcagaatgaaaggacatagaggctggtccacttgggttggtagttaatattaatagttgggcgcacttttcattttactggaaactcaaagcattttcctttctgttttgtaggccacgaaactggctactgctttcggatgtccttaagaaattgaaaatgtcctcccgcatatttcgctgcaattttccaaacgtggaaattgtcaccattgcagaggcagaattttatcggcaggtttctgcaagtctcttgttctcttgctccaaagacctggaagccttcaaccctgaaagtaaggagctgttagatctggtggaattcacgaacgaaattcagactctgctgggctcctctgtagagtggctccaccccagtgatctggcctcagacaactactggtgagcaagctggacccaccatgtacagtgtgttatagtgttaatccttgtgcatatgtgtcataatacaactatttctgtaaagaaaggacactattacatatgaaaatatctcttctttatataagagaaattactccagtcagaaggacttagaaacatgtttttttccttttaaacttttaagtcagtttttatgaagttgttataatgtttctttacttttcaatgcacacatgctttgggatacgtttgtttttacttggaacatttgtttcttttcttttttaaggagaaaaaaaaatgagtaaaaggagctccacactttgacttaatttcatacaaagctctgatgacaggccatgactgtagagtggtcagaactgtgtggttggtttgagggagcgaattcggggaaggcacttggtgatataactttgttttgtttacagagtacctgctcgggccaggtaaatgctattggatgtaatccagtagtgtgtaatataaattcaaaccatatccacacacaacaactaattgtatgaaacttttatatcctaatttaaaagctgtgaaattagttttcacgcatcaaaccggattgtttatatgtttaaacattttatgctcttatttaaagaagactttgagctatttttttctgtaccctgtaaaatattgaaaactaacataatatgttgaggttgcttggaaatgtacataaaactaaaattttctgaatcgtgtgtttatgtttgaaatctgtgttttaactttgtaagtaaattctctgcctttgtatttatattttacaaaaattttcttaaaaggcaataaaactgttgaggaaaggagaaaattgaa

SEQ ID NO: 2 - DNA, 26851 bp, Homo sapiens
atgggaagatgtgcctacttcccctttgccttccaccgtgactgtacatttcctgaggactccctagccatgctttctgtacagcctgctgaactgtgagtcaattaaatctctttgtttcataagtacccagtctcaggtagttctttatagcaatgtgagaacagactaataccaagaccttatctccaaacacaactatattctgaggtactggaggttaggacttcaacatatgaattttgggaggacataactcagcccatgatgagatctaattgtttatttgacaagcacctgctgagtacttgatatgagctaggcagttagcctagctggtcagggcacagtcaaaactatactgattatgttaatgagccagttggcataaccctccccaaggacagacaagagagtatagcagaagtggggtgatgcttccatcattcttgctgaagcagccccaagcacttgtggtaggtgcaccagaagatcatcttcaggaagaagaaagacatgctcaggttgggagactgctgttagacacagtgggcaaacccaggactatggtgtccagagatgaaggcttcctctctgagccactgtagggggcacactccactggtgttggactctgaatagacttggggaatatgggcttaaaggtcttaaagtgaaagggccatatgaatactttgaagatgctaagtgatgacatgattcagtgcttggaatggctcagccatggccatatgagtagcagcttttgatcaagtgtcatgggaaggtgaatgcgggcagggggaccaatgcctgacagttgagggtaaaagacaggacagcccagacattcagtggtggataagagcaatacctaactccaaagcagaagcacatgaacacattgaaagaacactggacacagtcatgggctttatttttatatgccttaaacctttcatatttattatgtgatcttatcctcccaacaaacttgttgagtaagtagggcaggtattattaatcctataagttaaatgaggcaataaggcccaagtcagtcaaatgagtggctaagaccacacactacattaaatcaaaagctgtttcctgactcccattcctgagttcactcacctttcagcactgagactggttgtgggatttgtcagtagtgattttttaaaaagctcatgcagttctttttggctttgtgacagaagatgttttggctgggtctgagccttgcccagctgcttgtcatatgtcaagagtcataatgcaggagtgaaccaaaggcaccccttgtccttgaatatgctgagtggtcatgaactagaatggtttttgaagggagacttatggttgagtcacggcaaggcaaaaggaagccttcttccctccctcccttcctttcttgtctagagcttaaaggcaatgtcaagcagcctactgtccattctatttcccctgggccacccccttggccttccttggctcctagactcaaagtctctcccaagcaaaagatgcaccagcatttccaatctaactccaaagtcctgaggctacttcctctgggaagcccttcttgagcccccagacctgaggcagggatctatcccttctactccacaaaccctagcactgtcatagcaccagaagctttgactagcaattgcccattggcctttctgggttccctatgagattgcgcttctcatggacagaggctagtccttttggactacaaatttattcccagggtgactacagtgacccaggatactcccttgaaggaatggaaagaggaaacagggaggccgaggcgggcggatcacgaggtcaggagatcgagaccatcctggctaacacggtgaaaccccgtctctactaaaaatacaaaaaattagccgggcgtggtagcgggcgcctgtagtcccagctactcgggaggctgaggcaggagaatggcgtgaacccgggaggcggagcttgcagtgagccgagatcgcgccgctgcactccagcctgggcgacagagcgagactccgtctcaaaaaaaaaaaaaaaaaaagaggaaacaaaagagtgaggttttacaagagcttcactcctgcctcccccaaattccacttcagctgtaggttgtcagaagaaagaagtaaggaagtgttgatcattctttgctgaagctggtctatggtggttccattatggccacaattcccaagaaacttggacagaaatggtgggtggagagaggaaaataagggccaccacaaagatcactttcttggaaggaaacgcgggttgaaaccagagggatcctttctctgaccttggaggataaatggggaaatggaattccagtggaatggtggtaacagctattgatcatgacagagactaaaagggttgggtcatgtctgccatggctcatcttggcagttgcactcagatatggcttgcactattcagaatctgagtttggactctgaaccattataaaaagactggataaactaaatataaacatgcagaatgcaaattctaagaaataaaaaaaaatgtgatgatctttattaaaaccccaaggcaaatagtatttaaagaggacactgatatacataggactgctgtcacttcctcactctaaaatagagcctgttccagcccatctcacacatgactattatgtagaacaagctgtaaaatatgaccgtaaagcactttgcagacataaaatgctacatgacaaatccttactactacttcccatcacttaatgtctgaaaataaatgtctaccaattacaataattttatgtgacttcgatggctgctggctcttaccaaacatggaagtagaaactgggctatctgtggaaggcacagagtgccttgtacgtaaaactgccttgctataatacatttgtttgagtccttcatattgaaaaaaaattgtttgcctgtctggaagattctgaaggtagataaaatgttttacttgccatttcgctcccagaccgtatcacacgtaggtaattattataatatgttcattgaatgaattaaagattgcatgaattaatgatccaagataaactaagggtacaagcttctaggtagaatgggagccatcaaatactttccctaacccggacacacacattgctttatgactggagtaggatcattggcattgtcagggaactggtccaagttatttctatatcatgcatttcctcagaggttaggactgtcaggtttaaatcttttcccataaaaactgtttttattttgcattcatgattcagttagccattttcttggaaagtgttagcactatttcattgtccacattaggattgtcttcacttcgttccccacccccaaacaaaaacaaaaaacactgcagttcatactctggacatcaaactcctcactctaaagagtaggggctggtccaaatgcttcctttcaacttaagactccatgattttgtgaggacacctcagtctagtgcctgccagtggaatagaatcattttaacaagaaaacaggttagggaaggagctgctgggcagcttcagccatttaataccatgcttgacaatacaattcaccttgtactccttcctgaatcacagcctccaatatgctgcgtgcccccgacagctggggcaccatttgctgagttgaggcaagatacgcattttgcaaccactctatctcacccacgcaggaaaccattcaccttctggctgacctagcaaccaaatcataagctcaacagagaagctgggggtgatgtggaagcttaaagggggaaagaataagattgctttatgcagggttattgtccagatttatttatggcccctaagttagaccccctccacatgctgttggctgagaacaagagggctgctatttagcagtaggatgatttttttaaaaaatataaaatccttgaaatgattacatattcccaaaattcaacttgtaactgttttacaaaaccagaagactgttccacaatgcctgtatgtgtggtcattaactacagtggtctggggcatggagcaggatgtggacacaccacacactcctactgagattacagtcaggagctaggcattgctcttcattttgagtttaaaataaaaaagaagacaagactgacaaatgaaatattaatatggagcacccgccaacaggttcataaaaattaagtactccttttgcctcttgcctcctctgcatagtttctctttttggaatcgaaccagctctccttgtcattatccaatcgatatggccaatggcaatcctgggcacttggaaatgacatttatgtgctctccagcagctgccatccatctctcgcttttcctgggagagcacagtccctgagatgaccgagactcagggcgtttatctccactttgatactatttctacttcatcctgtgcctctgttgacaaaacagtcaagtagacagagtcctacttgatccagcctcatgagaaaaagacttcattctgcttcaaatgtcttcaggacacatgtgtcaactatctgaggtccttggaagagaatctaaattcaggcatgggatatatcatggtgatcaagttaatctgcctaatttctcttctccacatgtcagcagatagtaacaggatataagtaaggaagacacttgaaggtttttaagaggacagcatgtgtttcagacatgatctctcagctgtggcaggggagaggtgttaggtggaggataaaggacaaggcttgggaaggtacagatggagatagagggtcctgaaacacacaatgtgaagccgggctgttccattgccctttttaccccttccccgctggggcacagcttcacaggacagggcttcccatttcctgctacagtgcaattctgacaccaactaccagagttggtgcagactttcctggttggaagcacagacccccaaaaaactccccaccctttagaccccagccacaagccctggggtttccaggccacccacacatgattgaaatacaagccacattattgatctcatctgcagccttccccactcccccaacccctctaagcatatgattggcgtttctggcctggatagtccctatgctgaaactgtcaagggcatagtcacctcacctcaccagcatgaactcaggcctggccttaggggcccagcatgagtaccaaagacactcctatcgctcagaacactccaagggtttagaaattcccacccaggagcctagtcaaagaccagccacattctttgttgtagaacgtctgcctttctcctctggaactgagacttaaaaacagaggccaagtcacattttgttttacaaacttgctttaccatgggatttcttttagctcaaactccccaaagcatttaaaatctaataataacttcactgcattcgtgtgcttgccgagagaccgttctgcacatggagagcacggttccagtcccggcttatggtttcttggcagggggacattgtgtgggctgccttagggtgtgtggccctgggaaaatatttttacagggtctcatctctatacagaaatttgagttaccttaaaatcttggtgtcagcaccattctagtgcctcacacaatctcatgaaaggatactctgccgaccggcaggcataatctcttgatgggacaccctcttgggtctgggcccaactgaggaccctgggacaaccccataggtgcaggtctttaagctccttgggtagctggtcaccccagggaaatggggtaaattgagtattggagacacatgaaggccaaggcccctaggggtcccactgccctttagggatgggagggcctaaggcatggagcagagcagccccacccccacaagtcccttgagtttgccaggttctcaggatgtttctggatgttggacgaatgccttaatctctgtgtgtctctttcctcatctgtagaatggaggttataatagcaatgactccttagggttaatggaaagatagaaccgaagtagagcctggcataaaataagtgcttttttaaggtattaattccgtttcatggtttttttttttttttttttttttttttttttttttttttaagtcttgctctgtcaccaggctggagtgcagtggcacgatctcggctcactgcaacctccgcctcccgggttcagtgattcctctgcctcagcctcccgagtagctgggactacaggtgcacgccaccatgttttatggggttttataaaaaattaaatgttaacctttaatccacccaactctttaaataacttcctatttgaattcacatttcactgatgaggaaattgggatttttagaaaattaaagtaatttgtccaaggtcacatatatatctggtaagtgtctgagtcagagtttgagcccagttaagtctgactctactgcctgattattttactatatgctccactatccctcaattgctcgaaactcaaatttatgttatctttaaaaaaaccatggctaatgcatacaaaggcacgtttgtgtggcctgatatcagcatgggggcattctttctggggtgcaagctgcagataactttggctgctagaggaccttctagaagcaggagctgcatggcagagtggagcctataatgcaagcttgccagcttattagcaagcatgtaaacaccaagaaagtgacactacaattatttctcaacccagcaccaagtgccacaacctgtcttcctttagggactaacagaactttattcaaccttccctgtaggctccaccaagcactggaggttcctctgttcctgcaatcccttgggggatatttgaacattatattcttcagccttggctttgggagggtggaatttacaaaggagctcccagccaagcttaggtatggggaggaatcacttagcagcctgcctatgaacagagttgaaaagggaatagataattccaggagcagcctgaaggcagtttcagcagaagaagggcacattaagatatagaagagaacaacaattagaagttagaggaatccacaaaagtgaaagaagtcattgaagttgggaagaacccattaggcttgggcccttgggcacagctaagaatatctgtgccaggtacaaattccaagcctcatacttagagatttggagcagaaaagctaagaggaaacgcagggaaaagaagtcactcctacagcaagcagaagcgagttacccaaccagggaacctccctgttagaactattccagttataccaatgtcaaggacatcaccagtgagttcagatatttagtagccaaggaaatatgcctctagaaaactgaggttctagatcagtgaagctggaagcacctcagttatgattctgacataggtaggaagggatgacaaagacatatttttgtgactttgtgggtctgtgcagagcaaaacagtttcaaatgattccacaaagcaaaatgattcgtcttctgaaaactgaatgtgagaaaaaccaccaaaatccacctattcaaactttcaggtgattgagtcacgtcaggataagtataagttggcatttttatatttgattcagaggtggtcataaagaccttttcaaagaggtaggaaatgaggccagtgagagcaactgtgaatgggaaatgtcaggacaccagagatagtgcaaatgaaacagaattgagccaagagctgcagcaggtaatttcaaaaggctaaggtcatccaatctccctccgtgggggtgtgagcttttcagcaaccagagagtttgcagctaacacttcctggggaattagtcaaggtcatatgggctgactggaggtaaaaaggaggctgatcactaaatctccttgctgatgaggagctggatctgagaatgcaatctagccatgagttctggaaggtttccatgactctctccactcaaaatcgggtgctggctatggtgtcactgacatttgtcttcatggttctttgccctttctctttcagctcctaacaggacccacttctacccccaaacactggcctctctcgccatgcaaggcctccattcatggagttgactgagaaggcaaataatttatgctcaaggtttggtcatttaaagcattgctttcctatccccagaactatctttgttgctgctgttgtttttgttaataatagtaattagatacaaaagacaatgaatgtatcaggaggggatgtaaaggagccttccctcttccttcaacccccactgcattctagtgctaatcactctgggtttaaagccaggaagctcaacttctagcctctgccacttaggacactgtgtgatcttcaacaagtcatgacacctctcgggaggcttatttttctcatctagaatgaggaggaaaggatgatttctaataatctgcttcaaaaatcttctaaattctatgagctccgtgtgagtgaaagccaagcctgttagcatgtcttggatctaactccacagaacaccgcagggggtgtgcagtgcctttgccaatgtctattatgtctacaacacattctccctgagagtgagacaggaaagccaatggaaaacgttacagagcccaccacactggcctggattgcatgagactgtggccagaagcgaggatttcagacatcatggtcattgatgtgagcaaacttttgccttctctactaattgagatgaaggcaacaggaaaagaatggccatgcaccctgggaggcagcccagctccacatgggcccagtggaatatttgctggcctatttggaagttagagagaaaagattatgaaagtaaatactatttaaaaatttttctttttttttttttgagacggagtcttgttctgtcacccaggctggaatacagtggcatgatctctgctcacggcaagctccgcctcctgggttcacgccattctcctacctcagccttccgagtagctgggactacaggcgcccgccaccacgcccagctaattttttgtatttttaatagagatggggtttcaccgtgttagctaagatggtctcgatctcctgaccttgtgatctgcccacctcggcctcccaaagtgctgggattacaggcatgaactaccgtgcccagcctaaaaatttttctttcatacaaagcctagttctctccccagcacttattttttattattattattttttaacagctctagtgaccacagattccataccaggagtcattttgctcaagaagtacttttcctggtctatgttaggcttttcataacagtcgatgatgaaaagtcttgacagctgctgtttgcattgtaggtggggacaggtgagttgacatggaattgtttgtgcttcttttgtgcaaacattgaataacagttaccttcagttgaactttaccaggtcaagaaattccactttaataaaacctaactcaggcttcctattaaaacagaggtgaagaaccaggggcgccttgagctaaggaggagagaggcctaaagttggttttactggcacccaagaaaccatcattctttgtttcttgagctcaaagcacttgtttttgcctacgaattaattattaggaggtgatttgaacccgtggtcatgcctactaggtataaggcttctgatagaagacagattcagtaatcactgcctggcatttccagttgaaaagggtccaccccaaaattagttatgggatgcctctcaaggcttccatgagagatccaggcagcatctccgaggagagtgttcaatctaatctcaggacaggggaatggccttattttgtgatattgtgctttgtccccatgacgggtcatccctttttctctgctgatttctttctgctctaggtgaaatcctccagtacgtggccctggcccttccgggaggaccttcctgtttggcatgcacagccaatgagctgtgaagcacttgcagagctcaaaatagaaagtctgcaagcacactgctccccagggcctagtctgtgcctgcttgctcagatgctaggggagtggggctaggagggccggcttctctgagaaggccaggcacctttcaggggtgggcctcagtgcagagggaatatgattgctaagtcaccaccctcatagttttagaaatcatttcagatctctgccaattgcaacattataactaagccctggattccctccccaacctaatatcaagaaaaagttgattgctttctaagattaaaccagctaaacacacaaattttaggatttctgagggtatgaaaggtacttggctattatcaacatcagagagagctattaagaggaaagaaggggaagagctttgaacaaacaaaagcctttctcctgctctgctaatccaccttgagatatgatgactcatgtcgagttgccttggtaaccatgacgtcagaagagggagtgtgtgtgtatgtgtgtgttggtggggaatcctttcacacgtccatcctgtgcctcatcctgtgagtgccatgagctgaccctgcatgcacagacatcgcccttttgcacctggaatcattttgctattgcagggtctgaccacgggctgcttgtcattgatcattttcttggggtgagcagttttgatggacagggtgtctgtcagtggcccaagggcacccagagtatgatcagagactctgctagcctccttctccatcccctccccagctttcctgctggggtctgtggtttgtcttcatcaaacgaagacctgcagccccagggtggttttagtttttgggaagtctggtctgtcctcccaggctgtaagtctggccctgtataatgacaaccaggtgggcacattgaatcagaattagaaaaggcatcaccagctggggaagggggtgtagactgtgtgggtccctagcttgccttttttatctctaagtccaaagagaaactcctctaatccctggtttgctctggaatgccagctgcagagaaacagccacaacagtcacttgtaaagagaggccctttctttgaagcagaatttgcagccatggctaaacattcaggtgaaatcatattacagcaaatcctttcaggccgaagtggctcagcagagctattctatatcctgggaagacttcgggattcagcgaatcctctgcgatgaatgatcctgtgcagtgactattttatgtggttctagtccagtaactgttacccatactgtgaaaagctctgtaaaatgagatctgtctgagaataacttgtatccaagaagcagtggtgttattaagaggcaacatgggggccgggcgcggtggctcatgcctgtaatctcagcactttggaaggccgaggcaggcagatcacaaggtcaggagatccagaccatactggctaacatggtgaaaccccgtctctactaaaagtacacaaaattagccgggcgtggtggcgggtgcctatagtcccagctacgcaggaggctgaggcaggagaatggtgtgaaccaaggcagctgagcttgcagtgagctgagattgcgccactgcactccagcctgggcgacagagtgagactccgtctcaaaaaaaaaaaaaaaaaaaaagcaacatggagcagttaaaaaattgaccagttacaagtaatgtgaccttagacaagtctctttaattctgtgacctcagtttatttatttttaataagtttatttatttttaatgatgaggctagtagcacttttcagggtcttggtgagaattcagggagagagtgtgggaaagtgcttcgtggtctgggatggaacattccaacagaggctattaccattgcttcagatgagacttgaatcccagccaatacaagtacatcaaaatgctggacgttgacattgtcttgtcatgagaattgtaatgtcttccattattccatgaatgctatcagtagaaaatttggaatttttttctagctttattgaggtataactgacaaataaaaatagtatgtgtctaacatgtatactgtaatgattatatatatatatatgtatagaattcttaccataatcaagttaattagcattaatctcacagttaccctttaatttttttttttgcagtgagaacacttaagatctactctcttagcaaatttcaagcatacaatgcattgttattaactatagtcatcatactgtacattagatttccagaacatattcatcttataactgaaagtttgtacctgttgatcaacatctcctcatttctcccacttaaaatttgtaattttattttatttatttagtttttttgagatggactctcgctctgttgcccaggttggagtgcagtggcgtgatctcagctcactgcaatctctgcctccctggttcaagcaattcccctgcctcggcctcccaagtagctgggagtacaggcatgtaccaccatgcccggctaatttttgtattgttttagtagagatggggtttcaccatattggtcaggctggcctcaaactcctgacctcaggtgagccacctgcctcggcctctcaaagtactgggtgtgagccaccgtgcctggcccaaaatgtggaattttaaataagaatctcacacattatacttaaggtatgtgctttctagatcccttgctgtcgtgcaaccaggagcatgaagtcataaatggggtggggttggggagggagagggagggaggcactccctgacacttcctgcaagctgttgttactaaggcagcagagtagaaagatgaagtgcaaggacctggaaatcagacacacctgggttcctggtgagcttcactgcttcctggtctctgatatcaggcaagtcacttaacctcttcaatcttcagttttgtcttttataaatgagccataataatgatttatgagtttcttgtgacatttaaataaaccaatgtatgtaaatgcttaatccactgactggtacacagtaagtgctcaaaaatgttggttattaataattcccataatcaattgatgtttcctcatcattgaatgtttcttttaaatatggaacttagaaaacatcactcagctctgagttcattttgctgaaggttgaaaatattagaggacacctatatctgtcaccatttccactgatgacttcaaagttgcagtgcttagcgcacatgtcataatgcaaaagcatctagcacagtacccagcatggcacgtggtgagtgttctggaaacttacaagaatgggatgagaacatgtaagcatctgcaatgccaggctcaggaatttggaatgactttgataaccaacatggtgccatcaatggttactgagccatagaggtgcaagatcatatccaggctttaggaagacaactctgagaagaggttgcagaatgagttgagggggaaaatgtctggatgctgggagattatggctgtgctgccagagataagattatggcagtataagaacagagagaatgggatacactgagaagcatggcaagtgtaggacctacaggaggaacttggagctgggggtcagggtagagaaaggagtgatggtgagtggaaggtttctaggtcaggcagggtgaagatgggcagttaaggaaggactgtcggggtggggaggcccctgttcatctgcactgttgggtttgaggaggggctggtgaaggggcatgaatgtagaaatacagtttagagcaaagaagagagggcggggcttgagctaaagtagaggggtcttctacctaaggattactgctgaggccatgggattctctgcccatatccaggttaggagggaggagcaaccccaggggaagagtggtcagagagaccactttctgtgaaaaggggacagtggagtatcacagacatcaaagggatagagcattaagacttgtccaaccagacttgttgcaagagtcaagggaggctccagagtcaaggaggctggatttgtaatgaggatgcccctcagaaccctaagccatcccctttaaagaaatggaaggaatgaaatcatgtcctttgcagcaacatggatgcagctagggccataatcctaagcaaattaatgcaggaacagaaaaccgaacaccacatgttctcacttataagtgggagttaagcattgagtatacatggacataactgtgggaacgatagatgggaccatcagagggtgaagggagagggaagtgggttacaaaactacctcacgggtactgtgctcactaccagggtgacgggatccatactccaaactgcagcatcacacaatattccaaggtaacaaatctgtgcatctacgcactgaatctaaaataaatgttgaaatgtaaaaacaaaacgaacaaaaaacagcaattaatgggttcacaaaaatataagaaaacacaagatagagggggtggcgaatacagtagcacagttttacatgtatgaaatacttaggatatgcatgaatatgatgataaatatggtactttttttaatacacggatgtgcagttaagtagtcggggagggggctgagtccagaagtcagtcagctgcccagatacgaccaagcataccttggctatagataccaactgctttagtttcaagccttgccaagaatgataccctcccttctggaagctgcgtgtaaaggctcatgtttcaggagaggagcaggagtcgggagacttggtgggaaccagctgtgcgacctggggcaggtttccttttcctttcaggtccttatctctaaaatgaagtgattgatccaggttatctccagagtgtctcaatacactcacttcttctccctgtgataggagaaataaacaaaatatagttaatttggtaaaaaagataccaaagacaaaaccccatcaaatctcaattgttttcctctctgctttcccacctacatctaagggaatgtcctctcctgcttcagtgtctggtcttggctaggacatcacgatgctttgcttccaaatctagaagacagaggagaggggaaaagaggaaagataacatgtcacttttcttgcctgccagtgattatatttggagggaaggtgaggagcagacgataaatcttattggatcctcatctcacaataattctgtagaacatatagagcagggacgattttccatattttgtggtcgatagaactgaaaccagagaggttcagtagcctcctgaaactcctgcagataactaattaaacatttactggatacctcctatgcttgacttcagggaaacaaagatgaataaggcactagctgtgtgatctgaagcaaatgacttaacatttctggctttagtgttatcccctataaaaaagaggggactccattctatgatttgctaggtccttatgtttcacatattatggtttggtctctgcatcctcctgttccatcacaggaaaaggctgaagcctttgcctgggctctaactgggtctaggttgtgtgaacctctagatgcagacatcgggggcaagaggtgagtcgctggttgccttccaggcagatgtagttagagagttggctgcagaaaatgatttcgctctgtgtctccaagatcataggcaggtgggagcccagagggaggctatcaggattcacatcagattgttagttgaggggagttattatttttaagccagcaccaacttaagcactgccttgcttgcttgctgtctgggacattctttagtgttttttcagcccgcagctcccatgggcaatacaggtcactcttcagtcagttcccctgatctgtccttgctatttcaatccttatacttgcgaaggatcagtagcaaaggagaaaccagactaaagaaagataaaattatcaatgtcaatatgaacataactatttgtatgcaagttcatgaacacacttcgctgtgagcccacgagaatgttcagcataaccacctgccagggttgtggtggggtgaggagcagggctgactgtctggctctcactttcttttctttttgatatggtttggatctctgtccccaccaaatctcatattgaacaaaatcgccagtgttggaggtggcacctggtgggaggtgatcagaacatgggggtggagttctcatgaatgggttagcaccatcccattgttctcataatggtcagtgactgagttattgtgagatctggttgtttaaaagtgtgtggcaccttcccactctctctcttcctcctgcttcaaccttatgtagtgctggctcttcactgtaagtttcctgaggcctccccagaagcagatgctgccacgcttcctgtacagcctgcagaatcatgagccaattaaacctcatttcttaataaattactcagtctcaggtatttctttatagcaatgtgaaaatggactaatacattttattttattttatttttttattttatttggagacagggtcttgctgtcacccagactggagtacagtggtgtgatcatagctcaatgcagctgggcccaagggatcctcctgcctcagcctcctgagtagctgggactacaggctcatgccaccacacccgtttattttttttgttttggagacaggatcttgctgtgttgcccaggctggtcttgaactcctgcctcagcctcccaaagtgttgggattacaagtgtgagccaccacctctggccaggctctcactttctaggtggcattgtgggtgaagtatcaacctctgtgctttggtttccttgctgtagagtagagataataatagtacctacctgaaagagtagttttgaagacacagtgtcctaattcatgtgaggtgcttagagcagtgcctggcacacagtaaaaacttaaactatgaactgctcatcagttcttattatctataggccgttagttcacaggctcacacaatgtctcttcacagctctttgaggatccacaattctaatcataattcagcctttcttcttagagtagcttcagatcctgacattaatttcctcagacatttaaggaatcacgaggtaatgggttattatctcattttttttcaaagtgaaagcaagtttattaagaaagtaaaggaataaaagaatggctactccatagacagagcagcctattatctcattttatcaatgaaaagatttgaataaaaaattaagtatcagtttgtgcccagtctccttgggcatccataacagatatggtagaagtatatagactcttgcctgtcctggctcatcttactgtcacccctgccagctgtaagggtgcacagtattctcatcatgctggaaggatcctgtcctacccctggaaacatggctggccttttcagccaaagcaccatccccagagactccagtcctggagccctcatgacacccatgtcctgagggacccttaccctcagtccccaagttgaaagtttgctaggttacagctgaccctcaggaggcctagagcaaaggaagggaacatgtccttcctctctgtggccaggaagggtccctgcacatccaatcagccaaagtgctgctgtccttggaaggctagggtgcgagtggcgagaggggtttgttaggacctgtattatttttttcttcaatcaaaataaatgttcattaaaaggaaataagtttagattattcaaataaacaaaaataaaccaaatataacctatatgtcctataatataaaatattcacctataactttacttatttctcataaatacccaaaggagtagagtagcaccaatggaagtatgctatacaaatagatttcagcatttttaaagtagaaatttttagtggcataaaatctggaagaatggatgggctgcctttagaggaaacaaggtcctagtttctggggaggcttcacaacatgcagggtaaccatttcacatggaagcgggttccattttaatggccatccaagaattaaaatgagaattttgcagtaatgaaataggctccttccaaaatagcaccgaacactctctctgcagtgtgttcaatcaaaatagctgtcataattttttttaattgcccaaacacctggttcatgataaaactccttgggaatctttaagatgaaggaagggtctatgttagctgggagtgaatcctgtgtgagcagatcacatcaaaaggtcatgctcaagtatgttgtatgttccaagcacagctctggatgcttagggaaataaagtgtcataagacaggggtccttatcccctgggccatggaccaagactaagccacgcaggaggtgaacggcaggcaagccaggaaagcttgtctgtattttcggctcctccctatcactcgcattactgcttgagctctgcctcctgtcagatcagcagtggcattagattctcataggagcacgaaccctattgtgaattgcgcatgtgagggaactgggttgcatgcttcttatgagaatctaaggcctgatgatctgtcactgtctcccatcacccccagaggggaccagctagtttcaggaaaacaagctcagggttctcattgattctacattatggtgagttgcataattatttcattatgtattacaatgtgataataatagaaatacagtgcacaataaatgtaatgggcttgaatcaccccgaaaccatccccccacccaccagtccatagaaaagttgtcttccatgaaacttgtccctggtgccaaaaaggttggggaccactcatataagacacagccagcaccccaaaggagcttatagctatttgggatatagggaattgagaggtcaaacccattctccttttctctaatatggtaatactgaaaaattacttgcccaggtcgcagggagttagaggaagagctgggaggagaatctggaattgaacatgaggagacagaaaagggagagtcccagggagcacagggggtgctgggagtgaaaactgacactggtggctctggttcatagaaagagatgccctccggatcatttaaggtcaggagtttgaaaccagcctggccaacatggcgaaactccatctctactaaaaatacaaaaattagcctggcttggtagtgggcacctgtagtcccagctattcaggaggctgaggcaggagaatctcttgaacccgggaggcagaggttgcagtgagccaagattatgcaactgcattccactccagcctaggcaacaaagtgagactctttcttaaaaaaaaaaaaaaaaaaaaaaagccgtcttctgcaccctctactacccctggttctagttctaactttgagtggaaaacatctcatgttcactgtctttcctgctggcaccaagaccttggctcttttgggcagtggtagacatgggatttctctctctcctcccacactcccaccctcccttccagaaagctgaggccccaaggagggagggcctctgtctgcagcctgactggtaccccagtccttgccttttctgtgctggagctgcacaaggccatttcgtgtcccatttagcaagtgtggagagctctttgatttggtagatgatagcacaagtcatcctgtctccgatggtgggtgaaataccatctgattcagagcttctttcgtgacttcctccagaaccgactgcctcatttgtgtctccaaaaataaaaatagcaagggttagatcctatgcctctcctattccctggggatgctgtgattgagtgatgactttaccagcaaaatatcgaggctgtcggtctgttcccttttgatcagaatctagaaaaagcaagtggagcaagtgatgttattctctgaacttcgctgcagtcctccccaggggttaagggctcaggaccctgtttggcccagcgttttcagcttgttcatttcatgttgagctttgctttctacaaatcagtgtgtggacaagatcagtcttttagcaaagcagtagttaaggcagtgctatgggggaagtgtcaggggggactacagtgcctggatttcaccatcaaagatcccttccattggttacttctcactaagatcctttcaaaaggtcctttgaaaagaatacaaagctttggaaagagccacacgaatgtaaactaaggtgtggcaaggttatgttactctaggtcagaggtatgggtgtcaggaggctcagggaagccattaggtcctagagacattaggtctgagacaagaagcttccagagtctaggaactcagtggataacagcaaagacatcaaccccaggacaaggcaatgcctgtaaccctgctgttattgcccatttgctccaggacaccatcctccctcaccgaggcttagtattagggttagaatgggtgctcatgatagagtatgtattaagttcctgtccaggctcagtggctcacacctgtaatcctagcactttgggaggccaaggtgggcagatcatttgaggtcaggaatttgagatcagcctggccaacatggtgaaaccctgtctccactgaaaacaaaaaaaaattagctgggcgtggtggtgcatgcctgtaatcctggctacttaggatgctgaggcaggagaatcacttgaacctgggaggtggaggttgtagtgagctgagatcatgccactgcactccagcctgaatgacagagcgagactccatcacaaaaaaaaaagttcctttcttttccattaaaaagaactcatctcatctatgtgtccaactatatatagatcccagatcacatttgaagataaaatatcagggatctcccaggcccctggcaatgtggaaaggaaccagattacatacaggggcagtgtgagtctccttcttaagctcccctcccacccccagagcagcagccacctgtctttggaagaaatggatcatggccggcactccacgcttggacccgtctctgaaagcacagcttggcttccatcattcttatgatcccttttaataacaaacagcagccttccagagcaataagctcagcctcttccattgttcccacagccacagacacaggcatgcctgtgccctctccttggttcttgccatggacaatcctagggacaaaaaaagtagtgtttcatggcaaccttgagatggcatgcacctagaggtaagtctacagacagggtcagtattagatataaattgcagtgagacttgtctatggcaccctccattggcacctttctgccttttacacctttcctgtcctttctctcctgcacttagtgctttgatacacatagtccagggatggcaaatacattccattttcagtgccaactgtgattaatcagtagggatcactgtattgagaaagaaaaaacagcggtatgtgaattctggaatcaattgctaatgtctgccatggagatattatttgcatcttctcattcatccatgacccttagaaggcaagactgtgggttattcaacttcagatctctaattattggtgcccaattatgtattatatttgaacagtatctgtaacaactgtggaatcttttatgtctaatttgcttgttttcagctctgcccaaatttcagctgtcacagaatgagtgatcctcatagtataatggaaatgcatcatctcagtttccccatggcctgaatgtccatacaaaatgagagccagtagagaaaaacagaggacgtgaggagtttttaaaaattgaggaaaagtggaaggaaaagtaaggatgaaggtgaagatgaaggaatatgtcagagatgctagcactggcatcccccaccacacagtaccatgtactgctaaagaactctagaacatacaggtaagtgctatgctgcagcaaacttaaacaaacttgcaagagctgcttgttaaattttcaggaattttgtgagtcagttgacatcatgttcgtagattgaaattagctatgatgacagtatttataccataggaattggcaaaggctaaaacatttactagtaccactttgcatatatgcccccaaactctgcgtgtagataggaatgaaatcattagtaccagtcgatagcatccaaaataggctaagctgtcttcagttttgagtcttggtggggaagtaggactggcactctggctacccttcatgcccagtggggatcagtggttgctgttcttttcagtgttctaggatttgattggccctctcatatgatttggatgtttcgtcccctccaaatcttacattgaaatgtgacatccaatgttggagatggtcttactgggaagtcatggaggtgcatccctcatgaatgacttggtgccttgtcctcatcgtaatgaatgagttctcactctatgagttcactagagagctgttgtttaaaaaaagcccggcacctccctcctctctgtcttgctcctactcttgctatgtgactgctggctcccgctatgccatgattggaagcgtcctgaggccctccccagaagcagatactgacactatgcttcctatacatcctgtagaactgtgagccaaataagcctcttttctgtataattacccagtctgaggtattcctttatagcaacacaaacagagtaacacactctcttatcagaggctcaccttgacatcagagtggaagagtggtggcatgtcaaacatggacgatgggaagggcagctgcacagagggggctcttggtgattatatgatactgtaaattagttatcacgttgcattcctgcaatggcaatttgaagagaaaacaacacaagaactcctaggtcatgtcattgactgaggaatgctttttcactccattaaaatgagccctggaggacaggtccaagcctacacgggcagggtccttttgggaaagctcacctgaggtctctgggaagaaaggagtttctcatagaggctcagagaatttcttaatgtaactatttccttctctgactaacaagggtgtagacggcagtcttcttggggaaaaagaggcttcaggattgcaagatttcagctactgtctctcctcggagcaggattccatcttttccatggctggggcccttgacacatgtcactgtgcactgctcttctcgctggggtaagaaggagtggggagtgctggtggagagggtgggaaggtcctgggaaaatggctgatttggaggccattccttcatcatacaatgctgggggcaatctagagacccctcctttgctagatcgcgaatttggagccatggctgaatgggaccacagaaggactgtcctgcccattgacattgtcattgattcagagcagtaggaatgtgttcggtgaagacaggaccacagggcaaactagagaagcacaatagataaaatgaatgcaagaaggaccagtctcgagagaggggagagaatgatagaaagataacccttgaataacctctgctcacttcctgaagtgttttctgagcttcggtgatattcagcactctctcataatttccgccacctctccttcctttccacgtactttactatttatttaatattgtctttaaaatcgctcacttaaagaaaaacctactcagcctcatgttaaaaatagaactcttaaaatcataggtttgataggtgagttttagtttctctaacacatatgactataaaggcataactgttaaaatggaaaactctttatgcatccacccccaaagtcatggcgggtccccgtgctgcacctggatgggaggaatggtctccgtggacacagacagatgtcacttagaacaaaactgcagaaagcacctgaatttgtctgtctgtaattcatcaatacctccccatctcctgcccaactcacacgtcaatttaacagtagcggccatagttgttgtggcattcattcattgaagctctcatttggcatcagacacattttttttttcccttctgaaaggcctcaagcaggtgaacaagagtgagaggtgcttgctctctgtccaatcaggtgttgagttgtggtggtttgtttcattgtcaagaatggagtcgttgcctgtctaatgtactacaaggtgttccacttaaaaacagagtctctggagggaattattctagaataagctatttccctccatctaaaatgaaggaagaaaaataccaagaagaaatccatattttcatgtcattcttcttcctgtgtctgctctgtcctgtctcctccttttcatgccacttctcttgtctgttcctaattttcttaatccttttctcgctctgtctgttgtctctttatcataacccaaaactaccaatgtaggccgggtgcggtgactcacatctgtaatcccagcattttgggaggccgaggtgggcggataacgaggtcaggagatcgagaccatcatggtcaacatggtgaaaccccgtctctactaaaaatacaaaaattagctggatgtggtagtgcatgcttgtaatcccagctactcgggaggctgaggcaggagaatcgcttgaaccggggagtcggaggttgcagtgagccgagatcgcaccactgcactccagcctggtgacagagcgagactccttctcaaaaaaaaagaaagaaaaaaagaatctaacttatttttgtttataacagggtatattttcttggtagatgcttaagcctgatgtgtactttcttggtggcataaatcacttctggaaggggactgtaagacaggtctcccaaacatgaacggtacccatcagcttttaatggtggtcttggctgtcggcttggattatacttccactagggggcgctcttccctttaaatgtcaaaaactatcttcactggaagtcaatattgcaacaggaacaatggaaacgtttatttcctttcggaaatagctgctactgagcacagctctggaaggagattattaaggatatgcgagttgcaaagaaaatacttggttgtagcagcaaattcacctactattgaagacataatgtcaatgaacagtggtggctgtagttgctgtgggattcctgatgtagtgacttctaggagatcctttcctactccacgtggcagctagcaaatttctctctctaaattcaacctggagtcaagggatccttctcaataatttcacaaacttttgggcctgtaatctttctaggttgaattctaggtttgatttggtgactttaaatcttgtgagatctcagccatttccaagtcctaacccttcactgcacaaataaggaaacaggcacaaagaggtagaacagtgtgtctagaccatacagcacaaaggggcagatcttctgatgccgtgtttcaaattacttcagtccttagatgtctgtgtcttcattacgaatgccttcttccagctttccacagtgtcttttgtcgataagatttatttaaagtcttttcagacttgacagggttcactgtagctctgaccttgtaatattttactatagacattaggttatggtagtttttatatactcggggctactgcagttttttcaaataattcacacgtattgaattctaagtgaatgacgttcattgggccctcaacacatgaaccatcgtgtccaggatataataaaagagaacaaaagagcactgactttctcagcacccacggactgatttttgagttccggccacatcttaaagaacaagttactttggacaaaattacttaatcttctttgggctttcatcttcttttctgaagagagactttctgtgcattcttttgtttactcctcgaaacagccctcagaggtcaatataattctcattgtccccattttacagaaaaggaaactgaggcccagagagggcaagtgaatttcccaagagtgtccagatgatacggagctgagctggaaagtgagcctggatctctctggttctgaaagctttgctcgaaagcacaggatgacacctccattcaatcaataagcactgagacccttccatggactcagcaggtcctgctgtccctgaaggttgacactctcatttcaaaccacagcgagaaccccaaaaggaaacagtgcaaggaaaataatgtgatatttgagaggcagcatggattattggggacagggttcatgtcccttctctcccacacacgtggcatgatgttaagcgggtcacctcacctctccagggttgtttcctcaactgagaaaatgagggggttgagatgaacgccagccctggggtgctcaatgctgcagtctagggtggtgtggactggaatcagaattctttctcctccgctctgggtgctgacacatgatctctggctctcactccccacccctaatcttgcccatctgagtttcaggttattttttccttcctcctgctcttcaatttccttattgaggaagctctttcctgctgcctctgtccccgctggagctgtttgatccagtagagccagtcgaagccaaggggaccctgacttgaatcttgctttctgacatgctggctgtggcttgcttgggacctgaataagagcttgcttactcccggtgttcaccacagcggaaccatgggtgcagaaatgtaattctcaaccagcccagtttaatcagcgaaagacaatagagcttgcaggcggtgtcatgctgagtatctgaacacaccatggctgctgtcgcccttttcattaaaatgattgaaaatgtatttctaaa

SEQ ID NO: 3 - DNA, 37737 bp, Homo sapiens
agcaagagcagaggcttaaggagctacactgggggaaggacaggggcaagcaggccaaggcctggccggggctcggggggagggaatatggagcaatcccggtcacagcagcgtgggggtgaacaaagctggtggggtagtgacccccagtaccagtatatgccctttgaacactgcaccagctacggactgccctctgagaatgggggcctccagcacaggctccggaaggatgcaggcccccgccacaacgtccaccccacacaggtaaagtgctctaaggggagaggggagccatggatgaggggagacagtggtgccagagactggtgaaaatgaggaattgggtgaaaagagggagcagtgttacatttttttaacttaaaaaacaagtacgtggtgatgtgttcaaaatatgaaaatctttgaaagtctgggctcacttaagtatgcacttagagagatatgcatgcactttcatacaacctttaccaacagagtacccaaatcatatggggaaacagcagagcctcacatgcatgaatagctcgtgcttacataacctacgtggagtggattgcgtaggagcccacactgcagtgtgctgggagctgtctcccacaccctcacccacaggtagacactgccagatttctgcctctgggaccctctgcagaatacacacaaacatgaatctttctgcagaaggcagaagaaaggaattgggcaagtgtagaaaacagactgaattgcttatcagtgatcaaagatctaccaacgtcaaaatgagcagagatgtacaagcttttaggtcgcaagatgatcaagtaagaacctattaagtgttaggcacctggaaaagggcagagatgtgatcccagcaacagaagcatgcaggctaattaggagtgtctatggatgagcagcctcccgctgtgggattggtgggatatgaacacctaggaaagggggaatggggatgggcacaactaaaggaaaggttgtgaaattgtcatggaaaaagataggtcatggttaataagtaagtgtgcctctccctccaaagaatgcagagaataacagaggatagaatttgtctagagggcagttggccagaacttttttttttttttttttttttgagatggagtctcgctctgtctcccaggctggagtgcagtggtgctatcttggctcactgcgacctccgcctcccgggttcaagcaattctctttcctcagcctcctgagtagctgggattacaagcacctgccaccatacctggcaaatttttgtactttcagtagagacggggttttgccatgttggccaggctgtctcgaactcctgacctcaggtaattcacccgccttggcctcccaaagtgctggaattacaggtgttaaccactgtgcccagtctggtcagaacttaaaaggcttttttttctttcttttttttttttttaacagggagccttcagttcctttaggtttaaggctgggaagctgaggcatgagctatgcaggggatctcagcactgggggtcaaaaggatctgctctcagtccctgaccaacccccaggagtatttgcaaaggcagcgctagggacccagtagggaagagggacatacaggtcagtgtaggctggaatcgagcattgggaaggtttcttggagacagcggggtctgactaggcctttgaacactgtgtgggatcagcaggagggaagacccctccccctggccctgtgttctcactcgtgtacatggttgtatctgggtgggatggcaacttgagtaacagtgccattatggcacttcctgatgacagttctcgtgttgggaagctatggttagtttggggagtagaattggcctgttttctacaggtctcaaaagtaaacaagagtttggattagtttttctttgtttaatttttattatggaagacttacacaaaaatggaatggtatagtgaagccccaagtacccaccagttgtcaatattttgtcactattgttccatctattcttcccttccccaccctcaccactctacacaccatggaatactttttttttgttttttgttttttgttttttgtttttgagatggagtttcgctcttgttgcccaggctggaatgcaatggcgcgatctcagctcaccgcaatctccgcctccctggttcaagcaattctcctgcctccgcctcccaggtagctgagattacaggcatgcgccaccatgcctggctaatttttgtatttttagtagagacgaggtttctccatgttggtcaggctggtcttgatctcctgacctcaggtaacctgcccatctcaggctcctaaagtgctggggttacaggggtgagccactgagccttgcttccaccttggaatactttttaacaaatcccagacattgtatcacttgtagacttgagttttgacttctcccttgccctcccctcaccctgccctgcatgggaccagccagaacagatctggccctttaagtgttttcccagcccaggtatgatgatatgaagcaacccccttccttgtctccactggcctggggccttgaggagctgagacagcctcagctgtctgacttccactgggaagtatgttctctctctgggtcccacgcagggtttggaaggaaacactgcctccctcggtcactgacccagaagacaaacagccatgagcagggcaattcatgtgcgtgcttgttcaggactgcggtgtaaaatgctgctcatattgtgaaatcagatctcttctactcaggctctcccagaatccagcaacatggcctggcctgaccctggccccagaggacagttagtgtagtgggagtggggcaggctaaaagtggttggagctcttgtataccccacacagacacacgtgctctgcctcaggatggaagcggagggccaccagacctgggggagctgctctgtcctcttcacatgtggggcaggtaggggtctaattatctagctgtgggaagaagtagatggacctgccttttcgggctagttcttgtgtgtgcatacaagcactgggagatgaagtggatggtcttgaagcttgatagaggacctgaggtgcctcaggtaaggctagacacaccaaggcaaagtgcaaccaagactgccctgctagttagcccagtctgtcctcaccctgttcatgttaggagaaaagtcaatgcaagtggtctggggaaattgtgggacatacagaaagcgcagtgacacaaaacacctgattgatatggccacctgggttcagcacagttctgtacctctgcttcaaagcaaaaactggcctccttgataaaggctaccctggatcaaggtgagtacaggttggagaatgggtgtagagaaggtaggatgaatgaacaagggaaagggtgggaagtgtgggaatggagggtggagagtagagggcagggatgaccacaaagtcaccctgcatgcagtcaacacccagaattcaaaaagctgttgttcttttcttctgtgagtctgtctgctggcctctgtctattatttttttagtcttccacaaggcagacactgatcattctctctctgtccagatttatggccatcacaaagaacaattctcagacagggagcaggacatagggatgcccaagaagacaggctccagttctaccgtggacagcaaggatgaggatcactattctaaatgtcaaggtgatggggactgaggaataaagaaatctggagtagaaacaggtacagggattaggagaataacttgggcatcccattgcacgtacgtactccctgccctgctacaaaaactctcctctaattgtttttaagagacagggtctcactctgtcattcagactgaagtgcagtggagtgatcatagctcactgcagcctagaactcctgggctcaagtgatcctcctgcctcagcctctccagtagctgagactataggcacatgccaccatgcccagctaattttaaaactttttttgtaaggatgctgaggctggtcttgaactcctggcatcaagcaatcctcccgccttagcctcccaaattcctgggattagaggcgtgagccaccatgcttggcccctctaagtattaaggaaaaggcacctctcttcacctccttcgcactttgcctattccctgttattcctcccacaactccaagaaatgagttttaggaaggaattcaagtattcatggggaactgggctttggtgccttttgcaggggccggagcagcaatcagcagaggggtaatgagaaactcagtgcataagacatacggaccctgggggcccaaggcttcccctcccatcttgggtatagcacccaaagtaaagtagtgactcgttagctgcttttctctctctctctctctctctctctctctctctgtctctacatatatatatttttgtttgtttgtttgtttgttgtttgtttgtttgttttttccctcatctcttcctagattgtatccaccgcctgggacaggtggtgagaagaaaattaggggaagacgggatctttctggtgcttctgggactgctgatggctctggtcagctggagcatggactacgtcagtgccaaaagccttcagggtaggtttaacctggacctttgcccacagccgtttctggagtttctacctagggtaagcagggtgtgttatcggaagcgaatgttaagcagggtgtgttatgggaagcgaatattgcgcagagagggatcaggtgggactccaggcccagaaaagaccagacccaggcctgctccacttctcacgcccctccactcactgccacccaagcagtggatgcccctctaatagggtggccaacttgccccagttccccagggactttcccagtttcagcactgaacatcccgaatcccaggaagccccttggttctgggcacaccgggtggttggtcacacccaggcctccagaccctgtactccagtgggattcgtgacacagccaccaactggaacaggccatgtcgcctccataactcaggcttcccatgtgtcaaatgagagcagcaccatctcagaaggggcacacagaaggagcacggcctgagaacatgccgggtacacgtcctggtgccgtggacacggctgctcagccatgttctgcctaaccccaggcatgtgtctccgcagcctacaagtggtcctacgcgcagatgcagcccagccttcctctgcagttcctggtctgggtcaccttcccactagtcctcatcctcttcagcgccctcttctgccacctcatctctccccaggctgttggtgagaacttgccaccagactcggcctgagctgggtggcctgagaggggccctgtctgtctcccccatcatccagccccacccacagccctgtgctgccttgccccatcctccccaccactgcctcttcagccctctccaattcccattcccatattctggacattcatctcccttttcaccttcaccttgaccctgcacataatctttcaacgcttttaggctctggaatccccgaaatgaagacaatacttcgtggggttgtcctgaaggaatacctcacaatgaaagcctttgtggccaaggttgtcgccctgactgcgggcctgggcagtggcatccccgtggggaaagaggtaggcctggcatgactgaagccagagctgggaggggccctcaggagccagggtggcaccaactctagagggagctctgggagtggaagtggatcaggggacaggaccaaggccagggccaggggacactaggaaggggaaatgctttggaagttcctccaactgaggtccaatgacaaaaaccacacagcttggggagcttggagcaggctcttagcctggacacccctgacatttggggctggaaaactctgtgctgtggggaggctgttctgtgcagtggaggggacttagcagcattgctggcctctgacccttcctagatgcccagctgcatcgcccagttgtgacaccagcatgtcctcagacattgccatatggaccctggaggacaaaatctcccctggttgagaacactgtcttagagatcatccagaccaattctcttgcttgaatctgagaaaactaggactgagaaagaggctgtgctattttcaaggttgctcggtgggttgcagcctccttccgttctctgctggtgttcatctttgccccctactgccatattccacccagcagccagaggcatcttttaaaaatgggatcagtctcatctgacccctggtcaaaaacttcttaaggctttccatgcctcttaaaacaaaattgaaagttttgttgttgttgttgttgagacagtgtctagctcgcttgcccaagctggagtgcagtggtgcgatcttggctcactgcaacctccacctcccaggttcaagcgattctcccacctcagcttcccgagtagctgggactgcaggcacacgccaccacatctggtaatttttgtatttttagtggagatagggtttcaccatattggtcaggctggtctcaaactcctgacctcgggtgatcacctgccttggccttgcaaagtgctgggattacaggcgtgcgccaccgcgcccggccttatcagaacttcttgcgtggccttcgagaccgtggactctggttcctcctctctgcaggcctgtgcccctgctttcctgtgtttggctcacaagtttcctttctgtccctcagtcactctgccctgggcccctcagggcgcctgtgtgctgttttctcagcctggaacattcttcctcctgacatctgcgcggctccctccctcccatcattcaaagctctactttaggcaggctcctcaggccctttcctctaaacacgtgccctcccaccctcctccaccctggctctctggagaggagaaacacactggtttctcctcttcttcctctctgggatgaggcctcgtgagggcaggacctctgtgtaactcccgtatttccagcccctggcacagtgcctggagtaaggaatattattagtccagtgagtgctgcagagcctccatctggcctctgacccccgccccctcgctccccctctcccagggccccttcgtccacattgccagcatctgtgctgctgtcctcagcaaattcatgtctgtgttctgcggggtatatgaggtaaggttgagacagtgaaatgagctggggccaggtggtagaaggagtccggctgtgtgtccagggtgttgggagggctgcctctgctctgggctggctgtggtgctgaagcagcatcgcactaatccacgctcccttcctcgtctccctgtctgcctaccctggccacgtgatgcctctgtttagcctgtgcctgtcctccaaatgtccacccctctttcacctgtggccccacatggaggtctggtctgtcgtctgctcccatgctctccctgctagtccataccaccccctctgtgttagtttccctccacgtttccctcgtgtgctcccccatccctttgtagctcccaatccctcaccctacctcttacatacgtcccgcctgccccacccctccacccccttgtcccgcgtgcttctctgttgcagaccgtgcctgggcagcttgacctcctggtgtcggcctgtgcagtgggcgtgggatgctgctttgcagcccctgtcggaggcaagttgcacttcctccctatcccggttgcctaagcaagacttagaagggggttttgggtggctgccacaagctttggagtgggcatccagggaatgactgtggatcacagcccctgcggtccagatacctatattttttcagcaaagggctgtgtattattttgagactgcttgctgtttggtgcaggatttattagtactgctttctggagttcttgctgtctcttttctgcttatcatttattgatttacgtgcctggcatatatttgcctaacttttatttcattttctaccttctatttcattttgacactgtgctatgaggttaattcctttttgccaaactcactgagtttctcttggcctgggaatcacaggggacatgggaccacaaggactccttttgacttaggcctctcattctgccttattccccatccctgcttgttctgtcctctgcctgcccacctccctctcttccacctgtttctctgtctgtctctcccctagtagcagccatactactactctgatatcctgacggtgggctgtgctgtgggagtcggctgttgttttgggacaccacttggaggcaagtgattgaccccctcccccatcaatcggcttgcctggcctggctcccaaaacagttttaatcagtatccacaagtgctggtattaccaggttacttacgagaatagctgacttttagtaagcctttgctatgtgccaggcaatgtttaaagcacttacttttattcctggccaaagccatatgagacagatattacagaggaggaagaggagagaactgagttacagagagggacagtgacttgagcaagttcattctgttagtaaggtacaagccaggaattaaaaccaaggcagtctccgtggctcccctacttattttcaaacctgtttgtattgttggatgtttttgccctacaccgatgacatctctaacaggggactctatgaacttcctccttcaagggaaaaatccacattttgttgtgctttattaattgcatgggaattcaggtagaccttatttagattaatggtaagcttttagtgtggaatagttaggagagtttcaaaggataaatgtcccttgatagcaatttaaagttaagtttagctctttctccaagtataaggcaaatagcgatctctcagattattttccttatcatggatgattaacaaatggatgtagtcggagaaagcagtcgtatctgtttattgactcatcaaaatcaattatagctagattagcagggcaggattatatagatcattcactggattcattgatgataaaaaggacaccaagttgatatgtgaagaaacaaaattgcaggaagggcatatgcttcttaaatgacccactgttagaggtttcttttcagttatggaaatgttaagcaatcttttcatagaatcttccagggaactaaaatgacttggtgcaggaatgataagtggagaagagtttaaagttaatgcaaatgcatgatctaacttatgcaaacactgtggcaaagcacacagactaaggaacccaagttagcaagcacatcagctagcatcctgtttacatttctgtcctcagctctactcattaaaatcactaatccttgtcagtggaggatagtgtatttggatttttgcacatgttaaacgttcacacttacatttatacccacttttgcctttatttactcgttagcctttcaaatccaggaggtttaaataatatttttagactgggagacttctgttgttttgttttaatcagccagattctcttaacatgaagagaatttgcattttcctcgtaaaattggaatttctgagaagaatcagaaaagttcttcttggtcctgtgtcaagtatgggagaggtaaagatcacagagaagttacaggcaacagttctgaaaccactgtggtagaaaaaggaagaaaaaattcacagataaaacattgctgttgacacaagaaattgttaagtacttaaaaattaaggtgccatgtttacgctgtttgtattatgtggtaaatgacaaaggtatttgcaggtggcattacttgttttttttgtttgtttgtttgtttgtttgtttagatggagtcttgctctgtcacccaggctggagtgcagtggcaccatcttggctcactgcaacctctgtctcctgggttcaagcaattctcatgcctcagtctcccaagtagctgggattacaggcctgcgccatcacgcctggctaattttttgtatttttagtagagacagggtttaaccatgttggccaggctgctctcaacctcctgacctcaagtgatccgcccaccttggcctattacttgatttttaaaaaagaataccgaataattctgaaaggaaaattagtatcaaaatgaggtattcattatggagtcagctcttaatttcttacactaatgaaataaatggaattcagcattctactgaaatgacaagcatcttgctcccattctgtaccaggccctgtgttggatcttgcacactcagggtgctcctagttgagaggctggacaggcaggcaaacctattgtcatagctcactcgaaaaagtggcccaatggcagctggggtaaagtgcagtggggaccttatgctaacctgcctacaagagcccatgaagcttcacaaaagaggtggtgtttgacatgaggcttgaataataagtaggactggcaaggaggatggtgggcaaggtattctggacagaggaaacagcattgcaaagtcaagatgggggcagtagctgagtattaccaggggatacagaggaaggaataatagcaaatgaggctggacaagtaaaggggggctgaattatgaagactctcatggctatgtataagaatatggaatttattctctagactaggatttgcacgaatgtgtttcatggtttactagatctaatgtgtaaaaatggttctataaaccagttggaaaatgcttggttaaagagagttttttttaaactaaaaaagttatcagtggccaggcacagtggctcatgcccataatcccagcactttgggaggccaaggcaggcggatcatgaggtcaggagttcaagaacagcctggccaatatggtgaaaccccatctctattaagaatacaaaaattagctgggtgtggtggcaggcacttgtagtcccagctacttgggaggctaaggtggaagaatcacttgaacctgggaggtggaggttgtagcaagctgagatcgcgcgtcactgcactccagtccgggcaacagagtgagactccatcttaaaaaaaaaaaaaaagaaaagttaccagaacatttgatatgctgacacacattgggaatatccaaaatgtgtctctaatgcagcatttcccacagaaccctgtctcgtgggcatgggatttgtagtatctcacagacctgacttcgggaaatactgtcggggtgaattaaagtcatgaaatacttgtgcacaaggaagtgatatggccagctttgagtgtccacccaatccctttgtcagatgtgtgcaggacaaaattggtctggggattaacaggattaatccaagattaacaagaagacgattgtcatagtcctgatgctaggtagtaagagactgcactggacagaggcagaagagaaagagaagaatggtagaaagtaaaattgatataacctggtgattaattttatttttttctttttgagagagggccttgctctgtggcccaggctggagtgcagtggcgcaattttggctcactgcaacctctgtctcctgggttcaagcaattctcccacctcagcctcccagcagctgggactacatgcgcacgccactatgcctggctaatttttgtattttttagtagaagtgaggtttttccatgttggccaggctggtctcaaactcccggcctcaagtgatctacccacctcggcctcccaaagtgctggggttacaggcatgggccacctgcctagcatcccggtgattaattttgtgtggggtaaaagagaggagggatctaggctaacacccagatttcctacaagggcaattgggtcgatagtggtgttagtaaccaagactgggtatatgggaagtgaaacagatctggtggggggagctagctgatacatttcactttgagtgtattgaatttgatgttcctgtgacatatctaggtgagaccatttttgcagcggggttgacgagtctgaagctcaggaacatggctttgctaatcagcagcatataggtgtagttgtggcatgagcatacatgaaattgagagagaaagtgtgtctatgagtaggaggagcaggagaccaaggacaaaggctggggttgggcagagggacaggagcagcagagaaggtagagagggaatccagggtgggagaagagagcaatgttccagaacctgagcagagagcttccgaaagctgtttttgtttttaatgctttgtttcctcttagctgcacattttatgtctggctcaggctaatattaaaattagctctcattccggagcatacagtgacagactgctagggaaagtgtcccagaaccacgtcgtaggaaagaaaacctagcccaggatttcaaaaaattgttgtaaaatattcatcagttggatagtttacacccaggcaaatcaaagctgactgcttttgttactggtatagaaaaggagagagactcactctacctggttcctgctgtgtcaaatcctccttttaggccccagaggcagctgcttacctgatgtgatgtgaagagcagggcagaaggggtgattggccaagcaagctctgtctgccccacattgcccattgcctttctctgtttcctgaaattctgttctcttctgttctcttctttcctcatcctgtcctttcctctcctcccctgctcatccagagaatagacattcagccctgattattcaccaggcactgtactaggtgctggttttcaaggaattttctttctttcttttttttttttttcaagatggagtcttgctctgtcacccaggctggagtatagaggtgcgatctcggctcactgcaacctgcgtctcccgggttcaagcaattctcctgccttagcctcccaagtagctgggattacaggcgcctgccacagcgcctgactaatttttgtatttttagtagagttagggtttcaccatgttggccaggctggcctcgaactcctgacttcatgatccccctgcctcggcctcccaaagtgctgggattacaagcgtgagccaccacgcctggcctcccaggaattttcaatcctaggggatctctgaaatgtaaagaaatatctggatctgaaagtggtagtgctataataacccaaaattctgagagcgcaggctgaaggacggatggtttcgacctgaagaggaggattggggatggcttcccagggaaggggacttgggactgaccactggaaatcctctgccaaactgtagcagctgctgcatttgggagtaaccattaggccaccctccccctggtgcaaatgacctgatgtaactagtcgactgtcacctgtagaagagaaggtggtggtcctgggggattcaagagatgtggcctttgaatatagcacagggagaagaaaattactaggatgcgaggtgctgcctgaagagggcgttcaccctgttcacatggagagaaaggggacaaacctgcctagttcaaggtttcctgaggccaggcctcatctccattcatccaattatgtgcgtggttgcatttccctggttccttttcctcgtttttgataaagatgaggcttagccaggttttaggtaattttgtcatcaatttttactttgcatcagattaaagtccacccccccttattcttaatatgttgaaatatttttttctttgcctctcttgagtgttgctttttacgccctcactcgcattccttactttgtccctaccaacccttgctctttttctgtagatctaccccctcaatttctgctccagcacctacgctcagaaacagtactacttagaactactacttagctttccttttgcctcacccacctttcttaagcatgattgtttttctcttcttctagcctcttggtttttccccttgcgttggtccttttaagtcgggtttttagtattagtttattattattattatttgtatgactcctctaccttcttttcttgaactatcgaggatggtcagctcctgcaaagccccctcctatttttgttctgtcttccttataaggttgccccagggtacatggtatatgtagaacggtaggaaagtccagaggagggtgttaaggagagtccctgtaaatcctgagctctgcttggcaactctactgaggaactgctctggaactttctctctcttaacttctctgcagatttttttcaactaccttttagtccctgtgggtatctgacagttgtgaaccccattcaaccctacattctaagggatgcagagggcacggacacttggtcctcatgttttggaggttgaaggcccattcgttttcaatcttctctgtgttggacccatcccttgtctgaaataaaaataaaaaactcctagcctgagcagttgtgtggttttgagcatgggaatccaagagatcattactttccactactgcttccacccagattcatgtttcagcaaaagctccttaggtccaagcagtggggagtgtgggggagcactttcactgctggctgcccccaaccacacttctgtgcccctgcaggagtgctatttagcatcgaggtcacctccacctactttgctgttcggaactactggagaggattctttgcagccacgttcagcgcctttgtgtttcgagtgctggcagtgtggaacaaggatgctggtaaccaaggaggccttgggtggaggccatgtgaaatagaaaagctgggaatggggtgcagaggaaaactctgtggggcagttcagaaaaggaataatgggcggcatcatttgtggggtgggaccaaggcccaagggtgtatgacaaagatataggtcatggagtgggagagtatatccatggaggagtgtgcgtagaaaaaaggaaaatacattcaagaggagaaactgggattggaggaaggaaggaattaatcctgaaaactgcccacctctgtttccctgttgggtttctacgaagctcccatcgtaatactggcctttccatcctacagtcaccatcactgctctgttcagaaccaatttccgaatggatttcccctttgacctgaaggaactaccagcttttgctgccatcgggtcagtggggttacctgctctgtgtgtggtgagcagggtgtggagtgaggctgtagattggaagggacccaagctagaaagaaggtgcggttggcacagatagagtacattgctggggggatgtgggcagataggaaaggcagaagcctggtatttgtttccctgcagtagttatgtccaagagatgaggatttcatgtctgtaagattccaactctataaattacaccctcaggatttgctgtgggctcctgggagctgtatttgtgtatctgcatcgccaagtcatgctcggtgtccgaaagcacaaggccctcagccagtttcttgctaagcagtgagtcactgcccttcttttgccctacccatttactttctggtttctccaagagttcctccctttttgtctttggggaaggcattaaatgcctctgggtggcttgcattaaaatataaggaagctctgatattgtggttagggggtgaattgtgtggtctcccatttaaagattatttttgtttttgttttttgagacagagtctcactccatcacccaggctggagtgcagtggtgcgatctcagctcactgtaacctctgcctcctgggttcaagcgattctcatgcctcagcctcctgagtagttgggattacagacatgcaccaacacgaccagctaatttttgtatttttagtagagatggagtttcaccatgttgcccaggctggtctcgaacttgtgacctcaggggatctaccctccttggcctcccaaagtgctgggattacaggcatgcaccaccgtgcctggctaatttttgtatttttagtagagatggggtttcaccatgttggccaggctggtcttgaacttgtgacctaaggtgatctgcccaccttggcctcccaaagtgccccatgggattagaggcatgagccaccgcactcggcctcaaatattggttttttgtgtgaagagaatctttttcatttaaagaaatgagactacggtggactaaaggaaacttcagcttgccatcgttcagtatggtatttactgtgagttggctgaattgtggcggttaactctgtttctttttcagccgcctgctgtatcctggaattgttacctttgtcattgcctcattcaccttcccaccaggaatgggtcaattcatggctggagaggtcagctgttggtggggccacatggtaaagaggaaacagcacagatatacctcaggcttcagagcataagtagttttgtccaaggatagactttctagattctccctgagaaaagggcaaaagagacccttgaataatgaggctggggaataagttctctaaaaaaggaagcacaggagttccctggagaacccaccctttctgcttcttcctctcccagttgatgccccgcgaagccatcagtactttgtttgacaacaatacatgggtgaaacacgcgggtgatcctgagagcctgggccagtcagctgtgtggattcacccccgggtcaacgttgtcatcatcatctttctcttcttcgtcatgaaggtactgctcctgacactagcaacaccctaaacctccatctgttttcaatctatgaacccagggtttgcatagggtaggaaggggtagaacttcatttggtcttcatccaacctaaaaataagtcatttgaaaaccatagagttggccaggcatggtggctcacacctgtaatcccaccactttggcaggctgaggcaggtggatcacttgatgccaggagttggagaccaacatagccaacatagcgaaaccccatctctaccaaaaattcaaaaaacttagccaggcatggtggcgcatgcctgtaatcccagctactggggaggctgacgcaggagaatcacttgaacctgggaagtggaggttgtagtgagccaagatcgtgccattgcactccagcctgggtgacagagtgtgattctgtctcaaaaaaaaaaaaaaaaattatagagttgtaagttgctatagaagtaaactagtatctgagttaattgctgtattcacgtcaacttagtgttgtctggcatagttatctaacccttctaattgttcttcttgttaaattactaagctgtcacagtagccaagtaaaaaagtacaagatagagttaagcattataaataactgtaaaagccttggattaattaaccaaattcccccacttagtagataattaagtatttcattctccatgtatctgatgatccattttttaggtgatttgagcatcttttttcccccggttttgtagataatctcttttttagatcttcaaaagggataaaatatttaaattaattgtattagtgactacacataatttttatacatgttattattctctatttaggtgatgaagctgtgaggattttgccattcccaaaccatattcttctagcttcaactaggcaataaaagatgatctctttcacatcacttctttttcatatctgcccatcaaggattatgtatttatagacttctcaattactgccttgtaataagatatttttatttctacccctggttgtgacatctattacaattgctgattgctggccaggtgcagtggctgatgcctatattcccagcactttgggaagccgagagaggtgggtcatctgaggtcaggagttggagactagcctgaccaacatggtgaaaccctgtctctactaaaaacacaaaattaaccaggtgtggtggcacatgcctgtaatcccagttacttgggaggctgaggcaggagaattgcttgaacctaggaggcggaggttgcagtgagccaagattgtgccattgcactccagcctgggcgacaagggcaacactcctcaagaaaaaaaaaaaaattattgattgcccttttttttcttttgtgatgattatcttttttactaatagtatgtcttgcctaaataacacaacactttcctctgtatattagagttctcatttataagtctgttcatactgaactttcaagcttttgaataccttgctattaacttatttatgataccttttataaatctatgttttcccaggatatgagtcaccaagttatatttatattgcaatagctacagtgggttcatgagttcatttgttcaataaatgttattaagcatttactatgtgccaagtacataatatttcatcattaacctttagctatatcttatgcttgcaacagaaaaaaaatttttaaatattttaaaacgttctattttttgctgtttatttaatttaattttttagtgatgttaagactagagacagcagatacgtgaaacaccagatttcaactctgtaacatattcccagggtgtctagaaactgtatttgcaaatgatcttccccattccactttaggtggtttagttgaatctacagcattcatattttgcacattcactttattaatttaatccctttaaaatgtctttcttcaaaagattttacatttttatcatgaaagaagttttcagtgtcttgttagggatttgatttttagactttcattatagagttcatcttctctaatttataaatcccaacctcctataattagttgttgagtacacaaacccatctacagtaaccaagtacaaattttggtggatctcagaattggacggtagtccaatgatgataactgtatttttctgagattcctctagactgagctatacggcaacattggcatcgtatgtacctttaaaatatcaagattttgaaaagtcctgtagaaacgaaatactgtatatttttcaacatttctgccaaacctcatcccagctctccagattcccaagtatatgtctggattccacttcgcaaattcaagcttattttgagaaacctacttagatgatatagaggactcacctgtatgccacaattattaatttctcactagattatatccttgataatgttacatcatactgtatcaggaaaagaaacatatacttcctgggctatatttcaagcctaacagtttgcagcaggcctataatatcctataatatttacgaacataaaaccattcactgctacaaatctatgatattccctggttatcaccacttcccagcattttcactgtctaatcattggacacaataaccatactcttattttttagctaggtaggatacatagctaaactaaaatataaacatgactgaaacaatttttccagtgcctaatttgaaatgtagtctatgtggtcttctagcagcatctgtacaggcaggtaagattctcaattcagctgttttgttttttttttttttttgattcggaatctcactctgtagcccaggctggagtgcagtggcacaatctcggctcactgcaagctccggctcccaggttcacgccattctcctgcctcagccttacctgtagctgggactacaggtgcccgccaccacgcccagctaatttttttgtatttttagtagagacggtgtttcaccttgttagccaggatggtctcgatctccttgcctcatgatctgcccgcctcagcctcccaaagtgctgggattacaggcgtgagccaccgcacctggccaattcagctgttttataatattaatgaagagaacttccatcttccttaatctcatgacgtggaaagtgtcattacattatacatcaagagaagagcttttacaatgagtatgaataccattccaaattctcagtttgcttttaataagtctaacattgttacctagtatcactaagttctctgcacagcctgaggctctgttgaattttttttcactcctttcacttcattctcccgaagtgaattcttcattttactccttctaatgaagggtctaaatatggtggaaacccataatgggtttccagttttccagttccctgaaattgagtgtttaaaatcgtggtagttctgtaggtctagatctgaagaaaaaaaaaaaaaagctgggtgtaatcccagcactttgggaggccaaagcaggcggatcacctgaggtcaagagtttgagaccagcctggccaacatggcaaaaccctgtctcaactaaaaatacaaaaattacctgggcgtggtggcaggcgcctgtaatcccagctcctcgggaggctgaggcaggagaattgcttgaacgcgggagccagaggtggcagtgagctgacacaccattgcactccagcctgggtgacagaacaagactctgtcaaaaaaaaaaaaaaaaaaaaagaagaagaagaaaaaaaaaggaaggaaggaagggaaagaaagaaagaaagagaaagaagaaagtcttgggagttatttgtgtttcacattacttctggatcttttctttcacgtgccaatagctaaaaaagtttgttaatctcatgtgtcaacctttgtgctataggagttgataacttcaatgtcttctgattgtaatactgttcttacacatatcttggaggataatctaaaatacatcttctgaaatcagacctattggttacctgttatatgaattgctagagctttcagattaacctgagcctacaaaatctcttatggcttttatgtacttatttcaaagagatggtacaggatagttcagtccaactgttaaatgtcagaatcacttaagaagcttaaattacaagtgcctatagccctatctgcagacaatctgatgtggtagcttccagtggggtctggtcatctgcattttaaagcaagttcccctggatgagcattactctttagtgttttagcaaatattagctctgagaagcttttcctcctttgcatgaatactatttgttcagcccatcttcgttctttccttccttcctttctacctactcacctagctacacccttcctacatttactgagcactgtgccagtgcagagagaaggcagaaaggacaagatgcactctctgtcctcaggggattctcagtctctattctcttcattttgcccattcatttttatagttctcaactgtttttgaatagtcatattctgacatgaaggagtgtgtgttttgcctcatctcagatcttctgggatgagactttcttagagtctttgtcactgtctcctgaggtcagccctggatgaggggagttctttctttctacggttctgaaaattaagaaatatatttctcgttagcttacagtgcaattgcgcacagctctaaaattgtgaatactttcatcttggcagtttgtcctgagctttagctgctaccttcttacacctaataagtttgagatccatttctgaaattggtttacttattttggaagggatatataaacctgttgctttgcttacatatgacatctcatacttctatttcttttacagatatttaaaaagttccacaactagccttttttccattctatttctcaattctttttttttttttttttttttttttttttttttttttgcgacagagtctcgctctgtcgcccaggctggagggcagtggcatgatctcagctcactgcaagctccaactcccgggttcacgccattctcctgcctcagcctcccaagtagctgggactacaggtgcccaccaccatgcctggctaatttattttttattttttatttttttattttttagtggagacagggtttcaccatgttagccagaatggtcttgatctcctgacctcgtgatctgcccacctctgccttccaaagtgctgggattacaggcgtgagcctctgcacccggacaattcttttgtactctttgcctcaaaatgcacatattgctttttgtaaaatggtctcaatttctattggagttctagcttacaaaattggccttagagattttttttctatcacattggctgacttatcaggctttctcaatttacccttccagtagctagccaggacagatctaaattttgatccttgtttaaggtgatctgatcattaaagcaagtggctcaggcaggtaagtcttctctccaggttctactgtgagtttcaccatatagatggttctatgaccccattgaagctcaattaatcacacaataagtcactcagactttaaatgtctgacacttagaactggagctccttggccgggcgcatcggctcacacctgtaatcccggcactttgggaggtagaggcaggcagattgcctgaggtcaggagttcaagaccagccggggcaacatggcaaaaccccgtctctactaaaaatacaaaaaattagctgggcatggtggcgtgcgcctatagtcccagctactcaggaggctgagacaggaaaatagcttggacttcagaggcggaggttgcagtgagccaagatcatggtactgcactccagcttgggtgctgggtggcagagagagaccctgtctcaaaaaaaaaaaaaaagaaaaaaaaaaaaccggagcgccttttcagaaatataacctgagtaggaaaagtcttcaagagtttcaggctactttgctgaggcaaactttctggactaaatgggtacaatgggctggggctcttttggggcagagaaagataagtactccggggctccattccttgttctagattgctgaaaggcaaatacaggcactcaaagtagaagggatttggtctagccatctagaggaaccttctgatagtattgtctttggtgatctcttagcctgagagctctatggcttttgtttctggaagaagggtgacagacaaagtgactttcagaaggatcagctatcccaggatttctgcagaaaggaggatagtgggaagggaattgtgtgtgcatgtctattgggcagagttgaaagggtattccaacgcttctttctactccagttctggatgtccatcgtggccaccactatgcccataccctgcggaggcttcatgcctgtgtttgtgctaggtaagttctgatgggaagcctggggtctgactgagagttgcaatctaggatacaggaaacataaggaaaggcccgggatgctgggagtttatatttgttcttaatgcccaaggagagattggttctgaaaactgagagcaaggaacttggatctcgtaacaccttccttccttttatcttccctctaggagctgcatttggaaggctggtaggagaaatcatggccatgctctttcctgatggtattttgtttgatgacatcatctacaagatcctacctgggggctatgcagtaattggtgagaaacattcccacttccctgtaatcaaacattgagtacttcagatccccacacttaaactctcccattggatcttcattctaggctacacaatacggttttaatttagtgctacttaactcaacttttactcagataacatacccatggctctgactctcattatttcttactgaacttccgtgagccttagtttcctcatgtagaaaaggatcatagggatcaaatgagatcataagattctaggattgtgtctggatgtttgataagggttctgtctttccttcccaagaatcatggaaccaacaatgcaggtgattggctcaggttgcaggtgattgactcaacctgagacgtgttgatattgatgggtagttaagagcacaggactaagagctaagaaacatggctctagacttctcctgccacttgttaccagtcaccatgaagcaagatagctgcttctgagccctagtttctttattctaaaatgacttctgagatagagctatgcctaacaccaatagaatcctgggattattatgcttcctcccttcctcagcaaaatcccatagcatctaaggccatgccttccctacatagagaagtgctgaccagctttctagctcacttggtacgctgctcccctgacatagtttctttctaaaagcctctttcatcaatgagggtcatagactcttgttctccatcttcatgactccctggtacacatgcctcccttgtgaacatttccttgtatgcacgtcctgtgattgtttatgttctgaagtatgttatatgcaatatccaatagtgtcattcctccctatatttcccttctgtgatgctttcttggttgctctctccctttctttctcccttccttccttcttttctctcttctccttctccttctcttctcttcttttatttccagagtcttgctctgttgcccaggagtgcagtggcgcaatctgggttcactgcaacctctgcctcctgggctcaagtgattctcctgcctcagcctcccaagtagctgggattacaggcacatgccatcatgtctggctaatttttgtaattttagtagagatggggtttcaccatattggccaggctggtctcaaactcctggcctcaagtcatccacctgtctcggcctcccagagtgctaggattacaggcataagccaccatgcccggctgactttttcttgttacattttcatatgtgccttcctctacattttccccataggatacctcttccatatttaaataagaaatataattaaagcacaaaggactattttggttagtggagaaacaaccaaaaattaacaagatagattctatcttcagggagcttatagaattataaagtttcagatctacaagcgccttagaaatcatctaaatgacccctttcgctttataattgagagcatgggattccagaggaattaagctctactcattccattgagaaatagtaagagcaggatctgacacaggtctcattgctgcatgtccacagtatgattctcgggttttcattctatttactcactaattgttggcattaatacctaaagcccaaggtaaaaaaaaaaaatgttataactgagttgtaaaatgctcagtgaagaggcctgatacagtggctcatgcctgtgatctcagcactttgggaggccgaggcaggcagatcacttgaggccaggaattcgagaccagcctggccaacatgacaaaaccctgtttctactaaaaatacaaaaattagacatgtgtgttggtgcatgcctgtagtcctggctactcggaagactgaggcaggagaatcacttgaacctgggaggtggaggttcccatgaaccgagattgtaccactgcactccagcctaggtgacagagtgagactctgcctcaaataataataattaataataataataataataataattttaaaaaataataaaataaaatgctcagtgaataatcatccaaacttttaaaagcaaggaatggataggacatcactatcttcatattataaatgaaaattttggcacacacaaagattttgtaacttggtgaagtttatagaatgagatcaaaatgatgatttttctaagagttcagtattctattccctactcttgacaagtcattatgagtattggcactgaccagggtcatgtctctcattccgtgttattcccatcccatccccatatgtccttcatgctaagaacggtagccctaacctacaggcgtattcctgtgtcattctaggagcagcagcgctgactggtgccgtttcccacacagtctccacagctgtgatttgcttcgaattaacgggtcagattgctcacatcctgcccatgatggtggctgttatcttggccaacatggtggcccagagcctgcagccctctctctatgacagcatcatccaggtcaagaagctaccctacttgcctgaccttggctggaaccagctcaggtcaggggcactagacggaattagttcagatctgatggggagagtgggaggttctgaggctgagactgagcttagagttaaagtttggaaacactgttttaaattattattatattctcatgcacctagtagatattgtgagtgactgaaagtatggcaaatcttatgggaggaatggaagggataggtatacggtggggctaacccaccatgctttctccctccatagcaaatataccatctttgttgaggacatcatggtacgtgatgtgaagtttgtttcagcttcttacacatatggggagttgcgaaccctgctccagaccaccacagtcaagactttaccactggttgactcaaaaggtcagtggggaggaagaagtcgactccagagctagtgacctgaataagggtcacatagaggtagaggaggccccatggtgggggctttgtctttaggggccatccaatgtgctatgtacaaggaaggaaaaattaagccataacacaagcacacaaagacagttaaaaatgcaattaaaaggtcctggcatggtggctcatgcctgtaatcccagcactttgggaggccgaggtgggcagatcacctgaggtcaggagttcgagaccagcctgaccaacatggagaaaccctgtctctactaaaaatacaaaattagctaggtgtggtggtgcatgcctgtaattagaacccgggagacggaggttgcgatgagccgagaacgtgtcattgcactgcagcctgggcaacaagaatgaaactctgttaaaaaaaaaaaaatttcccactaaatacagtcaattctcataattcatggtagttatgttcaattaagtatgaagttcaaatactatactgaataattgctcctaggaaaaatacagggctgtgttcctgtgagtctctggtcacatttccatcaaccaatcaatatatgaccttgttgtatgtgtgtttctggtaaagacaccttatttcacagatattgtggattaattaatattgaacttgtgccaacagcactataacccttgcctgaattaagcttacttaacacacatattttctcaataaggctcatcacagccttcttgcactaggaacagtaaacagcactttgacattatatttggtggtcatttttagcagcaaaatcaccaacacaaagcacaaaaatgcaaaaaggatggcactaaatagactacaaaatgaacacctgtttacaatgtgaaagctgaaacaagaaggtacagcactgctttgttcaacttcagctgggaacagggacatgggacaactaaaaatctttgttgctctttgcatgtttgtgaattacagtgaaagcacctctagtattggttttgtgttacaaatatattttagtgactagctgaattcacaaatagggaatccatgaataatgacaattaatgtaaatcccatagcttcttacgttgttccattttgatgcttacataagtcatgcttgttctttaatgcccaacttatggaagagttggaactgttttctttcttccttcctttctttctctttctttctttccttctttttctttctttctctttctctctctctccctccctctttccctctctctctctttctctctccctccctctttccctctctctttctctctctctcttttcttttcttttctcttctttcttttcgacagagcctcactctgttgcccaggcaggagtgcaatggcgccatcttggctcactgcaacctctgtctcctgggttctaagtgattctcctgccttaggctcctgagtagctgggattacaggaatgcaccaccatgcccagctaattttgtatttttagtagagacggggtttcaccatgttggccaggctggtctcgaactcctgacctcaggcgatccaccagccttggcctcccaaagtgctgggattacaggcatgagccactgtgcccggctggaactgtttcacatggaggagtgaatggttgttagtaaacgataatttcacatttctctgccttcaccatcatttgacacttcatcctgctttgtatgatttcttattgtggtttatatatctatatcttgtcttcctaactaggtgggcattccttgagaatagaggctatgaattctatatacccagagtgccttgttataggtatctactagatattaaatgaataatttcctagtgtttgaattagtgtaataaagaaaaatcatgtagggccatttggagtcattaagattgttagttctgatttccaataatcagaatatccaaatttctcaaattaaattaattcaaatattttcccaaatctcatatacattccacgttctacagcagaggctctttattagaggaggggtacagccaacaaatgaggggcaaggttttcataataatgactgagacctaacagtaaaattcatctccagagcactgctgcaatgtcttggccttaaaacttaataaaaatgttaactatagtagcaaaatttctataatcatataaaagaccttctcaggaaaagtaggcattttgatttatcctagcagggttttttttttttttttttaatgaaatctcgctcttgtcgcccaggttggagtgcagtggtgcgatctcagctcactgcaacctctgcctcccgggttcaagcgattctcctgcctcagcctcccaagtagctgggattacaggcgcctgccaccacgcccagctaatttttttatttttggtagagacggggtttcaccatgttggccaaggctggtctcgaactcctgacctcaggcgacccgcctgcctcggccttccaaagtagtgggattacaggcgtgagccaccgcctggcccaggttttttaaatgatgaaatgtcagatacaaaagaaagagttcccttgtttccctttttccagggagagatataatgtttgtattgcttatagacttctttcaaagcgtgttcacgtctcagcttatttgaatggcttctcatgtttctttttatttggacagcattgattagcctccttaattatcagctcacctatctgaagtctatataaggcctcatcaaaataagtacaaattagcccaattagtgctctaccaattggccccgtacctgctaaatggatgaaataaaagggattgagtgaggttaatcttggaggattcttaaaatgagtttccaggaagctgagaaagatgtggggacgccgggcagggtggcgcctctcctgttccttctcaggagtgcggagcgcggtggtgcgagagggcttggagggggcgctcaggcagggcgtgggtttccctcagattcaatgatcctgctgggctcggtggagcggtcggaactgcaggccctcctgcagcgccacctgtgtcctgagcgcaggctgcgcgcagcccaagagatggcgcggaagttgtcggagctgccttacgacgggaaggcgcggctggctggggaggggctccccggcgcgcctccaggccggcccgagtccttcgcctttgtggatgaggatgaggacgaagacctctctggcaagagcgaggtgaccgcgccgggaagggctagggagtgggatagatcaggagcaaagggaaaagcgtcgtctgggctgggctgggctgggctgggacaggcgtagtttccctgaaagtagtgggaagagggaggggagagtctggtaactgagaaagccagaaattctggatcaggtaccatagagaccagtgcctctgggtccagggactaaagaagataaggttgcagatgatggtatcctcgacaattcaaagggatataggaatttctgaactggggggaagaatagagttcgctttcccagaacatccaccaactggtaaaggcagtgaaggcccaggcagtctctgctcccaggctgagacttcttactcttccttacagcttcctccttcccttgctctccacccctctactactgcccctctgtccccagaagagcccaatgggcctctgcctggccacaaacagcagccggaagcaccagagcctgcaggtgacgctcttccctcatgcaccccaactcaccccttgtgggttctctctggtcactaggacctgaccttgacctgcatgcaattcctatgcggggtggggtggggggtgaggctgggggattgagggaggacagggttcttattcatcaattctccttgttactgtcccagggagtgggagcagagggtgatttaggagggtagaagagagggtgaggtacctgggaagtgcagctctttggaggcaaatgttaggcactgggtggggcccctggccgtttcctgttgctttgtgtccatttccatccactcacctgtcctctcaggtcaaagaccctccatcttccagtccctgcttcactgcttgctgggcagagctcgccccacaaagaagaaaacaacccaggtgagaggagatgtgtttggggatacaggggaaagggagcctgcccttgaagagtgagaaacccacggttcttaaatcaggaaggcagagaccccaccaaggaggaggagtttaatcatatggaagggatgatgaatgaaaaggaggcatcggtggtcctggccagggagggatggctattgtttcattgggagccatagctaccatgggaagaaaagggaaagaacttggacctatgtctttcttctctaggattccacagatttagtggataacatgtcacctgaagaggtgagtaagggaaatggaaacctggggtggattgttctatcaaatgaagatattgctaatttgtttctaccttctttattgtgttgtcatgaaatagaatgtggtctggatgggaagtgttttgagaggatggaaataaggatgattatggagagagtaatgagtgtgtgatgggacatggaggtgttctcagaaggacacgtcatttcagaagagaaaaactttgagcctccatgagtaaatggggccatggtgctaagatgagccccagatcttttagagattatgggctttctggatcaggcaaagctttaatggaggtaaaatggcaccaggaggctggcactaaaacagcaacatagaagaagaacatcaaaactaaaatgggaggccgggcatggtggctcatgcctgtaattccagcactttgggaggccaaggcaggcagatcacctgaggtcaggagtttgagaccagcctggccaacgtggtgaaactccatttctactaaaaatacaaaaataagccgggcatggtggcacgcacctgtaatcccagatatttgggaggctgaggcacgaaaatcacttgaacccgggaggtgggggttgcagtgagcagagactgcaccactgcactccagcctgggtgacagatccagactttgcctcaaaaaaaaaaaaaaaaaaaaaaactaaaatggagaaatctgctcctggtggagattactgtgctggattgatcagggccctgagacagtgaacaactggaaaatgctaggcattgctactgggaagaactgaaaaaggaagaaaataatgaccacggtgcctcctggggacaaacaaatgcctattttcctaaacgaggtggttatcaaatcttcaagagagaaaaatcaagcattctgaatgtgcttggttgtcaggagggaacagaatgtggactagtgattggaagcaggcggtatcagaacataccgaggggttgtggaggaacatcaacagaaaaatccattggcaactattccatatggtaaaagaatgcagagtttgctgcaaacgccgaaaacgtaaagcttgtaaagtatgaagctgacaaaaaaaacacggcagatattatttttaaatgaacatcttattggatatccagaataaatatgtgctgacaatgaaaagcattacaggattggaggaggatgttgtgagtgacaagacagaagagaaaccttccccaccccctcaaaacacacacacttctgataaatgacttgtgaaaaagtcaaatcgatgatcacagagggaaaggaagaactattccttctgcccacaagcaggaatcagaaaggccataattgcagttaaggagtactttgttaggttgctaaaaccaataacaataagttttgctttttttcttttttttaatttaatgcaccaaagagagaaaaccagctagttgatcagtgtggctattgaatgaccactggaaataaagtgaagccagggattaaaaataagatagactatcatttctagcttatgtctttcccagggaagactttaaggagctaccaactcccatgtgacccactgagacattttagagggataagatctaacaggagttgaaattcaggatgttttgaacacaattttcagaccagatgatacccttgacaatatcaagatgttgatattgaccaaaaaaacagtatgggggcagtatgggaatattgaaagattcaattatatgttgccagaagtccctactaggatttgtttaattctgcatactctggagtacacacagagctctgtttctaaccggtaccgagcttattcaagtagtggaacacaccagcctcaacagcaacgtcctgcatcccttgcgcaaaagctggagatgtacctggaatacaaacagcagtcaaggttagaagcccagctccaccaattactgactgtgtaatcctgggcaaatgacttcaacatgctgtgcctctgtttcctcatctataaagtgaagataatgatagagttattagagaagattaaatgagctaagacgggtaagtcaattagaataatgcttggcaaagaggatgtacttgataatcattcactgaaaatgttgccgcgttattgttaaggaaaggcaaaaacggaacataaggccacagatgatcatagaaaagaccaagaggacgggatggaccaaaccatggttggcaaggtctagcccccgtcctatacctaaatcttctctacaacacacctgctaagtggtcatccatcctatgctatgtaacctctgtaatccattagtccggaagatgagagtatagaggagtcatgattgtaatccagaaatatcaggacaggacaggtggagtgagcatcactacgggctacacaccagatcctaaacctatataatgccctttggtgatattctctgaagtttgagaggtgtagatttggacaaataggaaaatagagttctagatcattcagaggatactgactgaaaagagattttagaaattttagaaaaatgtaagagagccagagatgtaatggattatttggactcttgggaattttggtgtgcgtatctaaagtcaagaggatggttggcctttgtgccttaatgcttctgtcatagacaaaaacaaacaaacaaaaactggctttgctcaagtcagctaagtgccatgaggtccagtatagctcttcaatttcaacaagtacccactacagttccctgcatgagaggtgatgtgctagtttcttcacaatatacagcagccgataccacataacactcaagacaaatgcagaggtaagacagatgccaatacagcaggaagtatggccaatgtcatttctgaaaaggtgagaccagctaatactatgggaataaaaaaggggagaagcacatctgattgggagagtcaggaaatacgtacactgcagggagagggtagggcaggtaaaggaactccagatggtcagaatagcaaagacaaaggggaaggcatgtttgaagagcagaaagcagtctggtttgattggagccccacgtcttatagtagtagtggaaaatagatgggaaagataggttgggaataacaaatgtttgggacgccaggggataggagagttggagcctagaagagggaggggtgttctgggtacctgggggttgcagggtaggttgggggcctgatgaggaagggcagagaggctctgtcccctgggaagaaggaggaggtcctctgatctgggggatctatgatcagttcttgcatgttcccagattctgggcagcggctaggagggccgtttggggtcaaaatcaggtatctggggtgaaaggaggctctgtgattttcgtgactttcctcctctggctgacagattgaggcctgggagcaggagcagctgagccagcctgtctgttttgattcctgctgtattgaccagtctcccttccagctggtggagcagacaaccctgcacaaggtgagtcttttgctgactgctcagggctgtggggaaggcaggagagctgtggggcaaggaacatgcactgacctgtgctcttcatcctcagactcataccctgttttcactccttggcctccacctcgcttacgtgaccagcatggggaagctcaggggcgtcctggccctggaggaggtaatcacgatgtgtcccatttgagcagcaggagggaggctgggcataggataaggggatgcagtggggacagaaggaatattagcatctcagaagtcccctcagattcccttctctatttctttcttttttttttttttgagacagagtttcactcttgtcgcccaggctggagtgcagtggcgtgatctcagctcactgcaacctccgcctcccgggttcaagtgattctcctgcctcagcctcccaagtagctgggattacaggcgcccgctaccacacccgctaattttttgtatttttagtagagacggggttttgccatgttgggcaggctagtctcaaactcctgacctcaggtgatccgcccgcctcggcttcccaaaatgctgcgattctaggcatgagccaccatgcctggcacccctctgtatttcttatgcagagattggagggggtagagcaagcagccagctgaggtagaggagactacgaagcctgttatggccacagccctgaagggaatggaattctccaccccagatggggcccacgtgatcttctgtagatagtgtgggtttgagatgggggttccaggcatgagtcacagtttctcggggatgcgctttgaggaaagctgcggaaaaaaggcagtggggggatgtggctgcaggtggtcactaggaaggaagaggtcacccaagggtctgagtctgggcaggtggatcttttgtcatgccccttttcttgtcctttttctgttttctttctctgattgttccttgttttctgtttctctttctccccgttttgccactctatatctttcctgttcttttttcctttcattgtacctgttcttttctgtgtctctcactgcccccgtcttttttctttttccaactttttaccctcttttcctttcccactgctcttcagctacagaaggccattgaggggcacaccaagtctggggtgcagctccgccctccccttgccagcttccggaacacgacttcaactcgaaagagtaccggggcacctccatcttctgcagagaactggaacctgcctgaggacaggcctggggccactggaacaggggatgtgattgctgcctccccagagacccctgtgccatctccttccccagagccccctctctccctggccccaggcaaggtagagggcgagttggaggagctggagctggtggagagtccagggctggaagaggagctggccgacatcttgcagggccccagcctgcgatccacagacgaggaggatgaggatgaactgatcctttgaccccctcccacgacctcctcataaagaccgtggagaggcccagcctgagggtgaacttgtgtggggcagggtgcgtcctgaatgtggcgaggtcatgccaatgtcgtggcctcttccaggaattttttaatgtgatagtcttaaaggaggaatcagcatttaggcagggaggagccttggtcaattattttgactgttctccccattcccagccaggcaggtggccctaaccctagcgaagggcccctgatattccgtggggcttcccgagtgttcctggtgtgcaggaagggaatcccctgcctctctctgcctccccctccccacccaacaattccccagtactcttgtcccagcactgtgctatctgtgcctcagtgtctacaagaggtggggtgaggggaggcccagaatgactgtggccctgcaagtgccatgtcggaggaggggatgggaccatcctatggcctcgggcactgactaccccagaatgtgcctccagaccagccacagccgcttctcttggagccctgcgctggcccacgtctgctcctgcagtctgcctctgagcccactgcctgtgtcgaggccagccacagccacttctcttggagccccgcactggcccatgtgcactcctgcaatctgcctctgaccccactgcctgtctccaggccaggccgtgactagcgcagtgagaggccgcccacattccccctccgttgtcccctgcttcaagcagtgagatgcagagaaaaagactgtcaggggcagcggcctggaagaaaaggtcgccaaaggctctgtgcaaaagacacaagtgccctgttgctcaacaatcacgcccccatggtgtccgccgactccctctggcagaaaactttctattccacagcacagcttccttgtcctccagtgtccaggttactccctaggaaacacatcctccctcttgttattgacttgtcctgccaaaggtcagctctaccctggagctgctctagccagggcctctcctgccaagaatcagggctcagagcagctaggtcactgggtcactcagacaccagccccctcttagactggttcttcagatgcctctcctaggggtggagagttaggagctgagcgtcaagatggcagggctcttgagtgctgccccgcacttgggagagtcacatcttcaccctccccaaatcagcagcaggaagcctggctatgcactccattagcgtgctttctctacaaagagaggccaggtgctgtgagcatccccaaacccttgctccgtacccaaggtttttctccccagcctgccatcccgtatgccgttcttaattctaccattgtgcccccgctccgacattctcctcctttgcctcccctgttcccagtctcctccatcccccaaataagacactcacagtcagaggatgccaccacattctgtttagtgtcattgaacacagcctgtagccttctccagcatcacatccctcccacttccccaggccaagagagatgctgaagcctgggtgggggactggcagtgggcatttgagcccatgcccttgtgtacataatctctaatatttatatatattgatatagaattctctctataatatatgtcatagaatctctcttgggcctggcgtgggaatgtgacattaagaaaacatgctaagactggccagaaaaatggatatttcccagacctggaggatggtgtgtgggatgtataggtgaggtcgtggagaagataataaactcattccccaagataccctcttcaacacaaggacaagaaggaaggtgtgtggtgggggaggggacaatggagggggaggagtggaagatttggattttcatttaataaagtcaattgaaaatgaaa

SEQ ID NO: 4 - DNA, 80716 bp, Homo sapiens
tcccagccggcctccggggccctccgggctgaaatcgacatttgcctctggcaggaaaatgagcttgtcagtttctgcctccattagaccctcaacccaaaggagcaggagatttcggtagcgttttaactttatctcagaatctgaaagcggaaggtaagctgcttatcactcagaaaaacaaatttgagaggagtgacctagtaaagtacactgcgactttgttgatttttaaaatctggtgttgaaaataattgatcgctgtgagagtcaagggctgtatttatccccaaattagagattaaccttctgaacagaaatttggttaatttggagggaatcacggtataagggccagggttaaatatagaaggacacgaaagctgatggaataaactgcaagtaaacttaactctagcctgcttgtaaaacaatctatttcatgtctccttcagggctgtgagcaaagggaatgttaaaattgtgatttttaactcaagtgaaagtaaatgaatctatttgcaattggaatacaaataaaagcagtctttgcttttgtccttttacatttcaaaaacgcttgtgtattttggcaaaagaaaagtttatatgtgcactgcttaagtttgaaatacgctatttcaaatttacaaaattatcacagttgtaattttctaaagtctttctaggcaaggctgtttcagttgtgaatgagaaatgttgacattgtacatattttctgtgatagtaaaatgactcacttcttcagaatgtgataaagattagaaaatgtgaaataatgagttattgtgaattaagtcatgtctcagagattaaatgccttgccagaagatgtaagaaaacagagacacaaatacaaccatgctcacgtagcagtgctttattttaaatcatcacatatttaagtaagtagtagaaatacgtggtgtcaccattttttcctttggcaaatacaaattaatattggaatgcagctattcagagtaattaaagcattattcatccgtgcaattagtataatgttccataatgaattgctttgaactaaagtgtttggtataatactcgatatacggcttgaaacatagaaactctaggcaaagtatgtccatgctatattttgtgtcattttgatttgcacaaaatgtttatttctccactgcatttgataaatactagttttaaaataaaacatgaaattgtatttcctttcactgtaatccctttattgctaattcttttgaaatcctattactcgcttggagcctgtaataatttggatttctcctcctgtgtgttgtttttcataattcttcgcgaaaggccaggcaagctgcacacatcaagcgaaacgcctgaggggcggccagcgcgagggtttctggccatcgaccctcacctcccgggacttccagggtcttccccccaccccgcgcacacctccctgcctcgccccgagggcgtcacgtggcagcgtggggcccgcctcctggtgatgtcacggcgctcgcagccgtcgcgctgaagaaaggatgctcgaggatgctgtccaggtgggcggccgcgggcgcgatgcggcactgcaggtaaggggcgcgcggcgcctggatgccctccccggcgcccccggcagcgcggacgctgcaggtggagcccggcccgcgggcctgcagcccggctgcgcccccagaaacccaaagtggggcctctggctgctgcggcgcctgctgcccacagctgcctgctgcagctgcatgcacccggccggggatggcccgtggcaggcccacgcgtgacttgggtcttggcgtgcccgccccgagaaagcgggcaggggccagacagaaagacgggggagggaaaaaaccgctccggcgggggaacaaaatctgaagtgaccacactgcatgcattctaagtagacagaggggcttttaagaggtaactatcaagtgttttcctagtgtcattctgcttcttaaataacgacatgtttactaattacaggcctttgtcctcagtaattagcctcatttctttcaaagcaaaagcgggctggggagtggaaacttcttggttagcaatttaagagccagatgtgcaatctaaattgctttgcattattttgcaaggttccagcatttacagggcatacgtcagaaacgtattttttttttccttccaggtgttttaagtagattaaaaaagaacggtatccaatacaataaaaataaattgcagcttccaaagataacatgtgagcgtaagagacagctacatctctaagaaccaaatgatctttagcagagagtgggggtggagataacaccaaaacctaagaattcccagagttcttgttaattctctcgctgataattcgcttgctgaatggagaggcttgatgacagcgccagatggaggggtcaggtgacttcagttctagcatgacagtgggtgggggattttaatggactgtttctagagcgtttacatgcctttctcggggtcaggaagaaactacagccaggacgtgtgggggcacccttagggggagaatgtggcattattttcccctctaaaacctgacccttctggaagctttgttgtcactaaactgtattggaactcacatcatgaataatttgaccaaccagcaacgttggggggcctgtaaagcaatgctatttccatcaataattgaaggaggcatttctttcagaatttgggacacccagatgtgttgctgcagtaatttagtaacttgtttattgcaattttcttcctttggttcagtttggttacacaaattaagatccccgggtccccgccctcccttctcctccagcccaaccctagatagagcaaagcagatgatagaggtggatctaatacagacctagattccacttttggctttgtgactgtgcagccttggatatgtcatttagtgtctttgggcctcgactatctcgtcctcaaagtaacaaagggatttaggtcagggtgtctcaaccttggcactactggcatttggggccagataactccttgtggtgaggctgtcctgtgcattgtaggatgtttagcagaatctccgacctccacctactagatgctagtagcacttccccctcccagcccccagttgtgacaatcaaaaatgttgccagacattgccaaatgtcccctgagggctcccttgccccctgttgagaaccactgattgagatgatctcgaaatattcttcttcgggctccaagaattcattttcttatgattggtttgatgccaagcccttgatcagaaatctgattccctttcttaatatcacatatattggaaaacacaatgtgaaggcgtttttatgctgtgaatttccagaaatagcttctgtgaaaaggggaggagctgtttgtatgccatttgtagctgggaggcgagcttggcagaaaggagagtgttagggaaagaggaaaaaaacagagcactagatgaacgtgtgtggaaacctgccggggcttcgtgctcagcagacctggagcacgtccctggacgtagtctaaccctgggttagacctaacagctgagagtccatttccttgtctgcaaaaatgagaataacagtgtccactcggaggtgttgtgaggatgaaacgacacgacatctggtgctggtgggggacgtggtgaggacgagagggtggtaatgtctatgcagctaggaggaggcaaacacaaatggcccgcaccaccagcgacacggacactcgcttgggcagacatggtcgcatgctttaagcttcagtccaggactaaagatctggctttgacacctaggagggtgaccgtggctgcatcacttcaccctgcagagctgctgtcggatctgtaaagtggggccaaccgtgcttgctgactctgcttccttggctgttggggagggacggatggaagtgagagggtctgcaggctgggaaactcccaagagacaggaagcgggggtggcagcagcatagcaagggggggacatgtttactatgtgtgtgtatgtggtggtggtggggtgcttagaatggccagaaaacatttccttgtgccccaggctttggactttgatgtgtccctcccctgggttccctttccgttgccatcagcttgctctctctctctctctctctctctctctctctctctctgtctgtctcatctttcctggcaccatgaaaatggtctcctggggggagataggaaagccctggtgggggaggttggccttcggtgaggaagacccactgtgcagagggctagggtgagagcagctggctccatccactccccacgccactgtcctcacaggcttcagtccacggacatcccagggcaggcctgtcacgctcctgtgtgcctccagtgggcttggtgctctgtatgagccatctggccttgtctcttcaacaaggtaatatcatgaaagaaatttttaaaaagggaggtggggtattctccatcaaacgagacttaagagacggaatagccaaatatcacttgtggccctcgattggattcggcccaaacaaacgtgtaacaggcattttggggatgcctggagatgctttgatgtgactggctattaggtgacactaggagactgctgctgctttgattagatgtgacagtctgtgatgtgttcggcagcccctcggacagatgcagtgatccccacccctggcagctgcaacttggcatcaccctctcccctggggtttggtctggaccaagtaatgaacttccaatgaatacgtctagcaaggggtgggggagaggcacttccaccatgagggtgtaaaggggcttctgcctggggtgtgttttctctcttgggttgcttacactgaagctgccatgtcgtgatcagccctacaaaagggtccatctgccgtggtgaggacccgaggtccattccaacagcctgagaagaactgagacccgctgacggtgtgagggtgtgagcgggctcggaggcagacccttcaggcccagttgagtcttttttttttttttttttttttgagacagagtctcggtctgtcacccaggctgcagtgcagtggtagcgatctcagctcactgcaacctccgcctcctgggttcaagcgattgtcatgcttcagcctccctagtagctaggaatacagggacacgccaccacggctggctaatttttgtatttttagtagagatgggattttgccatgttggacaggctggtctcgaactcctgacctcaggtgatccgcccaccttggcctcccaaagtgctgggattacaggcatgagccaccacgcctggccgcagttgagtcttgagatgcttgcagccctgtgagacaccttgagctgaggcaccagctaagccactccagggttcctgacacagaaacagtgacatgatagatgtttgtgtcctgctgctatgctttggggtaagttgttaggcagcaatagatagctaatacatgtgtttatgtagaaaagtcttcttgtttagagatgtatactaaagtgtttagagatgaagtgtcatggtagcagtcatttactttttttctttttttgatgttttcttgagatctctttaatgtatgacttaataggagacagatgaattctcatacttggttctacattcaatctgtttcaatatcgcatgtcatgtagcctctggaaaattccattgtatgctcatgagagaatgaacttagaaaaaggcaaataacaatgtcagaatattgtgaaatgtttttgacatcatggactcccttaaagggacttggggagcccaaggagtccccagatgacactttgaagatcaggcttcaagatcaataatttacttttaaatggttcagttaaatgaagagagagaaagagataaagcagatagagccaaatgtgaacaactgttcagtctgattggtgttattcactggattcttctggatgatgttctgtgtaattgaaaatgttcataataaaaaattaagaaaaaaagaaaagaaatgtaaacccttagacacactggggattctgactgaataggtctgggggtgaagcccagggcttaacctgtgctccaggtgcccccatcacatgggccagaggccccagccactttgccccagaggtcctcgccttacctgcctcctctccacctgtcagccttgcagtagcagaccaaaggggtttagtgtgatgacgcatctcttctaccaacctgggggaagaggtgtgtggggacagtcccccctcctatcccttcccccatacacactttcccttggtaacaagacctttgtttaaccacattttcagtgggtggcttttttatgtgcaggaatttttttttttttgtgataagtatttttttaaatgactttcatttcttttctttttttttttgagatggaatctctctttgttgcccaggccggagtgcagtggcttgatctcggctcactgcaaccttcatctcccaggttcaagtgattctcctgcctcagcctccttgtagctgggattacaggcacgcaccaccacgcctggctaatttttgtatttttagtagagacgagtttcaccatgttatccaggctggtctcgaactcctgacctcaggggatgtgcccgcctcggcctcccaaagtgctgggattataggcttgagccactgctcccggccccttaattacttcttcattcagcaaatattccttgggtctgtgcgtctaggccagggtttctcaaccttgacactgtggacgttagggtccagatgattcatttttatggggggctgttctgggcaatgtagggtattgagccgcatccctggccaccatccactagatgccagtggcaccccatctcccagttgtaataacaaaaaatgtctctagacatggccaaatgtcccctgggggtcagtattgcccccagttggttgagtcctacaagtctaggcagtgggatacatgttaggaccaaatggacaaggttcctgccctcacgggactgatttgagctgagggaagaggaagtagctgttggataggctgtgtgttgagtgaaaggatggacagcaaaggatgcacagcactggactccaaacgctggtcagggagggcaagaaggcctctctgaggggtcgcacttgagcagagatccgaatggagagagagccacttgagcacggtgggctgagtgctcagggctgagggaacagccagtgcaaaggccctgaggcagggcaggacaggaagcgtttgcggaaagcagggagatcggcgtgtgcaaagtagagctacccagagagtaggggtggggacaggtgctcagaggggcgcagggggcaggccatcctggaactggcagttgtggtgtcaaccctggattgtcctcagtgtgatggaaagccactggatgctcctgtgtcggggagtgacatgttgagactgggttaaaaggactggctgctgtcaggagcagagtcagaggtgggtgagaaagaaagcagggcagccagcaaggaggctaggaggcgaggctggaggccagatggggagtggccagggtgaccaggtgagttggactgaggagctaacctctttagcagcaatgttgtcctaggtgccagagtgggcccttggtgatcaaagaagcctggcgtgggagggtagtgtgaactacagggcaggacatggaggctgcagacgtgtcctcatgcatccggctcagtcgcagcatcacctttgatgggcggtggcctcccagggacagcagaggaaatggccatgcacattcccacatgacacctgaaaagctctctttcccgcttcttgtcgtggctgaagtctcccaagctgtcaggctgccggtggctccggtgattctggctacacagcttgcttgctgtcctcgggcccagcacatttgttcctgccactgagtctctgaattggctgttctctgtggctggagggtcaacccccacacttgttcccttgttgccttctccaagtggccctggtcgccctgcaccgcctgtcacgtgcgcttctgcgggatgcagtggcctgcaatcgggggttcatggaagcccctgcctgctggcttgccatcttcacactgttcttgacgtggtcctgccctgccccagggcctttgcactggctattccctcagccctgagcactcagccccctcgtattcaacagagagcctgctgttggctgggttgaaagtagatgtgagaccggagccttcctcacagaggggacttgaacccctcttgaagctgcagaagaggagagtcctggaaggctggggtcaggcccttgacctgccctggggacgacacatgggaacagcagggtcatgaaggagaggctgtgggtgggcgctccccctgagggtggtgttcccctctttccatctgaggcagttggggcgcccaggatgggtttggggtttgctgatgtgagagctaccccaacgctgtgtttccttatgggggaggctgctcctggtcctgggtgctgggcctgcggctcctctctgtggctgccgctcccctgagccttgcccgcagtttcgcgatgcttcccgatgggctgactgtgtcctcctatctcttggctcttcacttcccttctgggttgatttggctaaatatgaaagttctttttcgccctccactctaacccctggaggtgctggttgggtgaaaaggcctctgtggttagcagatagccgagagattgttcctcttagcttagtcacgcatcacaccagctcgccttttaccccaaacatggaattggctcaaatgtcagcccgtgtgttggtcagagtggcctgcctctcttcaccgtggcgtcccgggccaccaggaacagcacatgaacgcggttttgggtgccttccagcatttaggctttacacacttgccagtcacgagtggctcctgaaattttctttttatccatgagggggtgtgaaccttggataagcagaaaataggttgttgtggagaaaacctgtcagaaaatggtgaagggaaggccaggctgtggaggtgccagaagagcgagggatttcccacctgcactgtcttcagcagctgtgatggcttgaactgtgtccccaacaaattcatagattcaagtcctaaccttcagtacttcaagacgtgaccttatttggagatagggccttgacagaggtcatcatggtgaaacgaaggcatcagcagcgcgcgtcccttcatctcagacttctggcctccggaactgggagaaaacccttttctgttatctgagccacccagtccgtggtgcttggttacggcagccctagcaagcacgtgcagcagcatttttttgtggatgcatgagagcgcgacccaggggcctttaattaagctattctcacacggtgtaggagaaacgtggcccccagtgccctctccatggaggcacatggctctgggtcctgaggtggcagaggcctgcctgctgttgtggagaaaggcccctgggacctgggctggatccagctgccccctcactgtgtgtgagacttaacctctgtgccgcagtttgcttatctgtaacttatctgtaacgtgggcctgagggaggcggtacttcatacacgggggaagtgcttagaatgaagccaggtacacggagccctgtacaaaggcgttgtgactattattatgggaagaagtctctggggaaattccaaacccttggctcttggcaccagcaacacaaacacctcacagcccagccctcctgtccctgggatgggggtgtgagaacactgaggccattgtgtcacccgaggccacatgtggttggcctcatcctatttccaacacgtgggctgggtttcaacgtggaacgaatggctgcatggccctgggtccataggaagcctgccatggtcacacaacagctgcctagtcctatggaagccagactgtgattgaaggaacacagggagtgctgggggcagggccggggccggggaggaagtgggaggaggaaaaaggaagtgtctccgctggttcgaggcagaattttgaaacaggcacagtttctttctgaacatccttttgctctgagcttccccctgtttgaaactccttggtcgtgtggccctccacccctcactgggggccaccacctggctcccgtcactgtcagtgccttcctgtcttctcccctctggtgtttggagggttagctagaaggggtggaatgagtcctggccacctcatcatcctaaaggtgcccgcattttaaaagcaagactcaaaatgattacaaatgaaaatgaaattcctggggtttcaggcaaggtggaataaggcagtgaaaagcttttgtattggagccagcctccaagatgggcctcgaccatcctacctccaggtgttcatgctcatgtgtggtcccctcccatatggaaccattcagggctgacctgtgtcaccaataggataccgtggaagcgacagtgtgtgacttccaaagctaggtcattagagaccctcctggttctcttggaccaccccctctagagaaagccaactgccatgtcgtggggacattcagggtatcctgtggggatgccagcgagcaagttggttgctatgtgagggagcccccgtccaactttcagatgacagcagccctggctgacatcctgaccacaacctcctgagagacgctgagccagaaagacccagccacactgctccccacttcctgacacatagaaaccgtgtgaatggtcagtgtaaatggtaattagtgatgcagcttcagataactgaaatgactagtaatggtccaaagctttcttggaggggaggcccagtgctggtctctccttgggtcagctccccaggctctggccatagctgccttcgttttgccccttctgaagctccacttttctctgatcgttccatatttgttcatggtattttctctctctttccttcctaggttggagaggagaggagcttcatgcaaagtttaggtctattgatgataaattagggcatattgaggatgagtttggatatatagatttttagtaaatgggcaacggtctgtatttcatgaaaatgtatatcctgtgtatctctttatagcctggaggcttcagtaaaatattccccaaatgccagtggggtttggctgtctgggcgttactttgggcattcggcctttgcagatgcgggatgtcatttttgatgcgagcagcccccttttcctccagcaccagggaaacacgccacagcctgtaatgcaatgtggagcccgtgtcctctgcccgctgcacaggggatttgccaactccagcgcctttgctttgtcagggctttcagacttctgacctcaattatttcagtgggaggtcatttttgcaagagaggatgcaatgggtgtttgaaaagagaaagtatttcacgggcacttcaaagaagtgttgcaagcatgccaatgaaaaacctcacttttgtaaagtgaagcagtgagatttaactccagctgatggcttgtttgggttgcctttggtcaacttttaattgaaatccatgtgcagaaaagtgcacaaaaggtaagcgtgcagcttgatgaattgtcacaaggtgaacacacctgggtaacagtgcccagatccagaaatggaacatgaccagttcccagaagccaccctcatgtccccttccaagggtaactgctatcctgaataacgccactggttccttctgcttgtttggaactttatagggatggaatctcggatccctttgtgtctgcttttctttgtgtctttcttttacttgacattaggcttgtgagcttcattcttattatgggatggagtggtacctctttcctcctcatagccctgtatagcctaatagctttctttgtatgtaaagtgtctcttttctgtcactgcttttaagagatcttctttttcacttgtttaacagttcgattatgctatgccttggtgtagttttcttcatttttttgtgtgtgcttggggtttgttgagcttcttctatctataggattatatagtctaatagtttaaatctttgtgtaaacaagatttcctatattgaatgttctggtcagtgtatctacatttatttccgagaaacttcttgagagagcttaaagggatttttaaggcagtttccctctcaagctgtcacctcctccacttggataaaaacagtgaaggatttgtcttgttgggctgataagaaaccgtcagcttgtggtgcttttagcctctgttatgggtccagagtccactccctcaggctccattgattctgtgtcgaatgcctgtggctggatatcaggaggacacctgtttttgtcagcccaactcttttcatgagtgaaaagtaacaagggaaacaagatgaattcagaaaaacaaacaaacaaacaaacaaaaccagtaaggaaaggcaaggtatgcccctcagacaggcattgctacaaattattatcatgtctttaaaaaaatattttctgtttttctttttaaaattttttaattttgctacaaattataaaactggtgggtgatggtggacgtttcaaaaccactcacgtgtgacatggcagtgacttcaggctggcctacatagccttttgttctctgtacatgtacagataaaaatctttcttgattctttttttttctttttcttttcttttctttttttttttttttgagatagagtctcgctctgttgtccaggctggagtgcagtggtgttatcttggctcactgcaagctccgcctcctggattcaagcgattctcctgcctcagcctcctaagtagctgggattacaggcatgcaccaccatgcctggctagttttgtatttttagtagagatggggtttcaccatgttggccaggctggtcttgaactcctgacctcaggtggtccacctgcctcggcctcccaaagtgctgggattacaggcatgagccaccacacccgccctcttatcttgattcttgagcatgtctgtgcagtgatgtccaaagcattcaatagctgactacttgatagggttttatatctattgatggatatagtattaataacactccctgtagaatagaggtagtatgtgtgcctggctaagctttttgtggcttagtggacactatttctatatagcaacattcagcaaacacttcattttatgcaggtccggatagtaaatagagatgagtaacataagcctttgccctcaaggagctcacagccaaatatgggaggaagcatgtttgtaaataatcacttgaacaaaatgcagtttctaaataagattgatgttaaaaatattaatataaacaatattaaaattttagtgattaaaacacaatggcaaggatgcaggtcatgaaatgagtggaaaataggaagggaacaaaaggttatactaggccagtggctcttaatgtgcgcccttggatcagctgcagcagcctcccttggaagcttgttagaaatgcagattccccggccccatccaagccttgccggatctgaagctctgagggtgggacctgacagtctgggtttccccagccctcctggtaatgctgatgcacgttcaagctgaagaaccactggtttagacggtgataagccaccagggttctgtcgggaagcctaggacaggccattttagtgcccacgttgtcccctaattgccagaagcctcagcacagcttggacccttttgttaggggactgatgtatgtcggcaatcaataaagtatattagggagtttttctgaattttttttgagacagcgtctcgctgtgtcacccaggctggagtgcagtggcgcgatctccgctcactgcaacctccgcctcccgggttcatgagattctcttgcgtcagcctccagagtagctgctgggattacaggtgcccaccaccatgcttggctaatttttgtatttttagtagagacggagttttaccatgttggtcaggctggtctcgagctcctgacctcaggtgatccacccacctcggcctctcaaagtgctggggttacaggtgtgagccaccgcgtccggctctgaattcttaaatgaagggaaagttttactttgcccaactagtacagcttactactttatttcttttatggattgtgtttttgatgtcatttctaataactgtttgcctagccctaggttttgctcatttgtgtaggagaggtaaagatcactcacatgggtttacacaggcaagggcataactggctgaagaaatataaaatgccatgtgatgctgccttcgtttgggtccttgcagaagtggaacttgaaattaggtttctggtgcaagttgatttgggaggggagtggggaagtgagaccaggaaaggaaggcagccattagggccgggctgttaatgtcacgcaatgggcgactggagcttaattccacactttggaaactctaggaaatggtgctcgctgtgtcatgggcccccaagatcacctctgggtctggtgatttcctaggagggctcataaaacttgacacatggcatatgcatggctatgatttagtaaagcaagaggacacagagaaaaatcaacaaagggaaaaggcttatggggtgaagtctggagaaaagcaggcacgtgcttccaagagtcctctcccagtggggtcacacagaacatgcctactcctgcccatggtgagttgagacaacatgtgtgaaatgtccaccagggaaggtccttagagactcagcgcctgggatttgtattgggggctgctcacataggcaccctctgcctagcacacatcaaaattccagactcccagagagaaagcaggcattcagcatagatcacagtatttggacaaagagtttaggcacagtgagccactcttaccagctctgggaatggtgggaaccctcccaaaatacaaattcccagatgccagccaagggccaaccttgcaaacaggcctttctaaggagagcagtctcaggtctgctatattacgtgttttctgcacaggtacaaagcacatgccttgaaataatctcattcaagggacaagggagtaggacatttgaagatgtctggttttctccagactttgccccgcaagccttttccctcgggagtcagttcttgagagtcatcgattaatacctattcccaataatgcacttcaggcatgccatgtaagcagagccaccttctgtgggtctcaaaacaatgacagtgaccttagactaagcgatatggttggaaattagctagagcttactggaaggttttgagtgatatgagtggggcgctggcagcatcagatacagtagttattctagaaattggatggggacaacagagccatgtgtatagggtagttcgcatgcctggggtcgtgtggcagtattgtaactgtgaatgaagagaccgaggtcaaggcttcgctctaacctccttaggtagatgcttccttcctgtgtctgctcattggaggaatgggaaagtgtgtgtgtttgtgtgtgtgtgtgtatgtgagagagagagagagggcatgcgtgtgtgtgtgtgtgtgagcattgtgggggcagaaaatcctggtacactagctgtattttaaacttccacttctaatctttcagttctgagcagcgtgaataggcagataaacaaatgtttgctatagcctcaaacattcatgccagaacatttttttccctccttccacacaagtaaattaagagaacagcggtctgttgtataatttgaagatggctattaatttgtgttggattgcatttcttaagcatgttatgttattcgaggagcaggagaccctggaggaggcgcttgtggggaagctttgaagctggagcaggaaggagtgaaatgacacagtctgatgacgatcacggtaatgcaggccttgcagcctggcgacattcttcaaaggcaactaactgcaagactgccctcttcccctcccctctcagacatctccaagaccctgccaaccgccagatgaaaccaatcttcctagagcctcgtgtggtggtctcaggcatcgcttgggagtgccttagaaattcggcgtctcaaatgcagtcttgggccacaccccagctctccaggatcagaatctgccgtttaataagaccctaagggatgcatggctcatccaagtcggagtcagatctcacccgaggccgcacattggcagcacctggggagcttttaaaaatgctgatgcctgggcgctgcctcagggaccccggtttaatgactctgggcggggcctgctccttgggctttctgaatgctcccacgtggttcggctgcgcaccccgggctgggaaccgtggggttccctggcagtacccttctggaattctccttccccagcctcccagtcacgtgactgcttaatctcctccctctgtggctctttctctgtcctctgctcctggctccccgatttctgaaggcagcccggtctcttttctttctttgttacctcctggccattctccaaagtgcctctgcgggggcgggagcttgtgagaaattcgagcctcagccatgccccagacctgctgaatcagcacctgcagtttaaccagaagcccaggggatgcgcatgtgcattgtcatatgagaagcgctggtctaggtgacgtaagctgggaaagaaacccagggaatctgctggaatgtagggagcctgggctcaggaactggaaggcgtctgtctgggtctctggcttgtttgttttctagctgtctcaacttgccactgtggtcatttggggctagatcactcttctctgtgcgggtcgtcctgtgcatttaggacgctgggcagcatctctggcttttacccacatcatgccatagcaatccccctccccagaggtgataaccaagaatgtctccaggcattgtcaagcatcccctgggggcagaatggtctctaggggacactttggtgtctgcctctggcctcattccctcccgccatacacccttggtagggttggtggttccaagttagccactaccgtggaaagagagacttcctttctccccctcgtccatgtgtgcggccctgcatgggtcccacgctcatccccatagccggtcattgtgcctggtggtcggggcactgtcattggccagattgggttctgtgccacatctggggccaggggccagctttgttagcaattgaaggagactgggagagttctgatggaggcacaaatggctattttggaccactctagcagccctttacggacccaagtcctccgctgacccttcacccaataacaagctcatttagcaaatatctgttatgtggcaacgaacagctgggccctgttccagggcgggcattttataaacagtcttcaggaccatcctaggaggtggtcttgttagcccatattgcaggtgagcagactgcagctcagcagggctggtgacacccatggcaacctgcggagcccagttgctccctaattccccccaccctgtgccctgctgtcagccctacctttctgtcacccccttgagctcttcctcccctccaggctgccctacactgccatatagctggacgaattgtaaaaggaacactgtgtcatcatgcctctgctcaagtcaggaaagactgttgctgctgtcatcttttgtcccctccccagtcccctcacctccctgcccctcagaatactctcctgacttctattgtgtttacgtctctacttttcattgtagatttaccaaagaattctggttcctgagctttgttaatttacttctgcccgtttttgaacatgatgtaaacgggatcacacagagtgtttggatgcatccggattcttttgctctgtattctgtgtttactcattgcaagcatactttgggaagtgcttgagtcaaagggtgggtagatgagaagccactgaaggtgacagaggaatggccgtgggtcagagagggaattaccttggcattacttgggcagagctggagtggtgggctacgcagttaggaggttgcggtgacctgggtaggagctccagcttagggtctgaaggccgtggggaggatggcaggtgaggcgtggtaggtttgggagggttgtcctgccttctctttctgacgaggtaggagttacaggttggaggagatggaaaaagggggaagcattcctcatacaggcttgttggaccagcaggagctgaaccagcagtcgtcttgggttgcagtgaagccccctctgagactaggggctcccagcaccaaggaactggcagccagcagccagcagccactgaggccagcacctctcgtaatccacaaggttggaagaaaagcagctcggtaaaggctgcttgtgatgagtcactggggctcctggaaaatctgtaagaaatgaagcttttgagatgtttatttttagctgccgtctgaccatggcctgtctctgaacttgatgttcttgggccctctcctctggctgtgtgttctagaatttctgttgtgtcctatgcttttcatggtgtcatgtgaacactacaggtaactgtgatgatcttgaacactttgttagcgctatggtatgatcatatttttattcatgagccgaggcacccggaatcttgaagcattcggatcactaattacttggagaaacttttctgattgtaggatctcacagaaacctctctctctctctctcccaccctctctctctctttctctctctctctccctccctccctctctctctctctccccctccctccctctccctctctctctctctctctctctctctgtgtgtgtgtgtatgtgtgtaataggaactcatctttattttcccaaagctttaaggttgaaatgttgatggtgacatcctttagttgcattgttgggtttctggaaactcattccttcccttaaataatcctaaggggaatgactgtggccacttgtctttatattatacttgtccccgtgggtcacgattatttgtttgctgggttttgttgggaggtgagggccgcaaatgtgctggtagctctggtgccttggacagtggcctggcaggtagcagatgcccaataaacacccatggtgtaaagcaggggccggcaaagcacagcctgcaggccagatccagcctgttcctgtttttgtaaataaagtgttgtcagcaggcagccacatcccttcatttccatattgtccgtggctgctctgctgtacaatggcacagtccagtaatcgcaatggagactatatggcatatggcccgcgaagctgaaaagatttcccacctggacctttctcagaaacatttgcaaactcctatcagttaagttactacgaggaaacaggaaggagcaaggggcaggaacagcttgtgggagaggctcatgagagccggaggtggttttagtagcagtttctaccctgcccacgctggcaggggaccctgccgggacttgcctctagggtggccttccttgcttgttggagactcttaatcttttaatctgagttatgactttccgttccatctgtccaagtcatctggggattagctaatagagcaagttggcaaataatctgacatggtctgatttgggaggggaatactggcataaacattggcaggtactgtggcacctggccactgctgggcagaggacagagggaacaggtggaagggcttcaaccacagcgttttatggacggtgtaaatactgatggcagcacaaagtgtaatggctccagatgggaaatcacccaagtgtcacccgcagtagaatggataactacattggggctgattcctcagtcaaatactgtgaaacaggagtcggccaagttcgtgatcctgtgggccaactccagctcactgcctgctttcgtacagcttatgagctaagaatggtttttgcatttttatatggttgagaaaaaaccaaaagaataatattttgccacacatgaagatgatatggaattcatatttcagtgtccgcgaataaagttttattgaaacacagcaccaggcattgatgtgtctatggtctctggctgctttgcaatgacagcggtggagctgagtcgtctagacagagactgcatggcccagaaatcttcaaatatttactctctggcccttcacagaaaaagtttggtggcccctgttacagtgcaaagagaatgaacagatagttacactgaacaacatgggtagatcttgcaacataatatagaatgaaagaagctggaaacaagatttcatttctttaaagttcagaagcaggcaacagtaatctatagtgtgagggttgggatagtggttaccctttggggtgggtcagggactagcgggggcttgaagtggtgtctaggggctggtcatgtttcgtcccatgatctgagcactccatacatgggtgagttccctttgtgaaaatgtgtggagctgttcatctatgatttttgcattttacgaatacatgtttacttcaataaaaagcttactcaagaaaagtgatttcagtctggcagctcctcagaaggttaaacagagttcccatctgacccagcaatccactcctgggcatatacccaagagaaatgaaaacatatgtccatgcaaagacttgtacacagatgttcctaacagccttattcataatagcccaaaagtagaaacaacccaaatggccgtcagctgatgagtggataaacaaaatgtgatacagccacacaatggaatcttattcagcaataaataaaaaggggtgaagcactgatacgcaccacagcctggatgacccttgaaagcattatgctaggtggaagaagccagatgcaagaggccacatactgcatgattccacttactgcatgattccacttatacgaaatgtccagaataggcaaacgcataggatggaaagtatattagtggctgcctaggctgggagaaggaagtgattgctaatgggtagggggtcatttttaggggggtgaaaatgttctggaattggatagtggtgatgattggacagccttgtgaatttcctgtaaaccactgaattgtacactttaaaagagtacatcttatggtatgtgaattacctctttaaaaatgctgtaagagattgctgctacagacctgtgtgtatctgtacaagtcagaaggaaaaggtctcaaggtgacagccacctcatccattcttcctgctactcctccaaatgcagatatcttgaaagttgacaggcagggggaatgcctgacttcccccaggtaatccagactcttcctctagatccaagccagttgagtagcacagagcagtttctagaatgtagctaacatgggcatgttaattttgctacttttgtttactaaaactgcagttctcagaaaaacaggataaactaaaagatcctagataacttgcttcctggacttttcctgtgattatgcctgacttcgcccccattttcctgatgtctgttttcctttggtctgattggagaggaatgggaatctatgtagtagccactggggcccattcccatagctgagcctgggctgtcggctccttgctggttcctccaagacttcattgcttcacagccaatgaaatggagcagtaaaaaaacaaacaaaaaacaacaaaaacaaaacaaaaaacaaaacaaaaacattaaaaaagacttcactgcttacctgtaggttgctttttatatatagttctcaatctcttctgaattaaacttcttggtccccacttctagatgttaagggccataatggttgcaaatattgtgataacttttgagaggatcccttttgagggtgcgagatgactacccagaggatctgaaggttttcattttgctgacactgaagagtgtatttcttaggattttctgctctgtaatgacagataatcacagctggcagtgaagatagcgctgaactttctgtaaagtcccagccctaaacattatctgtggcagagacaaacagttttaattaatgacaaaaggtttgcttgtccctgcgagggtgaaaggggccggtgctgtttcattccctgtgccatgtactgggctgaaggggcaggggagggagcatcccagggtcctggcttttgagagaggggcagagagggtcagctgtggtcacacacccatacttgggagtcgtacaagtctcttggttagtggtcttgccactttgaatagaggtatttcagatttgaaagaaaacagtctaaacagtctcctcaaagtaaatgctttgaggagtttttaggaaaagctatttcgaatgtcaggcatagattcatgttttaatggcctcactgattcttggtaagtggaatcccccagaaggtcccccagaagctcagttggaccaccacaatctccctgaacagaactggagtccatcaggtcccctctatcagttacagaaagcagaggagtgagcagatcaacctcagaaacaaggcgacatgcagggggataaggaaggggtgttttcatgaaacatgattttcattttaacaaacatttatgaagcgctaaccacatgccaggcacaaattgctttacaaatgtcagctcattccgtcttcttcacagcaccctgaggcaggtagtgctgcaattcctacttcatagatgggggagactgaggcacagtaagaaaggtccaacaacttgcttaaggtcacacgggtggtaagtggcagagctgagatctgaactcatgcagcgctgttctggagtctgtgttttaaccagtatgcgtgtgatgctgcctctcttgtgatgaacatcagaatatagagggacaaagtacaatattgaagatccaaatatctcatactgccaatttgttttaaaatacaactacgaagaaaacataccaacaggttatgggagttatcaagggcatgatgatgggtaatccttattttttttcttgatagttttctgtatttgtcaagaagttttgtaagttgggtggttggttgtgtgttttaaaaaaatagccacaataatatctctgacttcggaatgctcatctagaactttgccatttcctcatcaagaggtagagtctactttctctctccttgaacctgggtgggattttgtgactgcctcaatgaacagcaagtggcaaaagggacggtatctgacttctgaggctgagccacgcaaggtgatacagcttctgccgggtctctctctcttaacacacttgctttggggcccagagcctctgggtaggatatactgccacctggccgggcgcagtggctcacgcctgtaatcccagcactttgggatgccgaggtgggcggatcacctgaggtcgggagtttgaaaccagcctgaccaacatggagaaacaccatctctactaaaaatacaaaattagctgggcgtggtggtgcatgcctgtaatcccagctacttgggaggctgaggcaggagaatagcttgaacccaggaggcggaggttgcggtgagctgatattgcgccattgcactccagcctgggcaacaagagtgaaactccatctcaaaaaaaaaaaaaaaaaaaaaaaaaaagaaagaaagaaaagaaaagaaatactgccacccaaagtcacatgctgaagagaccacatggggatgccacatggaaagagagagaggcctgggaaccccagctgttctagtctccagctgttgagtctcttggcccaggcaccagatgtgtgagtgaacaagccttcggatgatgccagctccagcccctgtctgaccaagaccttgtgaaagaccctgggtgaggatggtcttgctgagtccaatgagaccccagtaccaggatagataaagatatgatgggctgcgtgcagtggctcacacctgtaatcccagcattttgggaggctgaggtaggaggattgtttgagcccaggagtttgagaccagcctgggcaacatagtgagaccccatctctacagataataaaaaaaaattagccagtgtggtggcatgcatctgtggtcccatcttctcaagaggctgaggcaggaggatcgcttgagtctgggaggttgaggctgtgttgagctgtgattgtgccactgcactctactgtgggtgacagagtgagaccctgaaaaaaaaaagaaagaaaagaaagaaaaagaaaagaaagaaaaagaaagaatcctttggaatggctaaagaagatgccccaactgtgtctggggaaattaatgcaagttccacagatagggtgaaacagaacagggttctgcagtgtgaataggagctttcaaggcagaggagaaggttcaaggtagaagagaaaagcacattcaaagatacgggtttctacctgacatttttggtcaaacatggataaccatgattcacctagggtagcatttttatattcagccaagccttgattctacttagaatctgtccttctagatcttgatctaggtgatttcctgctttctttcatcttctagaacctgttatgttattgctaatacccaaccataaaaagtccaggtttccttcgagtgttacagatccctgttctgagagcgagctgacccattcagagtcacttttaacatcagagctgtaaatgacatcattaatactattgtattaatacatgcttgtcttcgttgggtcctgggtgaagtgagttttactggacaggatctgctgttgaagaacttgagcctgattccttggggtcttcatgcttggagaccaaacctactgatacttttttgccttgaggcattggttgcaagatataggtgtcctgcattccttccacagttcctttggaggcaaataatggttgtgtaggagagatgttctcttgtcaggcaggatacttccagcctgaactgaggcaaattccactccaccctctcactattggtactgtcatgtatggctgctccagtcctccccagagttggtctgcattgctccagctaacttgacctgtcttccttccttcagagctcaagttcattctacctattaacccataattatcatgctgctgaataacaactccttcaaaggactcagtggcttaaaacaacaaccattcattattttcacaagtctacaggttggctgcatggttggatggggccaaagttggctgatcttggctggactcacacataaatctgtggtcggctggacctagatgattttttccccctttgagatggagtctcgctctgtcgcgcatgctggagtgcggtggcgcaatcttggctcactgcaacttccacctcccaggttcaagtgattctcctgcctcagcctcctgagtagctgggactacaggtgcctgccaccacacctggctaatttttgtatttttagtggagacggggtttcaccatgttggccaagctggtcttgaactcctgacctcaggtgatccacccgcctcggcctcccaaagtgctgggattacaggcgtgagccatcgggcctggcccctagatgatcttttaatcccaacctcacaatagacaccaacacctccttctgggtccccagggaagtcctctgaggctctgcagatcagagcctgtttattttcctcaggaccactgcatgttccgtcaaagtttaaagatatgattgctctctacagtgattttttgtttcaagcattattgcctgaagtagttgtttgactagagatgtagttaaattttaggtggtatcaactccttttgaatagactgtccaagtctctgcgattctatctgctggttgggtttttctgacaagggctctcttggagggtcaacagcctgtcgtcttgtttttcccatcagagattttctttcccacatatattaagaggttattttcatgttgtttttgtatacatgagaatgaaatctttgctttctaattttactctcttcctcatatcattggttgctactgacttctgcgatgtgattcttccctgggcactcatcagggggtattattttcaacttggcatggctcaaacctcaaacttttaaagttttaaagcagccgagttgcactgatgatcaataaatcaatcactgtgaccactttattgcttgtaaggtgattaccctactttgcccatagtgactcttcaatttgattaaaatgcagtttcattgggtcgtggttgagtcctctagatatataaatacatgagagaagcctgcactcaaatgtttttataaccacccttcagatttttaaccatctatgccagcacttttgtggtcctcatcctataattcaaatttccatgctctttgccaaagtaattcttatttatgcatattccaacctcttgtctctgtaagactgtattcttttttctgctaactggtggtgagccttggtcccactgcaaagcattttctacagctgaaatgagctcctgtgcaatctgtaaatcaggctctgatggtgggagaatatgggagatggtgttggttcactcgcgattgttttccaggtgaggagagctggaatagtgggagtagaattattatcttggataggaaaggaagacacattcaactgtgctactgccctggcagcaggagcccttttgactgcattttaagacattaaaaatgagcatctgtcctggagctccttgcccagggcagcgtgccaccagcttctcatggctcttggctcgcggcaggttgtcccacctcccttgtccagctccagggtggccccactcacatagagggctcctgccatctgcagattgcctgggctcccaccaactcattaaagtcttgccagcattttcactgtgccattggagtacattttgaatatccatgatgacaatcacataggctgcctgcctgagtggtccactttgtctcccataggaaccaattattgctttgattaccattattttcatttaaaccctatttgcccctccagccctgtcatttggacaccttgcttttgcagaatgtgaggttttccaggaatgtatataattaattaatcctcatttgcagattccatatttgcaaatttgcctactggctaaaatgttatgtgtagccccccagatcaatactcgtggagctttcgaggttgttcatagatacgtgtgtgtgtagagcgacaaaaagtgccagcagtgcccgttccttgctgaggtctgagaaggcgatgctctgccttcctgcttccactctcctcctgtcaacaagggtccttttcgtgttctatttagtgccatgtttttcacagttttgtgctttttttgttggtaattttgctgtttaaaatggccctgcaatgcagtgctgggaagctgtctggtgttcctgagtgtaggagggctgtgacatgttttatggagaagccttgttcaggcatgagtgatagtgctgctggctgtgaggtcaatgttaataactcaacaatatctattagagtgtctttaaacagaagtatataaacaaggtacatcttgattgtttgatgaaaatgtgaccaaagattttgcaggaacttaaccctgtattctcttgggaacagtagttcagtattcagtaattcagtgtttgaggtgactttatagagcataacctccacgaataatgataattgactgtgtatatatttcattacagcacagatgcctatgctgaaataatttttcttatataagaaaatagggcacatggactattcttcttgcatggccatggcatgtcctgctcatgtctttaacgaccggttttcttgcccaggtgtaattagcatggtcaatgcgggagcgatgagtggctctggaaacctgatggatttcctcgatgagccgttccctgatgtggggacgtatgaggacttccacaccatcgactggctaagggaaaagtcacgggacaccgacagacacaggaaggtaggtggcattccgaaaggacacactgcaaatggctaagccatgttttcattcaaaagttactgagctggggcttaggtccacgtacgtgtcatgtgctgggttagggtctaaagaagaaaagagccagtgggaggagcagatatattggcagatcattgtactagcaggagctttgggcaggacgttgtgtcatatggagggattgtggtgtggaggagagggaggggactttgcaggtgccatttctggaacctgttttctcatccatgaggatggaagtgattatgcctgaaaaggaaatgagattatgtgtatatgaaagcacatatgacagtgcctggtgtctagttggcaatcagtatatattttaatggaccacaatggttatctgtcaagtgctgtgggatcatttaggttcggttagggaagggtttttcagcaagggtaacatttcagttgggtcttgaaagatgactaagattttgctaggcagaggaacggtgaggattctaaacatcaggaatgccccccttttttaagtcacagaggcatgaaagaatctgatgtatctgggcaattcagggagctccgaggatctggtggaggattcctgcagagggagggatagggatgagtgtggaaatggaggcagcagggccacgtggggaacggccatgctggcggtggagaggagtttgcatttcatgctgaaagccacagaagacaataaagatgcgctgcaaagggagaaacaggaagcttggaaatgagtccaggagaccgaaggcagtgatgtgtaggtggagagaggggatcaggatggagaggtattttgaggcgccacggacgggattcaggggaggtgctggggccaggaggggaatggggtcacagaacaccaggctttggcctgatgaggatgatgcctttgatgcctagaggaagcaaggggggactggcagactgcggaggaggccattgagttctgtgtagatgcgttggtttgagctgcgctgcggatgggtgatcacaggtggcgagaactctgtggttcaagggtgagggaagggccggggggagaatgaggtccctgtgtgcaagtggaggctgaagctttagaaacagccacggtggcgtgggtgtgcagagacagaagggaagaggtagtcaaatccccaggcagtgcccagagttaccaggtccaggggaggcagatggggagcctgtgacaagaggggaccctgccaagagcagtcccctgtgaatggaaagggtgttgtgtaggggcctgctcacaaggtcaccctctatggagaggtcaggtaggaggcgagccagcggcatgggggctggcggtgaggggagagctgcttcagacgagggtgaggagtgacatggacagtgtgaccatgtcacatcgcctcacgagggctggcacgaaaggaggaggggaatgtgtagggagccaggctcagtcatgaagatgttgcagcctcttggctctgcagtgcaggaatgtggggtcgaggcagcattccctctagagcacagctcagcagactgcatcctgcgggccaaagccagctggcaccttgttttagaaataaagttttattggaactcagccatgcccatccatttccatatttttatgactccttttgtgctacagtggcagggttgaggagttgcaacggagaccatccggcccgcaaagcccaaaatatttactctctggtcctttacagaaaacatttgcccaccactgctctaaaaggccgtgagggaatgatgatctcagaggagcataggattctgttagcacagggaggtgtgtgtaggtagtccatctgctgtgggagacgtgatctgtgccagctaattctaagttcgtgctgctaaaatttaaccttgaaaacaaaaggaggagatgaagtctgtgtgaagaggctttttaatgaaacttagcaatgtaagttaagatagtaactcatattcagaatggagacaccgaaccaatgtcccccttcagcatagcttttaaatcatcaaagatcaaatcacatttagtatgttttttaattaagtgaattatttgagtgtgtgctcgaattctttggagacttttgtggcatctttatagctctgtgaactagaaagctcgtcgtaccgttgcggcacataactgaaagaatcacatcagtgggaatttagctgcttgatgacattcattttattttcttaattaccctgtttcccgaggaaacagtttcaaggaaaaaagcatgaattcgaaaatgcattcggatcagttgctgtatctgctttgttctagatcaccagcaagagcaaggagtccatatgggagttcatcaagagcctgctggatgcctggtcgggatgggtggtgatgctgctcatcggcctgctggcgggtacgtggatgggcatgcggcactcccgtgggaagctgcagaggccgaaacctcaaaacacgaaccctctgggagatttggaatatagcgcgtgtcgcttgtcgcttttacccctgtgggagggatttattacttgaaatatctaagggcaaaatgcatggctgtatatttaacctaaaatccatcatcaataaggcatgcccaaggcatgagctcaggcacaggcttctgaagagctgtgacgatagagctggtagcctttccacacagagcagagttttcttactataccggatttgactgaaaacacacattttttttggaaacggtcttgttccattgcccaggctggagggcagtggaatgatgccagttcactgcagcctccacctcccggggttgaacaatcctcccacctcagcctcctgagtagccaggaccacaggcatgcgccaccatgctcagctaatttttgttattttttcatagagatggggtctcactgtgttgctcaggctggtctcaaactcctgggctcaagccatcctcctgcctcagccaaagtgttgggattacaggtgtgagccactgagcccagccaagcacacattttatattcggttattcttgattatgtagatgacaacaaaatcagggactgttttatcttcaataacaaaatgtcatatgagattgccttttgctactactggtaggctctgggatgaactggaaacatcctgcaacagtcagcaccatgctagacacccacgggagctgaggcaggcccaggggcctccatcatcctgaccctcaggaactctgcatctttcctttttagaatcccaacaccgtgtttgcgagcagtagatgtttccagagtaaatggatgctatctggaggggaaacacgtctttttaatatcaaacgcaccagcccttccgggaaatagtttcctgaaacttatgtccttttaggagattgtgaaggttaatgtctaagaataaaaaatttggcatgacgaagaggtttccttaataaaaatcccctgcatataacaacataatagttatggttagagaacagatcagggaattgactagaacacaggcagaatatatgtagtaagtggtctaagaaggacagaacacaaatggggcacagatagagttttgtgattccaggggctttcagtttccaggtgatcttgatttattccctagctcatcggaggaggggcttggttgccagggaagggctctacctccctcacctgcctcagcattccgtaaagagctaagaggaatgctcagagggggagttctttcctactagtcacagatgctgtctgtccgtttctccaagcctgtccttcctttaccagtggcatttcccgtcatgtactggcagcagccagggcaggaaattagacttcattgtcacaagggattggacgaccaattttgcttgactgcttctataaaggcctttgaaggtgggccaggtgggagtttgctatgaattttgatgtccttatttagagtagattgataaaaccttatagtgtgtcatttttcttggctcgtaggaaggagaaataaatagggtaaatgaagaaactcagaacaggaatagatgttctgataacggcacagcttagattcattgactgacctaggagcccaactgggctgactttaatctgattttgaccagctggctttattatccacttgatttccatcagctctttcacgagggggaattaaaaacaatatgctgctgccctggcttcacttaaacagtatctctggagaggacctctagcttgaatacagcctgcccctcccctctgtgattgtaatgtgcagccaggggtgagcaccactggccaaaggagagcccatgcgcacgtcagcaggggaatacatgggagggtgagaatggggtgatgctgaaaatgaagggactacagtgttcttttgatttggatgcactttgaagggacagccagagagccacgtcccactcacttcccccttcctcgctggactaacagtggagaggacctggggtctcactgcctggccggctgtcccctcagtggctgttgtcttcggactcccctcatgggtaggcccacagcatctccgcatgtgcttatcagaagtcaccgctaggtgtcactgttggaccacgaaagaaagctgaggcctgctgaagcgcagtcagaaccagaatcagcaaggaagattgggtgtgcagtaggggggttgtgaatgaatgaataatgatgaaacttggggtgatcatcctgtttgcccctggatatctgcaggaccctcccatcttcttcaccttcttcttcaaatactgcacgatgtcacttatctgtggagtccaaaaaaataaaaccagtgtcatagaaacagagtagaaaggtggctgctagagggaggggtggggacaggatggggaaagagatgttgatcagagggcgtaagtttcagttagactggaggaataagctttagtgagcggtcgcactgcatggtgaccacaattaatgatcatgtattgtatatttcaaaattgctaaaagagtagactttaataatctcaccacaaaaataaactggggaggtgattcggttggtgcgaaggtaattgtggtttttgccattaaaataacggcatgatcggatctttaattagctcgatcaagtctttctataatgtatacatagatcaaaacatgacattgatatacacaattattatgtgtcagttttaaaaagttaaaaaatcaagataatgagctctttgcctttgtttttcctgtggaaaaacaaagaactgtggatagttctaaatttgacattaccggaccctgtggaaagacctcatgaaatactaaatattatggttcttgcgtgctgttgctagggggcagtgtttacttagctgactctgcaaactagcattaagcggaaccaagcttgcatccaggatttcatgatctagagaaaatactttgagcatgtaggatttcttttcactgggtttcagtttccaactttaaatcaggaaatagttttcaccattccacaaggtatatgtacttcaaaacatcatgttgtatatgattacaacatacaatcttatgtgtccattttaaaatgaaagaataaatcaggaaatagctaatgatatctctaacttaattagactaattatatatatttgtatatttggaatcaagtctttcattattgaattgcatgtttaaaaatttcaaacctgtctgatatttaaaatttaaaaaacaataaaattacatccctctctctgtaagcctcacctccctcacctgctctatggatgtatatatgtatgtatgtaaagctttattgaaatataactcacattccatataattcacccatttaaagtatacaattcagtggtttttaatgtatcacagagttgtacaaccatcaccgtggtcgattttagaataattttatcatgcccaaaagaatcattataccctgtagctatcaagcccctgctccccaaccatcccccttccagccctaggccactgttaacctgctttctgtctctatggatttgcctattctgggcatttcatataaatggaatcatacaatatgtggtctttgtgattaacttattctactcagcataatatgttcaaagtttgtccatgttgtagcacgtgtcagtacttcattccttttcactaccaagtacaattccattgtatggatagaccacacgttgtttatccacttatccattgatggatatttgagttctttctactttgtgactattttgaagaatgctgctatgaacatttttgttcaagtgtttgtgtgcatggatgttttcatttctcttgggtatatgcctaggaatagaattggtttttttgagacagggtctggttctggcgcgatcatggttcgttacagactgggcttgagcaatctgcctgcctcagcctcctgagtagctgggactataggcgcgtgccaccatatctggttaattttttttttttttttttttttttttttgtagagacaggatcttgtcatgctgttcaggctagtcctgaactcctggcctcaaacgatttgtccacctcggccttccaaagtgctgggactactggcataagccactgcgcctggcccttatactttttaacagagcctttaatatacttattttctcctgtcccaggtacagttacacaaaggcaggggcctgggtctactctttgcactgctgtattcccaagacatggatgagtaactgccgtgtagtaggtacatgttcagtaactatcccttgaatgaatgaatggacctgagttttctgattttttcattcatttatttattgcaatattttattcaacatggatatatagtgccaaccatgcacctgacatggatataacaatggacaagacagatagggtccttgcccacttagagtggacacagggtctggatgccaggcctgaccccccactgtggtatgaaaaccaaacaatgaaaccttttttacccaccacttatagactagtggaagtacacacacacacacacacacacacacacggagaaaaagagaaagagagctaattgtgatattaggatgcgagaggtgtggtgatggggaaggacaggcagccacaggaatgccagggaagtacacctaacccaggcttaggaaatcaggaaagacttcccagaggaggtgatataaatgctggaatctggatgataagtaggagtctgatgggaggggagggcagtgcttgctgagatggtgcaggtaggagagcgtggcacattccaggaacatggagtgggcagggtgtggggagttagtgagggaaagagatgaagctggagagatctgaggggccagctgtcagggtgggtgacctgttgaggatttgggtgttctcccaagaataatgggtaaccatggcagggctttccacaggggagtggcacaggtcagtctggcatttggaaagcctatttgaccacagtgtggagaggccatgaatggggcaggactgaggctggagaccagagaggaagctcctgcagcagtccagccagcaatgacttcaacacggtgatctgaaagacagcccgagtggggatgggggaaactgcagtgattcaagagagatttcagaggtggagctgctgggatatggggattgcctggaagggggttgctttcccagatttctagtttgcacagtagtgtgcctggatggtgggttcctctcccagttgggacgaagctgaggctgggaggaggatgctttagttcggtgtcggatggtggtggactgaagtggagatatctagtagacccaagaaggcaaatagacttgtgttctttgacaatgcccattcattggctttgactgcctggggctttgctacaaagatttgggagggtaggtccacaagtgtgtgtcatgattgattagtgatgtctgtcatgggcatgtcaaaagaattgtgaaggggaatccaatagagtgtgctattattgattggtgatgtctgctgtgggcatcggaagctgacggctgggctatgtagtgattggctctgtaatagccagtgggctctatgtgcttggaaaagcatagcttgagatgtacatttatacctaatggtaaatagtaggatatgaataaggttgccagggttgagagcatagtataaaaagagaaaagggtttagggtcaagctttgaggaaatggcctttagaagttgggtggaggagtcagaaagatcagaggagtcagagcaaaccagagagtgaggaggaaagcaggagagcatgatgtggaagccacgggaagaggtgtttctggaagggtggagtggtcaacagagtcagatgatgctgagagctctggaactggggtcagcaaactttttctgcaagaggccagagagtaaatattttcaggtttgtggcccatgtggtttctatctcagctcttcagttctgccactgtagcatgaaggcagccacagagtgcatgtaattgaatggtgtagctgtgctccaataaaactttatttacaaaaacaggctgtgggccagatttggcccatgggctgtagtttgtggatcctgttctagaggaatgagctaaggccattgccttagctgcatgggaatctcctggtagattgaggggatggactgggccaagggaaggaaagagattggatggtgactagagggaaagtggaaacagggagggttttttttttttaatgtttaaatgctgatggcaaggagaggaagaggttgaagatacaggagaaggaaaggggaatgggaagaacgaggccccatggaggaaggagatgtagagctgaggtgggcggtgtccgatgcaacaccaggagaagagaagggaggggtgagtgctgatgccaggtgtggatgcttttggtgaggatgtggatgcagaaccgatcctgtaataatgatgcagtgaaaaggctgaaaaatgaagatgcttgaaagcattctctgcctttgtgagagatgagaatgcattattctggaaagagacccaaggccgccttttgtgatccattcaactgcacattccgttttctcccatttctattggcttttaaaatacttatttagttttatagacccataattctttataatttaaataatgcagagagttttaataaacaggatcttcccgaatttggttctcatttggtggcaaaaccttactcatttatgatgtgaggccgtcgtagttgttatgagtccattttgtctgaattatcatgtttccctgagaaatattaatgtgtgtgattctaggatcctgccccagaagccattgagagagttctgtcttttacactataaatacccaatgtcaaaaacttggaaagggaaaaattgcaaaagttgcttgtctctcctacccagttcaagctactgaaccctttgtatttctcattgggcttgtgctgccttgcccataacataaatgttcaagtgctgcaagtttaatgaaagaagcttcctatgtaagtgacagccccattgcaagtttattgcctgctctggaatctgggccatcattgctgatgtgcccctgtctggccgccgtgttggtctcattcttgtcgcatcatggggcgattcctcttagtggctcgtgttacttcttccaggcaccttggctggggtcatcgatctcgccgtggactggatgacggacctgaaggagggggtctgcctgtctgccttctggtatagccatgagcagtgttgctggacttctaacgagaccacttttgaggacagagacaagtgtcccctgtggcagaaatggtcggagctgctggtgaatcagtcagaggtgggtatttgggcagggtcctggctggggacccctgccgttccatgcgtgcttgggaatgctgctgggagatttgtgaatgtctgtgatttcaccttcaagtgcctgctctgaagttcgtggcttaacactagatgacgggctttttccagctctaatgctaccactcaaacttcacttgcaaaacccttccccactgtttcatgtgcacaatgcatatatatatatatatacactttaagcctcatatttggctttatcttgttatatttggctttattttttcttaccgaaggtggtttgctgatcatgctgaagaaacaaggttgactttgatatcttctaattgagaagaacataactttttaagttatcctttaaaaaaaacagctttagtgagataaattcacagttcacattgttcacccgtttaaagtgtacgatttaatgcttgtagtatattcagttttgcagccgttaccacaatctaattttagaacattttcgtcatcctttccaaaactctgtctccattagcagtcactcccatgtcccccaacctgccagctctgagcaaccactaatctaccttttgtctctctagatttgcctcttctggatgtttcatgtaaatgaaatcatacaatgtgtggactttgtgtctggcttcttccacctagcatcatgtttccagacttcttcctattgtagcatgaaccattacttcatttttttatggccgaataatattctattgtatgaatggaccacattttatttatccatttgttggttgcttttgctttttggctatgatgaatgatgttgctatgaacatttctgtacaggtttttgtgaagacatatgtttcatttctctcaagtatatatctgggaatggagttgctgggtcagatggttactctatgtttaaccttttgagcagctgtcagactgttttccaaagtagctgtaccattttacattcccaccagcagtgtatgagacttccaatttgtccaccttcctgtcagcacttgttattatctgtttttgattatagccatcctagtggttatgaagtggcatctcattgtgctttcagtcatcttccattgcattttatgaccacattatagaggatgttctgggccttctataaagagaatgccctaggcacaggagataatagtggtgaaccacagacctatagcatttagagcttcagatctttattaaaatcttagttcaggaaagagttaacttctaacccatttcagtggttaccaccatgactatgagttattaaaggatcagaaagccacgtgaggaggaaccaggttgtcaagcttcacattaggggtaatgtgaggatctctcaagctagaactaatctttcaaggtatatgtaatctatttatacatctcctcccttccccactttttttttttttttttgcctgactgacttaccacagctgaagacatttggaatgcactttgccatttttgctaaacctctttctcagtggaattgaaaattaattccttcaaatctcagaaggagacagggatcttgaaatctcacatgttctcagtgctctccattacttccaaaaagaaattctctacttgggttgatgggagcgggcagacagaattggctgtgcgccatatttttattcttctctcctacttgcaatgtgtgttttggggaaatacagccatccatcttttcagctgtttttaagatttatactttgattcgaagaattacctttagtaagagtgagagttatttttagcctccaaaaaagtacatatttaagtgggtgaaaggtatttcttagtccgatttctcaccgcatagggtgtgaatatatgtgcttgtaaaggccagagcagtctcctggaacgtgtttttgcatttaataggcacacatgtggctgtccatggcctgacttgtaggtgacctctcttttctgccccctttacttaagtaatccagatggtggcaagaagctgaggtctagagagtgtggtctgtacccagcagaccaggcctttcacgcataggaccccagactgtgtttttggttcagaaaaccttctccatacatcagataatttggaataaatggttcaatgaattattctgaaagtgatcacgtttttcttctctgatagtgcctctcaaatgttagtgcgcatagaacctcctggagggcttgttaaaacatattgacctgggccccagccgggagtgtctggtgtctggttcagcagttctcgggtgaggcctgagagtctgcatgtctcataagccactgatgtggctggaccatggaccccaccctgagcagcagtattctaaaatacaggcccgacccgtattcattggcagtgcgggtgcttgctgtgcttgggcgtggccttaatgaaagctaagagagaccaagccaccacagacaagacaaaactaatctgccagggtctcggaggcaggattttctgcatcacacctttgattaactctatgcaagtggtgattaaaaccaagcatcatccacggtttccattactgctgagccttccctgtgtagaaggcgcgtgtaaacagctcccagagaaacacccgctgctctgtttgtgtgtactgactgtagcaatagcaacagctgataaacctacgctggccttttggtttatacaggactgggaccaaacctgcccaatcccgtcaaagcttttgttgtcaagacagatggggaggggttgagtctgttgctcaggtcagctgtggctaatgtttccttttgtgttttgtgtctgttgtctagggtgccagtgcttacattctgaattacttaatgtacatcctatgggcgctgctgtttgcatttttggctgtctccctggtgcgtgtatttgcaccatatgcctgtggctctggcataccagaggtgagttctggctgatttttttggtaccaataataagaatagcaaattcttctgtagcactgtcatgccaagcacagttccaagcgttttacttctactaactcattaagtttctcaataagactatgacgtaggtactattattctgcatttgatagttgacgaaactaaagcacagagaggttaagtgacttgccccaggtaaccaagctggtaagctgtgagttgaacccagtgttctgacttcaggatttacacactgtcttcaagatttctgtgctattgcttctcagatgataaaagccttgtctttgtaaaccaggcataactcttaaagcctgtggaatcagagttcattaaccacacacataaacacgctgtaataactcatcagtgcatctgtgatgtaatgtgagagacgatagtggaggtttgttgctgtgaaagttcactgatgatgaaatctctcttgccatgttttgctcttctggtggcaagctaatagcaatcttttaaaaacctgaattctgcctttaatacatgtactgtgaacgtacccccgtgaatttcgagttcttataaatagttttcagcactttcatgtaaccgaagcatgagggaagtgacctcaccgattaagaggagtgcctgagaccaaacttgaaacctatgaggacctactgggcagaatcatgataattgagctgattcccgaaaagcccagatggtggaaattttagccagaagtaattttaaaagttctggtattatcactgtaatccatgcagttcagttctcctttgggttgatgccttagcgatgcacacaggcagtgggctagagagtttgaagatgtagttgtgggctgagtatggcagtaaatccacaccctttgggaggaccctgcagccctgatggtggtccaggcagtttgcagaaagggctgaagtcatgaaaagacaatcagaggcaaaattcaacatggtcttgtttcaggaaagatagaaaaaagaagtcttaatatgtcatgctgaatttttgatggttgatgttaacatattgcttcaggaacctgaaaaataagctgtattaccaacctgttttctcagcgcagccagttctgctataatgcaacatacgcattcctaaaaatcaccatgccatgcaaaatcacacaacagaaaccacagggctttatggggaacatgaattaggggcacaatacacaaaacttcatcactgacacatatgacaaaaagaggaacctagtaaaaacaggagcacagctgtacacattaagtggctaagaaatatgtaaataccacaataaatatgtcacttcctgcaaagaacttgaagtttgcttgtggaagtgggtgtcgcaagggctgcaacttacgcgttgctgtgaagggcataaggaaggttatctgaagttgtaggggaagttgagacagcaggcgtagatgggtgtggcaccctggcatatgtgtgaaccggtagatgtttgactcgtgtattttgtgttttcctacatgactgggtgcaattttctgcatttacctggtatttctcctggaggaaatgcgcataaatagacataaaatttgagttatgctcaaattcctccctaacatgagtggcattggaacaaatttgcattttctttttttctttttccttttctttttctttctttcttttttttcttttttgagacagagtctcgctctgttgcccaggctggagtgcagtggcacaatctcggctcagtgcaacctccgtttcccaggttcaagcgattctcatgcctcagccccccaagtagctggggttgcggatgtgtaccaccatgcctggctaattttttttttggttttatttttaagtagagacggggtttcaccatgttggcctagcctcatgtgatccatccgcctcggcctcctaaagtgttgggattacaggcgtgagccgccacgcctggccttcttgtttttttattgttttatatagagacgaggtctcactctattgcccgggctggtctcaaattcctgggctcaagtgatcctcccgcctcagcctcctgtggagctgggactgcaggcacgtgccaccatgcccaactaatttttgtatttttttgtaggtttttgccatgttgcccaggctggtcttgaaatcctgggctcaagcaatcctcccgccttggcctcccaaagtgctaggattacaggagtgagccacagtgcttgaggcaaatttgcattttccaaccaagtgtcgtagcagagctgactgtattttatttgatgtctaaaacatctcagtttgtgatcccactgcccaacagtaggcatttttgactcaagcattttgcaaataaggagatggccgatggggaattggtggaaaatagaagcagtaagaggcacactgggtagtcccatctctcccttccaagaactgtagatgtgtggctcagctggtgtccttatagacagggagttcgaatatcagttctatctttgaagggctggctggactttgtcatcatctaaattgggcattttattggtgatagctgaactcagaaggagtaaaatactgagttgaggatttgtttcttttcttttctttttttgacaaggtctcactctgttgcccaggctggagtgcagtggcatgatcacagctcactgcagctttgaactcccagtttcaggcagtcctcctgcctcagcctcctgagtagctgagactataggtgtgcatcatcatacctggctaatttttgtactttttgtaaaggtgggctttcaccatgttgcccagactggtctctaactcctgggcttaagtgattcgcctgccttggcctcccaaagtgctgggattacaggtgtgagccactgtacctagctgagcatttgtttcttatgtgacaaaagtgcaagggatacatagacatggatgaaattaaaaaatgtgatgttaagtgaaaaagcaagttttacaaggagaaagtatgattgatagaacgtctataaacagctaaaatgaaaaaacgtatgtgctaaaactatagagaaaggggaagaaatggtaggaagtggtgaggggaaggaggaaggttcgactggggaggcaaacacgaggtagccactcttctgtttcttaaacttggtagtgggcacatgggtactcgcttttattagtattcttttaactctatataagtgcgtgatggattcatttctctatttcctaaatagttcataacaatcttttaaagaactttcaggaaccaaatggaggtttgacccagcagtagcaaagtcttcatgttactatagtagagctggaaattcttaacataaggatacagtatttttcccagttcttggaggagagggtcagagtaaaaagtaaatataaataaataaatcatgggtaaaaagaatctcctcccagtcagcacccaactaaatatggaaactgacttcagttgagacatgaagctgttcttcattcattctagcaaagatattgactgaactatttggaaaacatgtttatcattgtctgaggtgatctgccataagctgctatatggcacactgtgtaagaatgaactttgactgtgatgcacttatgtatatttaaaaaattgctcatcctccctagcatttgtttctaaaacattttgattacttagagtgaaaaattcctttggaaacattttttaaaatgcaaatttaggtcaggtacgggggctcatgcctgtaatcccagctacttaggaggctgaggtgggaggattgcttgaggccaggagttcgaggctgcagtaagctatgattgcaccactgcactccagcccggacaacagagcaagaccttgtttctaaaacagaaaaaagaagcaaatttaaagaaggttttttttattttatgtaataaatgctctctataaaagttctataaagcacatttaaaggtgaatgcttgcctgtaatcccagcactttcagaggccaaggtgggaagattgcttgagcccaggagttcaagaccagcctgggcaatgtagtgagacctcatctctacaaaaaaatgaaaataagcggcagagtgtggtggctcacacctgtaatcccagcactttgggaggctgagctgggtggatcacttgaggccagaaatttgagaccagcctggccaacatggcaaaaccccgtctctactaaaaatacaaaaattagccggcgtggtggcacgtgccagtaatcccagctacttgggaggttgaggcacgagaatcgcttgaacctgggagatagaggttgcagtgagctgagatcacaccactgcactccagtctgggtgacagagcaagattctgtctcataaaaaaaaaataaaaatagccaggtttggtggtgcactcctgtagtcccagctactctggggactgaggtgagaggatcacttgagcccaggaaattgagactgcagtgagctgtgattgtgccactgtactccagcctgggtgacagagccagaccctgcctcaaaaaaaaaaaaaaaaaaaaaaaaaaaaaaaagagtgaatactcagcttttgttgcacgtgggacttgagagagaactgggtaagggtgtcctctttctacttgcttccttttgtcagtagaaccactgtcgtgtcaactatatgagaaatcataccctctcagaacttactctgtgttgatgtttcagtttattaaaaaacataaaacataaacactcttacaaatatttatttatcggaaagagttctggttttcaggttaacaccagcaagtcacaaatccgctgcagtacatctcgttaaagccctgctcgcttcagtctctatgaattcaaattaaagcaagtgattggattttgccatctactgggaatgaatttgtcttatttagtccctaatttgatcatgagaattttataaaatcatgttagagaattacaaaatacctattacattgttcaattcaccacatgtcatggctggcaaaggctcaggtaatttagatgcttgtaattttctaaatggtattacgcttttaaactatacccttgggtccaaatccacattaactaactgacaaaaaattatagataattttatttgaggcaacacaaaagggcagaattgtggcaggcgtaataaaacatcccttaaataaagggatctgagatcccagagcacgggctcaattaagctaactaccactagttaaggacgggtctaaccaccactagtttgtctgccacgagttcaaggctagttcaggaaacaccatctgactgtatagctaggagaccttgcacatgttctgtaggaaggagctcactgagtccttcaggaacatacacactcttggatgagctcacttcatgaccctccccaaatcgcccaaggtgacatgatgctcagtagaaggacctggtgaaagaacaaagagtgtttcacggctctcccttaaatactgtattgagaaataaggaatctctgtgctgctcttttcaggaatcaagcagtgctctccacctgggctgcattttcgagtcacctacagaggctgtaaaaatcctcataccctggatgcacctcagaccaattatatcaaatctctggggtgagagccagccagcagtgttttctaattccccaggtgactctgatgagtgccacggttgagaacgactgtagtagctatttgagaaactgattacttggcagagcaatgcccacaaggaggtgttttgaagttacataaataacactgacaagagataaccttgtcccattatgtattacataatgggaaaaccagaaattgaccacagatttcattgactgattcacttggtgtctaattaatctgtgattacaggcttgtaagttgctaacccggcagtaaacattcagtccatttcagccaattgggggacgggttggaggtagaaaagttgtttgatcattgatgatgcttctatatctaagagaataccattttggcaggggagaggcccttggtgtatgaagttaatcactgtgataggcacccagttgaattctaaaagcattaggcaaagactcaagtgaacgtttaggaagaaagccattatttggtatttataaaatgcagcaggtctggaaatggagcaagataacactccctatagtcaaagtcctttacaataaaagagggtaggatttgatagaagagaaggggtcatgatggattcaaacatctttacatcccccaaacatatatcattggaatgttgagcgtcttcttcattttctactgttgtattaagaatattttcaaacatacagaaaagttgaaagaattggacagtaaaaattcattaattcattgcctccagcaggggttggcaaacttttcctataaaagaaagagagtcaatatattaggccttggaggccaatgggcaagatggagcaactattctcaccagaaagctagtagtcttttttttttttttttttttttttttttttttttttacatactacttttaaaaatgttaaaactacacttggctcgtgggtcatacaaaaataggtagtgggccagatttggaccacagtctgtagtttgtcaacccctgacctaaagttcaactgtcattttgctcttgtaggggcaaacacctttttaggggtttgcggctgggcctgcgaattaaattgacatataagacagatcaacaggagaaaagcatacatgtttatttaatgaattttacatgacatgggagccttcataaggagtgaagacccaaagatgaagttagggttgaatacttatgtgctgaattggacgagtagtaatctatgaaagtgtgacgaggcagaggagcctgggctggggggttagctgggtgaagtggccaggaggatgagggttagtctaacaaggttggttcatgcagatttccctcagcctcaacttcctgtctttgatgataagaatgatgcttccttctagtatcggaagggcatctttcacatgggaatttcatctccagcttttaagaaacaaaatgggccagttgcggtggctcatgcctgtaatcccagcactttgggaggccaaggcgggcggatcacaagatcaggagatggagtccatcctggctaacagggtgaaaccccatctctactaaaagtacaaaaaattagccgggcatgatggcgggtgactgtagtcccagctactcaggaggctgaggcaggagaatggcgtgaacccaggaggcagagcttgcagtgagccgagaccgcaccactgcactccagcctgggcaacagtgcaagactccatctcaaaaaaaaaaaaaaaaaagaaaaagaaacagaatggtcaggtgatgttcttgttcttgtacctgctgtttttcaagagcctttaacccaaaatagtcagtttgccagagtggcatattttggggtggcatattccttttttttttttttttttgaaacaggatcttgctctgtcacccaggctacagtgtagtggcacgatcacggctcactgcagccttgaccttccgggctcaagtgattctcctacctcagcctcccaagtagctaggaccacaggtgcatgtcatcatgccaagctaattttaatttctttttttttttctttgcagagatggggtctctctatgttgcccaggctggttttgaactcctgggctcaagcgatcctcccacctcggcctcccaaagtgctgggattacaggtgtgagccactgtgcccagcctggggtagcatattcttaactacttcactctccttgccttgtcacatagtcagccagctctccatctcttaatctaggatatatttcagagtcaaaagttaacagttaacatcaataggtacatgtctcttctcaacataacaaaaggtaatgtgaacaggataaaatgccataaatcaagtgagaccttgttaatgatttattcagtcctctttaggatcttttggtactctaggactccttacgatttaccatgcattgagtttttaatatttcagttaatataaaattatagttaaatcaaaaatgaaaatggtttctgttccatgctattgagtgaatctaaactttgaacgtgtctctcagaggaattatagctcttttcctagccatggattgaaggagttcattccctcttgttctccatcctctgtttcagataaagaccattttgagcggctttatcatcaggggctacttggggaagtggaccctgctaatcaagacagtcacgctggtgctggtagtgtcctccggtctgagccttgggaaggaagggccgctagtgcacgtggcttgttgctgtggcaacttcttcagcagccttttctccaagtacagcaagaatgagggcaagaggcgggaggtgagccagctcagcttccatctgcagcgaaactttcttctcaaagccccctcctgctgtctgacttgcaggtttgcacgtttgttttcatggaaggccttgaagcttatgtagaactatttgttttgtaggtgctttcagctgcagcggctgctggagtctctgttgcctttggtgcaccaattggaggcgtgcttttcagtctagaagaggtgagaatgggcagctgagggaattcgtgattttgagcagcaaggcccgttgagggttagaatcaaagaagtattggataagattccggcagttaattaaggagccacaatttccactgttttttttttgttttgtttttgtttttgtttttgttttttttgagactgagtctcactctgtcacccaggctgcagtgcaatggcgcaatcttggctcactacaacctccgcttcccgggttgaagcaattctcctgtcccagcctcctgagtagctgggactataggtgcacgccaccacgcctggctcatttttgtgtttttagtagagatgggggtttcaccatattggtcaggctggtcttgaactcctgacctcaggtgatccacctgcctcggcctcccaaagtactgggattacaggcgtgagccacaatacccggccaccagcgataaattcctgttttcaagtattgtttcaaaaattgccaaggtgattttttaaaaagatttacagtattctccctctcataaccaacttaattaagcatttttgattttggtaacccaaacgggttattccaggggttggcaaacgtttctgtaaaaggccaggtagtaaatgtttttggttttgtgggccatgcaatttctgttgtagctgctcagctctgctgtcatagcatgaaagcagctgtgaacaatacgtacacaaatgggcatgtctgcatttccatagatgtttccttatgggcactgaaatttgaattttatggttttcacatgtcacaaaatattgttcttcttttgaatatttcaaatcaaaagattttttcacctttttcaatcaattaaaaatgtaaaaaccattcttaactcatgtgccatacaaatgcattcactgggctgcacgtgacttgcagcccagagttttccaaaccctgatctactctgttttctgtagaatccaatccagaggtttatttgcttctaggggagtctctgtgccatgaacagaattatgattaaatacttttctcttaaaaatatagcccaaacccaccttgattagtgtccattccacttctagacatagttagattcctccaggtatctttgctgatgcgttttggtcacattaagtccaggctcatggaatgagtgtgtccactcttggacttagagtgtgactttcctgccaaccagagggcttggctctgagcagctctttctccggccagtctttaattttccactttttcatctcaggtcagttactactttcccctgaagaccttgtggaggtcatttttcgcagccctggtggcggcctttacgctgagatccatcaatccctttgggaatagccgtctcgttctcttttatgtggaataccacacgccctggtacatggctgaactcttccccttcatcctgcttggggtcttcgggggcttgtggggaaccctcttcatccgctgcaacatcgcctggtgcaggaggcgcaagaccaccaggctggggaagtacccggtgctggaggtcattgtggtgactgccatcactgccatcattgcctaccccaatccctacacacgccagagcaccagcgagctcatttctgagctgttcaatgactgtggagcccttgagtcttcccagctctgtgactacatcaatgaccccaacatgactcggcctgtggatgacattccagaccggccggctggtgtcggtgtttacacggccatgtggcagctggccctggcactgatcttcaaaatcgtcgttaccatatttacctttggcatgaaggtaagtgaaagggaaggaagatggggtggggacccatgtccttctggggacagcaccctactctctaaaataaaattgcggtgggaaaaaaaggggaactggcctttcttgaatgttctcatgtgccaggcacttgacattcctttaatcaataggaaataacttctaataaacaataagcttatgaaatagagattttaatcccattttacaactgaggaaactaaggctctgagatcttaagtggcttgatcagacccacagcttatgggagacagagctaggcatcaaacccacttcacacattcccagaacaggtggtggtgaccacaggtttcctgccgctggccaggtgatgccaggtggtggaaaaagcccaggtttggctcagtttggctcattaaacatgcattgagtatcagctgtatcttaggcatcgtgctaagtctgagggatacagaacccaaacagaaagctgcccttgcagagcacacagctctgggagaaagagatgcagacctggagttctgacattgtgatgagcaccacgctggtatgacgggagcacagagtgagtgtgtcccccgtctgggtagggctgggcatgacaggggctctttgcacacatcctctttgaagaacagagctgtggatgacagcacatgctttcttttcctcctccctccctccctccctccctcccttccttcccttccttcccttctcttccctccccttcccttcccttttcccttttccctttcctcttccccctttcccctttcccccttcccttcctttcgtcttgttcccaggctggaatacagtggcatgatcacagctcactgcagcctcaacctcctgggctcaaatgatcctcccatctcagcctcccaagtagctgggatcataggcgtgaaccaccacacttggtgatttaaaaaaattttttgtacagatgaggctcttgctgtgttgccctggctggtcccaaactcccaggctccagtgatcctcctgcctcagcctcccaaagtgctgggatcataggcatgagccaccacaccacacccaacagcacatgccttcattactcttgttcctaaagccagagaagagacagctggtttcctctttcattgtgttaaaatcatttgttaaaatcattatgttaaaatactttaaaagcccctcctaaagaactttcttttatggaacctgggattttgttattatagctttttttttttttttgaaatgaggtaaaacccataaaacataaatgatcattttaaagtatacagttcagtggcattacatacattcacaatattgtgcaattaacacctgtatttagctttagaacattttcatcccccaaacggaaatcccatctccattaacagtcattccccatttttccctcctgcagccccggcaaccactaatctgtctctagattcgcctattttggacacttcatataaatgatatcatataatatgtggcctttggtgactggcttttttcgtttagtgcaatgttttcaaggttcattcacattgtagcatgtgtcactacttcatttttatggctgaatagtattccattctatggagatcccacattttgtttatccactcatcctttgatggacatttgtgttgtttccaccttttggctattatgaataatgctatcattacttacttaaagaaacttttattagagtatatcgttcatatagagaagtgtacagcttgatggagtttcataaaacacacacacacacctgtgtaaccagcacccaggaccagaagcagaacattatccacctcccagagcccccttttgtgttccattactattgctttctgtgtggcatttctatgaattgtcttttaattttatttatttttattaaaaatataaaatagagaccaagctccctatgtttcccaggctggtcttaaacccctgagctccagtgatcctcctgctttggcctcccaaagtgctaggattacacacatgcgccattgtgccctgcctgaattgtcttttttttttttttttttttttggagacagggtctcactctgttgtccaggctggagtgcagtggcacaatcatgggtcactgcagcctcgaccttctgggctcaagtgatcctcctgcctcagcccactgggactacagacacgtgccaccatgcccagctgatttttgtattttttgtagagatggggtcttgccatgttgaccaggctggtctggaactcctgggctcaagtgatccgcctgccttggcctcccaaagcgttagaattacaggcgtgagccatcacacccagcctgaattgtcttttttttttttttttttaaatttaatggtcgggcatggtggctcatgcctgtaatccaagcactttgggaggccaaggtgggtggatcacttgaggtcaggagttcaagaccagcctggctaatatagtgaaaccccatttcttctaaaaatacaaaaattagctgggcgtggtgacacacgcctgtggtcccagctactcgggaggctgaggcataagaatcacttgaacgcaggaggcagaggctgcagtgagctgagatcacgccactgcacacgggcctgggcgacagagcgagattccgtctcaaaaaaaaaaaaaaaaaaaaaaagaaaaaaattctaagaagttgtttacttgagtgtgtcatagtggtcaaatacaaacctgaatttgggccttaagaacaaggatgagtaggccttattaaacagctggctgtctctgatctgtcatctcctagcaaagggatttgttttcatgtctcaggaagatgctggtaacattttatgatgcttgctgagaaaagtctcctttgatgttacagggatataaatgatgtagaataaggggaagctcagaaaggaatgatttcctaaggagtattctgactctagaaatcacacccaaggatccaaacttcacttgaattaggttaaagttctgcttccatcctcagatgggtaaccacctggggctggctggcatcattgcagctgctgcccatggtcagcggtcacgtgtcatttcagcgaacacagggagtcaggcttgttctatagtacatgtgtggtcattagataaactaaaatgtatcttcatccagcagggtagagaacacgctggtaccaagatctcttagtttacattctatttctttgctgcccctatcctggcttgaaaatattcagaatacttattagaaaatgtacttcattaggaagagggaattgcctccctcgtctctctctgacaggtattcagctaccacctactagagagggcagggagccattgaagtgctttctggaagatccagggtggctgcaatgatggacttagcttctttattttacctgggagcagtcgcaggcccttcttttccattttcatgctgtggcttgacatttaattttaaaagccattctgaatgacatggcaaggggcgagagaaagtggtgtctcaactgacagatgctcactttgaatgttatttgcagtggggcttatcattctttaatccacagcaggcaaacccagccagcttttgaaggagagggaatcaaagtataaaattgcgtcctctctaagttgcagtagatatgactgactaggcaggtcaaattatttgtcccacctttccccagctgacctattttgcagagttgcacctcctctgaagactgaagctaaatgcaagcccgtcgagggggaatgtgtttcttgggggtcgtgaagcggggacttggtctttttccctcatgttgcttttctctgtgtctcctcaagatcccgtcgggcctcttcatccccagcatggctgtgggcgcgatagcgggcaggatggtgggaattggcgtggagcagctggcctaccatcaccatgactggatcatcttcaggaactggtgcagacccggtgcagactgtgtcacgccagggctgtacgcaatggtgggagctgcggcctgcctcggtacgaccatgggtggggcagggagggggaccggggaactaatctggcttagaggactgccaagaaggaagacatggacttgaacattttctttactcaggataggctgggttgtgtggctataacaagtaaacccctaaatcacaatggcttaacgcaccaaggctatgtctcgctcactatgcagacacacacacacacacacaaacagatgccctcaacttatgatggggttaacatcctgataaatgcatcataaactgaaaatattataagttgaaaatgcattgaatacacctaacctaccaaacgttgtagcttagcttagcctaccttaaacatgttcagaacacttacatttgcctacatctgggcacaatcatctaacacaaagcctattttataatgaagttgaatatctcttgtaatttattgaatattgtactggaagtgagaaacagatggttgcctgtgtacttgaggcatggtttctactgaatgcctgttgcttttgtaccacggaaagtggcaaaattgtaagttaaaccatcgtaagtcagggactgtctgtaaataaaaatcttggtttagcagaaggcgcttctccacctaatcattcaggggcacaaaggtgggtctgtcccctgtctatagtccttaagaatttctgtgatattctgtttatggggttcttgaagagcaccatgcttgcttagtcagaagcttgcagagcccatgtaggatccactcaccaaaaagcttgtgtgggccacggtgaatagacaacccgggatccgtcattggagcagaggccccagtgagatgcaacttcaggctccccaacgcaaagccacatttgacagggcctggcctgggttccagaggcccagtgtaggaagcatgtaggagagtctgcttggaacaggtgtgaggggaatttacagcctgtctgtcattttccccaaatcatgcttccgtgagctgcccggcttgcactttggaatcttactcctcccctctgttgcaggtggagttaccaggatgacggtgtcattggtggtcatcatgtttgaattaaccgggggtctggagtacatcgtgcccctgatggcggcggctgtgaccagcaagtgggtagctgatgcatttgggaaagaaggcatctacgaggcccacatccacttaaatgggtaccctttccttgacgtgaaggacgagtttactcaccgcacactggccaccgacgtcatgcggccccggcggggagagccgccactgtcggtgctcacccaggacagcatgactgtcgaggacgtggagacgctcatcaaggagaccgactacaacggcttccccgtggtggtctccagagactccgagcgcctcattggatttgcccagaggagggaactgattctcgcaataagtgagtaaagagagggaagctcacattttaccaagagccgaatggcatcctttgtacccctaacattatccaagatttttgaggtgatgtgcattaagccaggggctctcaagctttcacatgtctctgggtcacccaggggtctggctcaaaagcagattctgattgagcaggtcttgggtgggatccgatactacatccctcacaagttccccattaacgccgatattgctggtccccacgtcacactgtaaggaaaaaggctttaaacccaagtcttgggtagacattcttggttgcaaagtgactgcatgtttgcaagcagccccctggccctgctccgctgctgcctttcagcaattgttggctaaagctgagaaggaagagaggcgacagcctggagtggcccgggctgagctgtctcagagactttcaggtgtaccaaccatccggctgagatcacgagttctctgccccagacaccccttgccaccacacaagtcttttgcttcactttgtgatatgatgtcagattccacagttagaggcccttgtgggtaaatgtgcagacatcgctgaaaccaattgcgtgagatgattttcctcttgtgtttgaatgacaatcagctgcactgaggggcaggctgttgagttgggggaggggagtatgggatgatgcccaggtcagggtgtcccaacgacaggtggatcagagaagcaagcccatgggccccatcagccgagggatggctccaacagaagggtaaacaggaggtaggagaattcctaagacagaggggcctagggctgcgggctgagggccagaggtctggttgtgagttgctgggaccccaggcaaggagaagctgtgagccttggaggggtagagtcctgctgggcctcaaggtggcaggggcaaggaccagcatagcacatccacgggcacgctcaccatccttgctctgtgatctgtacaacattccagcatctcatgatagaccagggcccatggcgtggctcccatgtgcacacgacagttttactatatatcttctagagtattcttgaagcttgtcaatgggactttccctggtctgatgttggaatggcccactgttaatacatctccaccaggcaactgcttacttctctccctgtcctttgtttcctgtttccaaggcacctcccttaaacctcttcccagtgttacatagctttaaaatatctttaaggcatcttcatcaaaggctttataacaataagttgagataagctatcctctcccattttagcttgacactcaaacatttttacctcccccaaagtaaaaattgattttgtattttagacaccgtagcaagtttgtgcttaagtgttcggcgatgcttctccttattataggtcctgttgcttaacgggtaggtaggtgcctttgtgtaaatattgccttataaataatgaggtttttttaaggttaagtaggattgggtttgtttaaaaatactgtaatcagcagcctttaaaaattttttcattccctaggatcttttaagcaaaggttgaaatttaaaaactaaggtaataaatgtcacagaatctattatctattgtatagctccaggcacacctgctaagaggcagcttactaattttgctgaaacccattactgtaatcaagtgggaagcagtaattgtcatcaaccagttagagaagaaatttaagcttaccaaccaagtactcttctcgaagctatgtttggaatgtctgaagaggcaccacacggtgtaaatactacctatatgctttcaatcagaccgataataatatagaaggtgctatttacatggtttgtgcagagggaaggagtgttttgctctgaggaatcagaaaagctgtttttctggcctgtggaaatagaagagcccctgtactctggtggagaaatacaggtgcatgacctgtatttgaggaatcttgtgccattttatgagtatagaaatatgacagcatttagctagacactatcccatgccaatttcacttcctagaggaattgggagcaaagattatagacagatccaagatagtatggatcagaaaagaaaggtaagtgaggtaaataaggatttttcttacatatcatgtttaaaaattgtagcaactgctcacatgaagctgaaaatgttttgttatgttttggaatgccaaagcatggcgttatctttgttagagagcacgtcgttagcaccacctaggcaacgtgactctcttcaccatcacatactagcacacggggctgtatgcgactcttgctcaagttcctggcaaatgggcctttacctctcattgctctgcaaatatgaggactcgcctgtacttagcagggctcaggtgcttcttgtcttgagttctgcagttaagtagaggttcaaagaggactcagcggggagttgcagagatgattaaagggtggaaagttagagtttcagggaagagttaaggaaactctcaggtttttttggtctggtggatgatttattaggctggtacaaaagtagttgcggtttttgccgttactttcaatggcaagaaccgcaattacttttgcaccaacctaatgattctccagcatgtggaagacgcttagttgcagaaaggggtctacatccagcactgaacaagaagctaagtgtcaggtctgtcagacaagggagaaagaggtttctgcccgggagggctgttagttactggactaggtcatggagaatagtggtgtcatctacacctttctgttggggatgtgtgtgtgtgtgtgtgtatatatatatatatatatatacacacacacacatagagggacttctccatgctttagtagacagacaataacttgtaaaacaatctgctttttcttctgtataatctttacttttttatcatatcatctttgtactacttctgtggttgctttcaattttccattttaacctatctcattaattatatctgtcttatggacgcatttaaaaaaattttttgagacagggtctcgctgtttcacccaggctggagtgcagtggcgcgatcatagctcactgcagcctctacccactgggctcaagcagtcttcctgcttcagcctccggagaagctaggactacaggcttgcaccaccatgcctggctaagcatttttaattaacaggatgatagactattacttccctaaaaacacagttcaagtgggagtactcctcctcagcactgctgacatttggggcttgatgattctctgtgctggggctgtcttgtgcactcttgggtgctgagcagcatcccagggctccacccactggatgtcagcagcacttgccctctcctattgtgataaccaaaaatgtctttagacattgccaaatgtcccctgagggtggaggcagaattgctcccagttgagaaccattgctctaaagccactcaatagcctaatgaatatgtgattatttccaattttgaaaaatttcttggcctatcacatagtttgtgaaatttctcttacccatactttattatttaccatctctacatctggcatatgaacatattgcttctaggaaatggaatgttgagtaaccttagcaggtgctcataaaatatacattccttcatttttttttttttttcactaagtcttgctctgtttcccaggctggagtgcagtggcgacatctcggctcaccccagcctccacctcccagattcaagcaattctcctgcctcagcctcccgagtagatgggactacaggcgcatgccaccaggcgtggctaatttttgtatttttagtagggacggagcttcaccatgttggtcaggctggtctcgaactcctgatcttaagtgatccgcccacctcagcctcccaaagtgctgggattacaggcatgagccactgtgcctggcctaaaatgtacattcttttttaagagctgtggccactgagactcattctagtagaatatatgacaaacctcctacattaaagacagttttaaaaacagtttaactatttttaaaacatttaaaaatgaagtttattacattttttcaaaatgaaagtaatacacactccaaatattggggaaatcagaagaaaaaggaaacatttaaaaagccacctacattcttatcaccaaagaagacatgattgatatttagtgcatttcctttttgtcttttaggtcttttaaaaagatgcattttcggttgtattgttttggtttctttttcaacacagactcccaagtgttcctagggtctgtgggtctcttttcttgtagcactggctcatcccctgggtgaggagttagttggtttatcctttcacacaggaaatatttcttaagtgtccaccatgtgctgataccatcctagaagctcagagtccagggatgacagcacactgcctctgccctctgtgaacttacatgcaggcattttggtgtctgatgatttctggtccaaactgagagcagatgtttcaccctggtagagaattgcaaagagctttcttgctggttgttcttccattcacaggcttttgcctgttcttagcacctctacccacaaagtttgaagcctcctgtaagtctgtaatagagttccaaagtggcctagcagaacctttctgaggagagtagcagttgccactgtgggaacagcaaggtgcatagctcaggcttctggctctgaccctagctgatgcctatatttttgcttggcagtaaataccttgtgtgctttccttcctgatgcctcctatgtgagataggttcagttttatgtggcaggcagaaccagatacactgacatttagtagacctactcatccgttcattcatatgtgcatttggcaaatatctgttttgtgtctactgtgtgttaggcattgtccaggcactgggagtgcactggtgagcaagagttcattgagctagtggctgttagaatcagggcttctaacccaatcagtaggttcaaaggagatataagcatgttatttattttattgtagcaagtggatcgaccatttattaaattgtatttggttttagaaggggttcagcaaatccatgtcatcaactcttgattggggtttgcaacttgatccaatcctgacattcactcagtggttgaaattgatggaaatcctgttagtgggactttaagagaatcggctggtctatgggaatgagcaaataagtgtgtgttgccagttgcctccctgccttagtgggtaaggacagaatcatcttggtttaggagagaagtacgtagtatatatcgaacagtctacatttgaaaacgcgttgtgcctcagagtcgtctggtatttgtggcagaatcataccccatttgatgtaacttgatttaacctgacccatgtaatgtgaaggcatttgcccagcaggccctctgttcctcttttaaacagagaccctttttcagactcagcctgaccccagatgctgccagttttccattagagtactctattgcactaaatggccttagaggaggcagttagaattttatttttgaaagaacaatataggtgaatagtagtctttgagaaggtaagaagtgtattatgggaaccaggatccattttaaagcaagccttgctgtacattttccctaaccttttcccatgaaccaaaagaaagattaaaattccaacagaaggaaaatcgccttggagaaatatcttgagaccgatggatttatttcatgtgtggcttaaaatagcctgggtttctagcaccgcgttaagctgtatttctaatgagttcctgttaccctacttttcttcagctttctttcacatggccttttctatagacagaaataggctaattgctaccataacagttttactatctttctttgagggatccacaaaatggcccatttttaagacaggagatccgaagggttgaggggggatgcagcttttctggggttgtttctttggacccaagggtcgcgtttgggattgagctgcatttctgggctgtgagcctgggctggccgtattggtttcttgttcctcccaggattcataatgccatttgggccagttataagttagttcgtaaaaagaaaaacaatgtattaaggtcatcgggcagctaagtaagtttcttgtcacctcaaactccagcccatgatgaggtgaaggagcgtaaggaaagccagagtggagggccctgggctgtttggggtgcccggagtctgcggtgaagcagtgaatgtccccaaaggggccatctgggtcaggcccatcttgccagactttggcaacaaatgatccggtcacagcaggggaccctcacacagcattagctgcagagagatgccaattccacagatgtttggctaaagccccttattaagaatgtgtggttcatcctccaaaccccttttctgtgggattctagatggtgtgtgtgagtgtggggtggggaattgctcagcaaggggtttttgtgtggctcattgttcctgctcaccccattctagagaacgccagacagaggcaggagggcattgtgagcaattccatcatgtacttcacggaggaaccccccgagctgccggccaacagcccacatcccctgaagctgcggcgcatcctgaacctcagcccgtttacagtgacagaccacactccgatggaaacggtggtggatatcttccggaaactggggcttcggcagtgcctggtgacgcggagcgggtgagtagccggacatgtggccagaatgacctagggagaaaaagatgagtgagacatggtctcagccctgaagaatgtggagggccatggggtggaatagtccttgacagagaatggcagtaagctgtggtgaatgtgttgaggaggaaatgtacagggagcttgggactgagggctgggcagccgtgcagccagagaagggggtggtccaggctggactgctgcctgggctgagggaggttgagtaaaaaggggtggagccacaggagaagggcttggtgttgcttttctaccaccccatgtgacacttggcttagggaggaggttctgctataacgtgatgtatgcggtcctcaaaatcacagcactacgcaaaaagtgctccatgcaaaccacaggacttgtgggaaaaatggggttaggtacacaacagtcaaaaacttcatcagtgatatatgacataaaagaggtggaagcctaataagaatggtagtaccgagccaggtgcagtgagtggctcgtgcctgtaatctcagcacttcgggaggctgaggtggaggatcacttgagcccaggagttcgagaccagcctgggtcgcaagaccctatctctacagataaatttttataaaatcagccaagtgtgcccatagtcccagctacttgggaggctgagacaggagcatcacttgagcccaggcttccaaggctgcagtggcccaggattgcaccactgcactccagccttggcagcagaatgagaccctgtcttgtaaaaagaatagtggtagtaccatgttacacattagttaaatggttaagaaatacagggatacaacagaaatatgtcacttcatcttaaaaaggcctgaagttggctgtggggtgggtttcacaagctgtgccacttccgaattaccgggaaggggtggaaggaggggagcctgaactcaaggggaagtggtcacagcaggtgtggatgggcatggctcttcacgcatgcatgaactgaggtcgcttgtggatgtttgggggccgggcatgtgcattttgtgtatgccgatcccactgggttcagctgggtacagtttcctgcatttgcctagagcttctcatggatgaaatcacacataagcaaaggtaaaattcatattatgctcagattgttcctgatatatcaatttgtttgaaacaactttgttttcgaaacaaacatgattggagaatggagagatttgatggccccatggcattgtccctgctgccacttttgttttgtgttgtcacaaatcaggaaaccaacaatgcaaagatcgagggtccactgtagtagcaccagagaagcagttccttaaaggtcattccttggcctctgagtgtcacaagttccatggtgtcagaagcttgtgtaagggaaggggtcggcttggtcagggtagcctggaacctagggttatctgcccattttattcctttatgggctgggagtaggaggcggggaatgggttctggagacattggtacctaataaagtttaggcctttatagactccagaggctcaactatctaatatagcttatatttccagagccagcacactctagtttaacacagcagttctcaactgggatgattttacctcccagagacattgggcaatgtctggagacaatttggggtgtcatgactggagggagggatgctattggcatctagtgagtagaggtcaggggcgctgctaaacatcctgcagtgaacaggacagctccacaacaaaacatctggcccaaaatgtcactagtcgtgcagttgagtgaccttggactggatgtgcctgtatagccaaatgagcaatcctattcattccactttcttcctgctgtcctggtagcaagcacacagggggacaggctttgcaatttgcagatttacccagagaactcctggccagcagagtgagcatcctccttagctctgactacagacagagcagtgtcttgcatgtgggaggtgcaatcaatagggaaaaataaatgagtccttgtgtttgacaaggctagggatcatttctgctgatgaattttaaaggagctcaagtggtttttcaaacttgagtgtggatcaaaataccctggaggattaaacctccaggttaaatccagatttctgggccctgccacagaggtactgatccctggaagtctagggtgaggcccaagaatattctttcctaacaagctcccaggtgatgctgcaactgccggtctggggaccccaccttgagaaccactgaagtcgatttatgcacttgagtttccagtactcttggtataaacaccactgtgattgcccatgctgtctcaagtgtgtagcagtttctcctttcctttaaaacaataatccaaagtcaattatcgttggaatttcagctcaggcaggaaactctgcccttaatgcccgctcacacctcatagagccccatgaggtcttcctgtgaagatctgggtgccgaaattggctctgaatgtgcttcaagaaagcaaaatcgcactctctctcgctctacatcttttacacaaacacagatgctgctgcgttagtgctggcaagggatgcttgtctgcggggcctttcatctccttgggcttcttgccagggcaggcacgtctctggccagctctcatgtttgatgtgctcgcccaccctgtaccttccctgctcgggatggccacgagcctgagctccaccgctggcctggatcacctgcagcatttctcaggcctggggttcaaggggcatcataaaactggaccaggaatcggaatgccgcaatctaggaagcctccagttgctaagagtgaatttgggtgagattttccctatgaaagttctagaaaggaaaagtgagtaagggagatggtgtcagattttccccaagccctgctaggtggtccacaggggcctggacaggatagctttcgcagaagagcccagctgctcgaatttgaattatgtccttggtcatagatctggccatttataattcgctgaattcgcttcaactgctactcaaaggggctggaagttcaaacacttgatttaaatcaaataggacatttcatgccactaacgaagcctgctggatttgatgttacctccttctgggttgatgttcagctttcttcttttgtgataattaccatcgcgggccagggcacaatttatgcacgaacccaaggcagctcctgaattcatatttccctagtgctgttataatcaacttaacttttagacattacagtcacagagctttaaaaggaggttttcagaactgcaaatgcttgatcttttgatactgtctccagggtgaagacaaggaaacaaaaaccaggatttatagatatgggagggttccgtgtgtgtgtgtgtgtgtgtgtgtgtgtgtgtgtgtgtgtatgtgagtgtgtgtgtgttatagttatcatcactttgcaaacactaacaagtcttatttttttcaaagcaacattggtttaatcaacattatattgagcatctattttagctgggaactgtagggggcacaaaaagtgtttaaaaaaaaaaaagccaaggagcttgttatctactaaagaacatggacataatccagtttaagtggtgctacccaaggcaggcgctccggggggactgttctgttttttcttttttaatttaatttaatttaaagttccgggatacatgtgcaggaagtgcagtcttgctacataggtaaacgtgtgccatggtggtttcctgcacctaccaacccatcacctaggtaggtagccccatatgcattagctatttatcctgatgctctccctccccacatccacgacaggccccagtatgtgctgttcctctccctgtgtccatgtgttctcattgttcagctcccacttgtaagtgagaacatacagtgtttggttttctgttcctgtgttattttgctcaggataatggcttccagctccatccatgtccctgcaaaggacatgatctcattcctttttatggctgcatcgtattccatggtatatatgtgccacattttctttatccagtctatcactgatgagcatttgggttggttccatgtctttgctattgtgaatggtgctgcagcgaacatacgtgtgtatgtatttttataatagagtgatttatattcctttgggtatatactcagtaatgggattgctgggtcaaatggtatttctggttctaggtctttggggaatcgccacactgtcctccataatggttgaactaatttacattcccaccaacagtgtaaaagcattcctgtttctccacactcttgctccacaccagcatctgttgtttcttgactttaataattgccattctgactgatgtgagatggcatctcattgtgggtttgatttgcatttccctaatgatcagtgatgtggagctttttctcatatgtttgttggctatataaatgtcttcttttgagaagtgtctgttcatgtcctttgcccactttttgatggggttgtttttttcttgtaaatttgtttaagttccttgtagattctgcatattagacctctgtcagatggatagattgcaaaatttctcccattctgtaggttgtccgttcactctgatgatagtttcttttgctgtgcagaagctctttagtttaattagatcccatttgtcaacttttgcttttgttgcaattgcttttgaggttttcgttatgaaatctttgcccatgactatgtcctgaatggtattgcctagattttttttctaggctttttatcgttttgggttttacatttaaatctttaatctatcttgagttaatttttgtgtaaggtataaggaaggggttcagtttcaattttctgcatatagctaaccaattctcccagcatcatttattaaatagggagtcctttccccattgattgttagctttgtcaaagatcaggtggttgtagatatgtggtcttatttttgagatctctattctgttccattgatctatgtaccagtactgtactgttttggatactgtggccatgtagtatagtttgaagttgggtggcatgatgcctccagctttgttctttttgcttaggattttctgggctatatggactctccacctcaaaacaacagaatatacattcttcttggcgccacatgacacttactctaaaatcaatcacataattggaagtgaaacactcctcagcaaatgcaaaacaactgaaatcataacaagcggtctctcagaccacagtgcaatcagattagaactcaagattaagaaactcactcaaaaccaccacacaactacatggaaattgaacaacctgctcctgaatgactcctgggtaaataataaaattaaggcagaactcaagaaattctttgaaaccaatgagaacaaagagacaacataccagaatctcttggacacagctacagcagtgttaagagggaaatttatagcactaaatgcccatatcaaaaagctagaaagatctcaagtcaacaccctaacatcataactaaaagaactagagaaccaagagcagacaaaccccaaagctagcagaagacaagaaataagcaagatcagagcagaactgaaggagacagagatacaaaaaacccttcgaaaaatcaacaaacccaacaaatccaggagttgtttttttgaaaaaattaataaaatagactgctagctagagtaataaagaagaaaagagagaagaatcgaatagacacaacaaaaaatgatacaggggatatcatcactgaccccacaggaatacaaacaaccatcagagaatactgtatcacctctatgtaaataaactagaaaatctagaagaaatagataaattcctggatgcatacaccctcccaagactgaaccaggaagaagttgaacccctgaatagaccaagttctgaaattgaggcagtaataaatagcctaccaaccaaaaaaatcccaggaccagacagatttacagctgaattctttgtaccagaggtacaaagaggaactggtaccatttcttcagaaactattccaaacaattgaaaaggagggactcctcccgaactcattttatgaggccagcatcatcctgataccaaaacctggcagagatacaacaaaaaaagaaaacttcaggccaatatccctaatgaacattgatgcaaaaatcctcaataaaaaaaaataatggcaaactgaacccggcagcatatcaaaaggcttattcaccacgatcaagtcagcttcatccctggggtgcaaggctggttcaacatacacaaatcaataaacgtaattcatcacacaagcagaatgaaagacaaaaaccacatggttatctcaatagatgcagaaaaggccttcgataaaaataacatcccttcatgttaaaaactctcaataaactaggtattgatggaacatacctcaaaataataagagccatttatgacaaacccacagccaatatcatactgagtgggcaaaacctggaagcattccccttgaaaaccagcacaaaacaaagatgctctctctcaccattcctatttaacatattgtacaattcacccatttaaaatgcatgattcagtggtttttagtagaaaatgggttgtgcattaatcaccacaattttagatcattttcatcaccccaaaaagaaaccccacaccccttagctgttacctcctataccacagtccttggcaaccactactctatattttctgtctctgtggacttgcctattctggacatttcatgtcaatacagtcatgcactatgtggccttttgtatttggcttctttcactgagcatcatgttttcaaggttcgtccacactgaagatgtgtctgtacttctttccttgttagggctgaatcatcttgcattgtgtggatagaccacattttgctgatcaattcattagttgatggacatttggtttccctttttttcttttttttaaattatttttaatttttgtgggtacataggagtatatatttatgggtatatggtatattttgatacaggcatgtaatgcataataatcatatcagggtaaatggggtctcccagcacctcaagcatttatccttcgggttacaaacattccaattcttttagttatttttaaatgtacagttaaattattgattgtagtcaccctgttgcactatcaaatactagatcgtattcattcttttaaactattttttgtacccattaaccatcctccatcccctcctcccccctcccccattccccttagttttcaaatgaggaggtgagactctaagaagcaaaacactgctcagggttaaagggaattggttgcagagccagtcccatctggattcttccaggtctcctatctcctgaggcacaatcagctgccaggtaccgggaggacctttgatggagaaccctgccagccgaccctgacccttgaggacatcaatcccctccgtacagcaccctctgggaccaacgacagtggggagtagacctgggcgtgatgggaagatatgtggcagcatccttaagtatccagattcctggaatggctgcattttgggatacctgttcagtaaaatacagaggatatggggccaggtaacgggattcctgtgtcccatgctgacggtgtattatagattcacccacagaggtctatttgtgtctgaaagcttctggctgggagtaatagtcaaagtgtttaagagctggtgccagataatgaactgatttgttatgaattgtggggagttcactgcagttctataaggtatgaggttggcagggtacatcccagggtgtctagctcagtggctataaaccaaccggtgtagaactattttagtactttttaatctggatggtggttctcaaccaggggctatcttgtcccccctccacaggagacatttggcattgtctggagacattttggttgccataatgggggatggggatgctgctgcatctagtgggtagaggcccaggatgctgctgtatgttctacagtgcacagaatggcctatctgcaacaaataattagccaacctaaatgtcactagtgccaaggtggagaaaccctgcgtaaagccttcccaggtggagggctggatgggtggaaggagtcctattggcccagcttgcattttgctgctaccgcatgggagggggcctcactggggattcctatctgcctgtaaatagaggcccttcccagtaacaaagccgcctttcctagctgtcactgctttcttgaaattaattagaattatcagagctagaacaaaatttcctgactctgggaggaaaccttgtttaaaaacatttatttaaatttttgtgggtacatagtagatgtgtatatttatggaacacatgagatttttaaaatatatatatatatatattttattatactttaagttctagggtacatgtgcacaacgtgcaggtttgttacatatgtatacatgtgccatgttggtgtgctgcacccattaactcatcatttacattaggtatatctcctaatgctatccctcccccgtccccccaccccactacaggccccggtgtgtgatgttccccttcctgtgtccatgtgttctcattgttcaattcccacctatgagtgagaacatgcggtgtttgtttttttgtccttgtgatagtttgctcagaatgatggtttccagcttcatccatgtccctacaaaggacatgaactcatccttttttatggctgcatagtattccatagtgtatatgtgccacattttcttaatctagtctatcattgttggacatttgggttggttccaagtctttgctattgtgaatagtgctgcaataaacatacatgtgcatgtgtctttatagcagcatgatttatattcctttgggtatggaacacatgagatgttttgatactggcatgcaatgcataataatcacatcatagagaatggggcatccaccccctcaagcatttaccctttgtgttacaaactatccagctgtactcttttcatacacctgtttgctatttgtatgtcttcttttgagaaatgtctatccaaatattttgcccgtttttttgatcagattattagatttttccctatagagttgtttgagctccttatatattctgcttattaatcccttgtcagatgggtagtttgctagtgttttctcccattctgtgggttgtctcttcactttgttgattgggaaacctttatttcttatgtgggcctctggctctgacatgcctcaagtctggaggcctggactgctcttctcagcagcaatacatggctgccaaagcaaaagggcaactctaatgagaccggggcccactaaagcttttgcaaccgtagaagcagggtgatttggcgaagtattgggtaacagtgcccttgagaaaatgtgtatctctggttgattgattgcaatgggccctcattatgacagttgagcccgaagcagctaaaacaaatcaggatggaaagaaatggtttcaggctctgccagctggacccagcaaccttcctgtgtgaggagaccagagcccttgttgggccttgaatctgtcaactgtgttcatactcacagatgggttttcccaggagaactcagcatctcaccgcaaagaagagtgctaacatttgtttcctttaggtagctcttgtttcaggattataacaacatttaggcttacagaacaattgagcaaaatatgcagagttctcatatatccccttcactcccctcagtttcccctattgtcaatatcttgcattactgttgtatttgttgtaattgatgaaccaatatcaatacattattattaactaacatccatagtttactttagagtgtactctgtgtcatatatttctgtggattttgacaaatatataatatcatgtgtccaccattacaggatgatacagagtagtttcactgccctaaaaatcccctgtgctctgcctatttatccctctcttccacccaccaaaccctgacaaccactgatctttttactgtctccatagtttagccttttccagaatgttgcatattatgtagttggaatcattcagtatgtagccttttcagactggcttctttcactcagcaatacacattttgatttttctccacgtcttttcatgacttgatagcacttttgtttttattgctgaagaatatccattgtctggatatgccatggttcagtttatccagtcacctactaaagaaaatgttggttgcttccaggttttggcaattatgaatgaagcagacgtcttctaagacgttttctttacataactaccaaaccatgatgatgtaaaattaacagtaactcaatatatcatccaatatccagttgatattcattcaaatatcaactcagaattccatcaaggtttgtgcattgcattcttttgcctttttagtctcttgtctagaacagtttcctgccttgttgttgtttttttaatgagagatttttaaacataattccaaattttattttagacacaggagatacatgtgcaggtttgttacttgcaaagatttcctttgaagagtccagaccagtagtctcacattctgggtctgattacttcctcatgattcagtttggcataagtcgtttttggcagcattccaacataggtaacgctatggagtctgcttttctgactttgttgatgataagctccattgctcggatgaggtggtgatggccagaaccctccattgtaaagtgacatttttctctttgttcataatctgtaggaaagtactttgagaccatgtgaattttctgttttccagcaaccattcgcccagtgattttggtatccattgacaattattgcctaagctaactattacattgggggttgcaaagtattaattatcaaattctgtcctgcttcctacgtttatcaagtattcctccccatttaagaaaaacaatccctgtagggtcatgatatattcttttaatgtttttgtaattcatattgtcattattctgtttgcttagcatgctctttcactattttcctctctcctaaagatgttgccatgagatggaggggaaggggtcttatttgctgtctctctcagtgtgatacatagggaaaccaacacaagaaacggataccttttccaagactgtttaaggtccagtgttgtcagagccaaaaaagtcagaattctggcctgacagtttgaataatcagtgtctatttcaccaggtgtaactgatttgaatactgcttagaatacttacatcccttcttcatattcactaagagataaatttgactaattttgccttaattaaataaatgacagtatattacagttaggttttctgatttcttttgtatattatcatattacacagagtagaaacccattattttaatagctataaagtattttaatgcaagactaccagagtttgcttctgcataccccttttttggggggtacagtggagatacagtgagtagtgttttgcaaacttatgtgggaatggagcttctttttttccaaagaagttgttcacttctccttctctcagacctttcattttacccaagggacatgatgtgttcctgcaggtggtcatttagtaaaataatgaaacaaggcttgctatgaatggttgtgcaaatgtgcactgtataatccagagggcacaatttctactgcagtgtttgtgagcagtgctccttggcactgtgtgatatacagtcttggtggtcccatacaatggactctgggaagtggcattctttttgtaagttgaaagcaatggaattttggaagagaaggcaatttacgtatatagtcagagataaatgtcaactttatcctcccagtaagaattacaaatagaatcactttttatcttgtacttaaaatttcttatacttaaaataccttacacttggcattcctgtggtgtggtcaagttttgacaatgcctttcataaacccttttaaaattgattatagtcttgaaatttaagaggatatagtagtcatcataggtttactgccgtaataaacaagcttgcaatctctgtggcctaatgcaataaaggtttatttttctcacatgttacatccactgtggattgcaggtgggctctggacctaggtgtttgaatctggtggctcctaagtcaatcctcagagcccttcactggctcctgtgcctctggctgccagatgagaagagagagtggggggaaatgcacaggagacctgggagcagcatctgtcacttccacccacaggcattggccagtgctccctccattggctctgcctaaccacaagggaggctgggaaatgttgtctgtctctgtgtccacatggaaaaggcactggggtttagggagagggatgagtcgtcgtttcaaggctgacctcttttctctattttgtttcttctccaggagacttcttggcatcatcacaaaaaaggatgttctgagacatatggcccagatggcaaaccaggaccccgaatccatcatgtttaattagcaacaaggtggcaattattttcagaaaaacactgactgtgtcatttaaaaagaaataaatgatatgttattatcccaatgaaagatcatgcattggggacagcagaaacaaaagcttttttggaaaggcggggaagaaggatgaaacctttaaaaacaaaaacaaaaacatcaatgagtaggcattttatagctttaaccccgtatgagtttcaagctgtgtttcctaatgagtttgctactgctgtgggggcatgtgggtgggtaaatgatgtaaatgatgtgatctgtacaagtatgtggagcatgaatgctgactcaagaaacttttactccttctgctcaaggctgatgtttgtaacttatgaacacacgtgaagtgttgagtccaaaagacaaaggggcatcggcatgtcagcgtccttatttattggttcttgaagttttgctgctatgttactgaatcatactaaagacatttgcgcttactttgttgaaaaagaaaaagaaattaaatttgaacacagtgaaagctgcaagtatgccagtgggtccgctcacgaccgtcctgtttcttgctcctgttctcagcctgttatctggcttatccatcagtttctgaaccaacatcaggggcacctgccatgatgagtgtgaagaaatcatttctctatgcaagactggcatcctgggactgcacgatgaactattggagcatacagtactgcggtgtgtctcctcccatacaaagggacacatccttattttgagggtatactcacccgatcattgatttgcatccccatggcatttgcttcatttatttattgcttttgcccatgcattcaatattgatcagctcagcacttccatgggccatagccggtatgcccccagcctgccataagcgtgctttcattttcaagtagcatatgcaagagtccaaacaggctacccaatgttactacttatttttcctctcaggtcttatcagatacggctgtggagaggatgaggcatatgcgttgtcagttggaatccctccaaatggattgcaagagaaatactaaattgattctaaatctgttccattatcttctctgtaggatgcaaaacatccagttgtaatgtataagcatgcacttcatactagcaatcacagcacaggaggacagcattaaattttatatagccaatttgggcactgggcatctttgtatttgaacttaacgacacatttactcttttagtcaggatttcggtcttttctgcgggaaggaattaagctatgtattaggtccaccatacgatctgtgtaagtaagattatcccacttgccctttctctttagtctttgtcccttccttttcactaagtgcccctcatccttttcaatctcattgtcactggatagtgctgtatcacttaggtgtgcattcggctgcaaataacagaaaacccagcaaacactgaagggctggataagaaccctgagagggggtactccaggactgtctccataacatcattgggatccccatcccgttgctatttctttttcaccgtttttaccttttgtcctctggcttattgcctcagagttgcaagatggttcctgaactgtcaggtatcatgtctgctttctaagtgggaagaggaagggagaggcaagcaactaggtacaatgtctatcaggaaagcaaagcttccccagagacgctcagcttgtatccattgactggaagtctgtcacgtggctccccctagccgcacactagtgtgggaaggaaaatattgagctaggcacattactctctgaacgaaattcatattatcttattaaggaagagtgttggtcttcaggaggggaagtttgctgtattggatgccatcatcgtgtccttgtcattgcccttccggttttcattcttgctaaacccctgtgaatgttcttctaaccttcctgttccccaccccttttctcagatttgacctagaattcccagcccaaatccataatttcttagctctaatacgaattttcatgttggacaaaaacctagctacaaatgggtttctatggaacttctaattaatgtgcaaaatacatattttctccaggttaagaaattttaagtcagatcatgctgacacaataagaaaatttgtttgtgtaattcattgacctcttccttccaaaataacatcaagtagccacctcagtgtgacaatatccagtcaatagtagagaatttaatccttggtcctataaaagaataaaattcattgtcgtatttatagcacgtaagccttgagtaacaggtcttaatgttagtgttggtgttgtggtttctgcggaacgtttacaagtgaagttggattctcctgggctttaaatccaaaaagtcttaatgaccgcttcatgtagttcccctcttattcccctgtggtctcctcagagccagcgtgtgctgggaaagagtattagtcatagcctggctttatagaatccaggaggtccttttagctgaaacaagtggcttcaaaagggaacatgaaacagtgaaaagatagccaaaggtcagtgaaaccacagcatttctttctaatctggctgaggccatgggggggaatgaggggaaattatgcttccgggccaaggtcaccgagggggaccttgggatttgtgtcctccccagtgcttagagtagagatacctgcaaattcatggcaaacagttggaagagttacttgactgaaacaacccaatcttactttctttcgtaagttgaacctctgatttattgtggggttcaggctctcctcaatagaaggccagagttggacaggtggactaaggtcaaggatgaggagtctgcagtggggactaccacagcaaactgccttccttccgtggagtcctaactcagccatgtggtccactcacccaggggcccgggggctcagacaaaccccatggggaacatgctgccatgctctgtctttcttgtaaacgtagttgggtagggatcccaagggtatttgctctctccaaatgcagaacttccatccactttatctggtgatctgatgaacagcatggggacgtggaggtgaaataagcatctttcagaataaggtttttttttttttcctcttccagaaccaaaggctttagacatttgtagaactttctggattccttctgaatcgggttttaacataaaaaaccatcaacacatcatgggaaaggagctctttcatgatatacatcacatgtttcttgctctcactgaggaaatgtgttgtacaaaagcaccaaataagggcaccctggaagtgacatgtgtgtttcttctaagtcgtttttagtgcatcccctgcgattgcatgatgctcatgtggcttttagggaaaggcagaatgtgctagaagtcgaagtcattcaatattcagtgcttactgttactttgaaccaggtaatctcagttctttattcagtccttcccaaagaccttacaaaggagatgtgtaaactgatagattttgagcctaataagtcacagaaatggaaaattttagagcagtttgtttcacttaggtgagaactgattactttaaattaccaacatgtgcaaattctacttagtattcattattagatgctaagctggaaaagatgagaaacccaaggagaactattgaattaccacataattgtaatattatgctttaattttgtatgggcagtgttctatcagactaagcttctagcctttgaaatgatttacatgaggagagagcctgtatatctgacttgggaaacattaagcagaccctattttcactggcgcggtaataactatttatttgctatcctagaggtgctgggaatgagcctacgtgcgactttgatgagatatattcacatttggtgttggaacgaccacatagcaacgtgttggtttttttttattgtaacactctgtgtaaacgttgacaccttattaaatattaaatgtctgaactctatttttaaaaataaaacaagcacagagtctgcaacaaacatgtaaa

SEQ ID NO: 5 - DNA, 415500 bp, Homo sapiens
cgcccgcgccgccgcctcctcctcggtgcggttccgccgggcgcgaggagccgccgagacctccgcctgcgaacaaagaggaggccgtgcggggcgcggcgcccgcggagcatggcggaccgcagcctggagggcatggcgctgcccctggaggtgcgggcgcgcctggccgagctggagctggagctgtcggaaggtaaccgggcccccgccccgggccgggccgcgctgtcaccggggagggccgcgcgcggagggctgggggcgcggggcctgcggcggggcgggggccgggcccggagggggaggtgcgaccccagcccggagcgtgcgcgtcccccggacccccagaccccgcgccctagggacgtttgtgaggccgcgatcccccgcgctctggggacgtttgtggggccgcgattccccgcgccctgggggtgtctgtggggcctgggatcccctcgcgctctgggggtgtttgtggggccgcgatcccccgcgccctgggatgtttgtggggccgcgatccccccgcgccctgggggtgtctgtggggcctgggcgccgcgcggggacgcaggatgcagcgggcccggcgggatcggccttcccgtgcgctctgcgctggagccgcggcgtccttggtgcagcagcgcggtgcgcgccacctcctcgctggcgggttcggcctggaacgcccggccagatttcaatgcgaaacttgtcgttggaccccgggttcgatctctggtggctcaggccgtgcagcggtcctggcgcggcccgggggatcccacccccattgttcgcgggcgctgcgcggggagggctgggcggaatcgtcaacctccccccgggccgggctccggccttgccgtcctggtcctctcgtaggagggtttgtggcagatcagccaccgcggtcttatggagggttgtgtacgcctcttatttgctcttcatggcggagatcatgtgctcaactgtcataagtttcagatcgggctttgccaggtcttttccccaaaaccactgaagttcccaaatctgaaatgtttgatgtgcatttagccgtctctgggctcatcctggtcaggccattcctgtaacgtggggtggggtgggggtgggccggcgcgtctcacatttatatttggagcagtttagcatggtgaactttttttgggtaacggttttgtgagggccggcagccagaaagtaaactcattcgtgccaattttcaccggcagggaggagctggtgttgactttatgttttcctttttaacactttcagggcaaagaagggagtgagcaggggccatggtgtgcagccaactgcctttccagacttctggggacgggaaatggtactgtttttcagtttcagatgtggggttccgcgaggtgtgtcagtgtcctgtaacgtgacacagttggcggggggcagagtcttccaggcctgtgggcttggctgctgccctcctgaggagctgaggatgaggagggcatggctaggaggcgggagctgccgtgtgcagggttcggatgtaaactggtaagtagattgtgcagtgcagacagctcgtttggtgggtaaggagtgtatcatttgcaaaaggcccaccctggttatctgattgtgtcagccttgggtaggtttcccggcttgcgtctcggcccaggtgcacccctgcctgcagcaccctccgtgttcgctgtctcaggacaggggcttctgtgctgcctgcatcacactgatgtgaagtgtcagtgccccatccaggtcagcagagcgtagcgcccctgagctcagcagggcgagccccatctgagggttcccccacccactgctagcccagaagttggacccacatttgttcccagagtctgggatgtctatgggaatgggtgtcctgtgttgggcattgtggccttttgaggtgacgacacttgcctgtcagttgctcttggagggtgagtgatactgtcttgctgcccagatgatggcaaagccactttcgacgaaggtgtgctcagccgaattccctgtgaacaccttgcgtctgtacaggttttttaaaaagggcttaatgagttagtttcttattgagagaccaggcagagaaaggggtgtgtgtgtttgcatgcaggaagcctaattatatttttccttccacatgaatcttgctgagatctgagctacacatttaagaagaaagggtgagagggttgctccgtggctctattcagcctctctgcaccctccggcctgtgctggccccactgcctcatctgtttgctggatggtctttaactttgctgtgaagtgtgggtttgcccaggttgagtttatgggggtagtgctgtaaggtcatttggaattctctgtctcataaccacataaaacagttttacaggcttaaattagatgaatcaacttgttttccagtattgcttaatagaaatccaagaattgaaggatcaaaattctgtgtttctttatgttattggacttcaaaaattcctcaatgtatctgctttcagagtgaaagctgaaaacagctgttaatgctgaattatttcccatcttcaatcaaaattcaagtggagagaattctttaagttggttgtcatcattttattaaaatatcagaaaatattatagaaacatatgtggaatttccagtgctcatttcctacagaggaggatggaaaaagttccgttttaagcacataacatagactgaaggaaagagtagagcattcccctgaggttcctgtgtgggctgccagcctgcgtgggttacgcattgtgtgggtttctagaccctggtccagttctgctgtgcccgcctgctgggcgccattacatgcactgctggtgtcctgctttgcagggctgcaggggcacttcctgctgcggggccgagggctccatccttcttccactgcctgtccctgtcccgtgccctgtgccccctcacaggggaaggtgaggccagctcacaccacagagcatgcggccagcaaaacacaagggctctctgtggggagaagtgctgggcagccctcttgtgggagctgatggcctcgaatccatgtggggatacattcaggttgtgtggccaggggggtcatctcctcacatacttgggtctgagtgtgagccagggaggaggccatgcaggtaaggaggccacacggtcaggaggctgtgtgggtggggaggttgtgcgggtggggaggctgtgtgggtgcggaggctgtgcaggtggggaggccatgagggtgcggaggcccctcgggtgaggaggctgtgcaggtggggagaccacgtggggggaaggctgtgctagtggagaggccccgcaggtggagaggccgtgagggtgcggaggccctgtggctgaggaggccctgcaggtgaggaggccatgagggtggggaggcctccaggtgatctggagctccattctggggagggtcaaggaatgagagggctgtggcggctgctttctcatactcctttccccagaatattttcttctcccttctcttccctacatttttgccctttataattgggtattcttttttgtggctttaaagggcctaaaaataatttcattaataactgatactttacatggaattgccaaacaaattggagtggaagcagaaaacttccccataaagacaaactcatgtcttatttattttttaatttttgagacggtctcactctgtctcccatgctggagtgcagtggtatgagctcaactcactgcaacctccgcctcctgagttcaagtggttctcatgcctcagcttcttgagtagctgggattacaggtgcccgccacaatacctggctaatttttgtacctttgtagagatggggtttcatcatgttggctaggctggtctcgaactctttacctcaggtgatccgcccgcctcgacctcccaaagtgctgggattacaggcatgagccactgtgcccagactcatgtcttattattattattattattttaaaaaagattgcatttagctgttgattcaaattaggaagtaagtttctctgttgactggtcactgatctttttgggcagtgcatgcttcagaaggagctctttcccatttgtttaggaggtgctgaattattttgatagaactcataatatagcctgcaaaaattgttggtttttggtggaagagaagttttgaaaaataggtgccatgctttgtactctgtggctttggtaattgtcagcgtgttccatgcccactgactccatcctccatgctctgctctgctagttaatgtagccgattccttcagcgagcagttatgctccacagtagtgcagcctaatgttttttcagcaggggagaacctgcttgcagagggaggtgaaggctcgcgcacgtgccaggtcttcctgtgttggttgagggacctgtgtgcgtgtgtttatatatatatatatatatatgtatatatatatatatatatatatatttttttttttttttttttttttttttggggaccaagtttcactcttgttgcccaggctggggtgcagtggtgcaatctcggctaattgcaaccttcgcctcctgggttcaagtgattctcctgcctcagcctctcaagtagctgggactacaggtgcccgccaccacacccggctaattttttgtatttttagtagagatggggtttcaccatgttggccaggctggtctcgaactcctgacctcaggtgatccccctgcctcagcctcccaaagtgttgggattacaggcgtgagccaccgtgcctggctgtgtgtgttactgttagcacatatgaatacgtgtcaagtacagagacatggtcttcacacagcctgcacgttgctgtcgccaaagaggggatcctaaaatgatggcccagtgggaggtttgtaggttttgggggtggctttttcaggacacttggcacaaggtcacagatatttgtggctttggaatggagttctgccctcggcacccccagccctgtgcatttcttggaggttccaccctgcacagtgaggaagtcacacgcctgtgtaagagctgaccaggggaccaccttccagagcctaagagaaggtcctgaggactctgtacacattattttcattgaaaagaaatagtttactctgaaaaaacaaacgtgggaaagctgagcttcattgagcctcacggacagtttgttgtaactgagaggagggtaggagggtcagtgggttcaggagggtgaggacttcttggccaggtagcgttgttacatctatctgaaagtcacagataactaagtatcaagtcgtcacagatatttaagtatcctgaatgagatggctacctgcatgatgcattgaaaacatcattactggttgcgtgcaagatgcattgaaaacattgtgacctgcacagtggcagcactgatatgtgtgggcttttgaacgtgtggactggaatgttaagagtccttcagagttatgacaatagtttgatttgaatgttcttttcttggcgaataaatgctatacatcaaatttagccaggaagctaggaaagcgaacccacatgaagggcacaggcccataggctgctccaggtgccgttaggggcccgagccacgcgcttcccgctcagcctcctgagagccatgacggcgtctctgttctgcctcacactggacttgctagtttcatattcttgttatggttccgaggctacaagcggttggattctgtgagtcactgtcttcctcctcccagctgctttcaaatgggtcgtctctttttttagaactgattttttttaatcagtgatttatggggtgagttgtagcgctctcctgaactgcagagggagcgcactgaggaacctgggttttgatgctgtgcacattggctgagtcaccagcccagggccccgtcagtcccattattaagctcatttcttgctcttctcatcgttactcagacgcctttaaaaaagcaaactcctgcttgccgtcactggctgtttggcaaatgggtgtttaccctggaaagacgggcattttgtcctctggaacgtctatggcgccctttggtgacgtggtcggtttctgaccactctatcttgtgggtgtccttcctgcttccaccttcccttcccgaacgcctccacctccagggctttaatcttccttctgtgtgtgtgccatgcagggtttatgactattgtgccaaaaacttgctacatctcaaaagaagtaattgcatccatttgttggtgatgatcataaacagtgccctttaagggagactaattggtaaacccggctgctgtgggtagaaagacagcggtggctgcggaacgagggctccgcctcttcggagcctgcacaaccgtcctgccttctttcttcaatatccagtaggggagttaattttaataagcccttgaaagcaacaaggcaggaaagtgctaagacattgagttgtgagatttacaattacaaccagcagcctctcattttcccttcgctgggggttgctgcttcggttttgggctgcggggtatgttggtagtgacatcggccctttgtgctgcgcgactcatgaattgagataactttttactaagtgctttgtgcagtaggtatgaaaatggggaaagaaggaacactgtccagggtagagaggcgtggagagatgctgtgactgatggtaggtcttttcttttgggctcctggttttaaatcattttttgtttcgctaatagcttggaagatggtttttgtgtcttaattcaaagattgaagactgtgggccggacccaaactaattccattggcatcagagagagggattctttacatatttatctataggcacgattgattttttttttttgctgaattatctggttagtcaaatcatatattagagaagtaatataccattaaaaattaaaaaataaaaaatgtatctgtaaacatatcccccttccattccagtctttgtctctgtgtaattttagaacccttgagccatgacgtacatagagtttgtattcttttaatatcttgctacttcatcgttttaatgtttaatctttgggttgatgtatcacagtttacttgaccatttcttacaggtgtttggtttagtttttttttttcctttaactttaatgtaaatttgggtgtttggctggtagttttagcaggatttaaggcagagcctcagttaaggccttgtatcgatttatggtccctagtttgaggagggaggtggcaatctgccctttcttctaaaattggtatgttaaatcacaatggacatttacttgattttgagcacttggggctcccctggggttcactggtgttgcaaggtcagggctggggatcttctgctggagaggccccagtgtgcccagcgcagggtcctgagtgcgttgctgcaggaagaagccctggcctttgtcctccagcggccgttgctctgggaagagctggttgctccaggaatgaggtctatgctctgaagcccatggtcagcagaccagcaaaggtcagcacagaagaccttattatgtgaatcattcatttaacaagcattcatggaatacacactccatgcagttggaacttagagtggaaggccatcagctcactgttgcctgagcagaggcttggtctctgggtccctgttgcagcctctgctcctaggagatacacggtgagtgttggggggccctccacaggcacagttgccgaacagggacctctcccaagggccttagccctgggccctgagctctgaagaggaggaaggcgttcctggggccaacttcccttctggatgctgagctctgcacagagagaaactcttccacaatcactgcagtgaagttcataaaacaaataacactttagagactggggtctgcattccctggaatttccgtggccgtagatggtggctgtaccatgtgactgagggtctgtgttccctggaatttccgtggccatagatggtggctgtaccatgtgactaagggtctgtgttccctggaatttccgtggccataggtggtggctgtaccatgtaactgaggggctgcattccctggaatttctgtggccgcaggtggtggctgcaccatgggactggggtctatgttccctggaatttctgtggccatagatggtggctgcaccatgtgactgagggtctgcattcctcggaatttctgtggccatagatggtggctgtaccatgtgactgagggtctgcattccctggaatttctgtggccacaggcggtggccataccatgtgactgagggtctgtgttccctggaatttccatggccataggtggtggctgcaccatgtgactgcggtctgtgtttcccaatatccgtggccatagatggtggctgtaccatgtagctgaggggctgcattccctggaatttctgtggccacaggtggtggctgcaccatgggactgagggtctgcattcctcggaatttctgtggccatagatggtggctgtaccatgcaactggggcctgcattccctggaatttccgtggccacaggcggtagctgtaccatgcaactggggcctgcattccttggaatttccgtggccgcaggcggtggctgcaccatgcaactggggtctgcattccctggaatttccgtggccacaggcggtggctgcaccaggcaactggggtctgcattccctggaatttccgtggccacaggcggtggctgcaccatgtgtcaggtcctctgtctcaggagttggtgccattgtctctattactccctcgcctgacacagagcggcagttcttgactttaccactcccaggaagcacacaggcaaaacaattcagaacaatctgttttgaatccttgttttatttccccattccctttctcatcgcatggaaattcacatccctgtaaagctgaaaatggtgtggatctcccctgatggtctttccaaggaattatcagcaggtaaactagaccgtgtgggccagtttacctgaaatgaaaacagaaacgtcactgggctttgctgggagattcagcgtctttgtcagtgatagaatcatcctaagcaggttgtttgttgtgctgcagatccacacggttagctgtgtcaggattaaaattacccagtgcggacagtgtagcttaatcctcatggaagggtgtcaagtacattgaagagcagctgccgagcctgccattgttgggagaggggcaggtgcatctctcgcttggcccagtgctgcaggaggccgggctcatgtcaggccgtgcgtgtgagcgggttggatttttagcatgctgggacggtaaagcacaaacatctatttttaacttgtgggtgaccttcttctgtgctgcttgagtctctgtgggcctttctctgcttccttcctgaggagtctgtgccagggtcccaagcgttctctgggctgcacttctgtgcctgcctgctcaggagcctcctcctggtggctgtgggaccgggctgggcccacactgtcagcatcgtccagggtaagcaagcccatccctccccacctcagtgtccccagctgttgaatggggctaataaaccgactgtcaggattaatgtggatcagatgcgctcatctcacagccctgcttggtaaatagccgcttccactctgtcctccaatgtggtcctccatttattttctttacctccatttatccaggcgattccaggtgacagtgactatcaagaagggcgtacagaggaaatctgtggaagggagctcgaggagcagatatgggcgcagggaacgcagtgcggggagcacgggtgcggggatcatgggcatggggagcacagatgggcgtggggaggacggatgcagggagcatgggcatggggagcacagatatgtgtggggagcatgggtatggggaggacgagtgcggggagcacgggtgtggggagcatgggcatagggagcacagatgggtgcagggagcacaggtgtggggagcatgggtggggggaggatgggtgcggggaggatgggtgcggggagcatgggcgtggggagcatgggcgtggggagcacgggtgtggggagcaggggtgtggggagcaggggtgtggggaggacgggtgcagggagcctgggtgtggggagtacagatgggcgcggggagcctgggtgtggggagcatgggcgcggggaggacggatgcggggagcatgggcgcgaagaggatgggtgtggggagcatgggcgcagggaggatgggtgcggggagcctgggcgtggggagcagagatgggcacagggagcacgggtgcggggagcaggggtgtggggaggacgggcgcggggagcctgggtgtggggagtagagatgggcgcggggagcctgggtgtggggagcatgggcgcggggaggacggatgcggggagcatgggcgcagggaggatgggtgcggggagcatgggcgtggggagcagagatgggtgcggggagcacgggtgtggggagcatgggcgcggggaggacgggtgtggggagcatgggcgcggggaggacaggtgcggggagcatggacatggggagcagagatgggcgcggggagcacgggtgtgaggagcatgggcgcggggaggacgggtgtggggagcatgggtgcggggagcatgggcgcggggagcatgggtggggggaggatgggtgcggggagcatgggcgtggggagcagagatgggtgcggggagcacgggtgtggggagcatgggcgcggggagcatgggcgtggggagcatgggcgcagggaggacaggtgcggggagcatggacatggggagcagagatgggcgcggggagcacgggtgtggggagcatgggcgtggggagaacgggtgtggggagcatgggcgtggggagctgggcacagggaggacaggtgcggggagcatggacatggggagcagagatgggcacggggatcacgagtgtggggagcatggctgcagggaggacgggcgtggggagcatgggcatggggagcagagatgggcgcggggagcacgggtgtggggagcttgggtgcggggaggacgggtgctgggagcacagggtatggagagtgcgtgtgtgcttcctctgctctgacagatgctgccgaacacgtactctgtgctcagatgggtcagagcctcagtgcctcttttttaaaaaattctttctttttttaaagataggacttctctcttcctggtggccccttttagtcgatactcttttaagcctgcttttccagaggaaagctgggaaggatggcctatataggttccagtctgggcatatctggaagaatggcctgttttaggtttgagtctggtgtatctggggacatctttaaacttccactcagagttccagagccacctgtagggactccccaaatgtctgctgggactttccccactgctcggggatgatgaagagcaggacctcaccctgccacgacctctgaggtcctccttcctggagggcagtgccttggtggccagtgtgtgcaggaggctgggctggcaccttcgggctatgctctgcagcgggggctcatgacatgggcattcttgtgctctgcactgggactggtgacgtggggcatcctcatgcactggaccacgccgggtgcacatgagccagacagctcctggaattcggagcctggctctgtctcaggccacccacctgtctgtggcacttctgggggattgtggggactgtatgagtctgggtctccaccctcactggctggacacctggccaggctggggctttatgtttcaccatcccctgttccgagttgtgtgaatatttattttcattacctactctcataagctttcctttttaaataaaaaaatcagagacagactttgaagttccctggccccaccctttgtggacctaatggtattgcagaaattatggcttcaactatgtataataactgggactactttaaaagtaacataaaggaacaaggtggagtgtccgtttcaagcagtacatcatgctggattcttaagtgaacattatcaggctttcaacacattttctctttttatttactttggagaatataatggatactcagaagctgttgggatttagtaacaggaagtcatccttaaggagctatttaagcaagggggcagttggagtaaatgtaagttatgaacacacacctattccaaaccagagaaataaaggcttcaattgtgctggggttgaaacttggtggctagtgtgtctttcctgcccacagtgactgtggcagtgctgtgggcaggaaattctggaaacaagacttggtgccagtggtagtttttgtggtgattcatttgctttcagctcaagtgactatagtcttccttgcaagtggttaggtctccaccaatggaccacaacattgacataggacaaatgagaaatagcacttgggtttttaacaattattctttttaatggacacattatagtacatatctatgggatacagcgtgatatttcaatacatgtttgtcatgtgtaattagcaagtcagggtaattagcatgtccatcatctcaaacatttgttatttcttaatggtgggaatcttcaaaatcctctcttctagctgcttgaaaatatacaataagttgtaaactatagtcaccctacaaggctatagaacactaaacctcatttttcctatctagatgtaattttgtatccattagttaacctctccctttctcccttcccgccaccctttcctgtctctagaatccactattctaccctcagagggtagaatattattttcctcatagagatctttaaccctcttggttagatttcttctgaggtatttttatttttattttatatttttgtagctaaatgggattgctttcttgatttctttttccactggctcattgttggtctatagaaatgctactgatttttatatgttcattttgtattctgtaagtttactgaatttgtttatcagttcaaagagatttttgctggagtcttttttttttttaatatataagagcatattgtctgaaaacagacaattagagctcctcctttccactttgggtgcccttgatttctttctcttgcctgattgctcttgactaggactttcagtactgtgttgaataggagtggtacaagtgggcgtccttgtcttgctacagatctcagagaaaaagcttagtgtttccccgttcagtattatgttagctgtgggtttgtcacatatggcctttattgtgttgaggtatgtttccttcagtgcctagtttgttgagagtttttatcatgaagcagcgctgaattttatcaaatgctttttctgtatctattgaaatgatcctatggcttttgtccttaattctgttgatgtgatgtagcgtgtttattggtttgtgtttgttgagccatccttgcatcctgggagaaatcccacttgatcgtggtgtataatatttttgatttgctgttggattcagtttgttagtatttcgttgaggatttttgcatctgtgttcatcagggatattgacctatagttttctctttttattgtgtccttgtcttactttggtatcagggtaatgctggccttgaagaatgaacttggcagaattccatcctcttcaatatttttggaatagtttgagaagaattgaaataaaaatttgtagaattcagctgtgaagccacctagtcctgaggttttctttgttgggagactttttattattacttagtcatacatgttactcattattggtctgtttaggatttccgtttcttcttggttccgtcttggtaggttgtacacgtccaggaatctatcgatttcctctaggttttccactctgttgacatatagttgttcataatagtctccagtgagcccttgtatttctgtggtatcaattgtaattctctttttctgtttctaattttacttatttgggatttctttttttttcttagtgtagctaatggtttgtctattttatttatcttttcaaaaaaccaacattttttcccatcttttgtattttttagtttaattttatttagttcctctttgatctttgttatttcttttctcctaccacttttggatttgatttgttcttgctcttctagctcattgcagttcattgttaggttgtttattttaaatcttttttttaatgtaggagtttattgctataaactttcctcttaatactgcttttgctctataccgtaggctgtgatatgttgtgtttctgttttcatttgtttcaataaatttttaaatttccttcttaatttcttcattgacccactggctattcaagggcatattgtttaatttctatgtatttatacagttttgaaagttcttgttgttgatttatagctttattctgttacagtctgagaatatcctagatgtgatttcaattttaaaaaaatgtattgagacttattttgtagcctagcatgtgattgattctagagaatgttccatgtgctgaggagaagaatgtgcattttgtatctgttggatgaaatgttctgtaaatgtctgttaggtccatttggtctatactgtactttaaattcgatattttgttgttattttctgtctagatgatctccagtgctgaaagtggggttttgaagcccctactattgttgtgttggtctctctctctctctctctctctctctctctctctctctctatatatatatatatatatttgagatggagttttgcttttgttgcttaggctggagtgcagtggtgcaatctcgactcattgcaacctccacctcccaagttcaagtgattctcctgcctcagcctcccaagtagctgggattgcaggcatgtgccaccatgctcggttaattttttctatttagtagacacagggctttaccatgttggccaggctggtcttgaactcctgacctcaggtgatccacctgcctctgccccccaaagtgctgggattacaggtgtgaggcactgcaccccgcctctctatttagatctactaatatttgctttatatatctgggtgctttgttgttgggtgcacatatatttgtaattgttatgtcctcttgctgtgttgatctccttatcattatataattacctttttgtctcctttttacagtttttaacttaaattgtgattaatctgaaataaatatagctactcttgctcacttttgatttccattaatgtgaaacatgtttttccatccttcatgtttagtctatgtgtgtctttacagctgaagtgagttttttgtaggcagcatagagttggtttttctttttttaaatccactcagccagtctatatcttttaattggggtgcttggggttattttgctactgatatcacagtccagacattaagattttctcacttagttacttgtacacaaattaatatgaaaaggaagtagagtttttcttttgtctctttgaagatagtgatggattattattttgatttccatacaagtgagggactcaccgtccctgttgggattttagaattcatttcctgttattaggaacagcaatgatctgtaatgggttcctggaatcctccagtgatggtctcaatatcttaaaagtttcctttcatgcctcattttctgtttcgcccctagtagccacgcacctggggcaggagacggccttgcatttccttgttttcttgatgactggttaggtttagtgtttgacacagttaggattctggataaaatcagcccttctgggaagtgtgtaagtcaaacaaggacgttctggtggcgttatacaggtttcccatgccccatgagtacaggaatagctccctggggaaggagtatgggcacatgatggcagggagccattcttggatggccccgtcttctgcaggaattctcatgcagggagaagcagcacacggcgactgagcgggtggggattctgctgatagttttgattgttatgatttgctcctgaaaggtgatgtgggatgaagagcaatatttagaatgctgacattccttgaaacaaagatatagaaaaaatcttataattgtagggtgccttttagttttcagccgctctcatgtggatcctttttcgtccttctgaaatgctttcccaggagacagcattgctctctttgtacagatgaggagactgggtttcaaatggttaggaattcatcgcaggcattggaatctttggtttcctggaacattttctattcaagtatagaccacgtggcctctaaaggctggctcactcttaacaccaagattggggatccagcctcacctctggggtgggcggcaggagctccacagccatcctgggtgctctggggtggggtggctgagctgtggcagcccctcccagctgagcagcaaggccggggaaagctcattccatcccccttggttctaaccaggtacaggcttacactgcacatttccttagctgggaacctttagaactttacatttaaaatctaatctgtgatccagggggttgatacatgggtattcactgtacaattcctacattttttgtacatgtaatttttttttatgtgtgtcatggatgacaaaagaaatgcaacccctccgagttagcttttctgtatagcaccttctagaatcaggaggctgggcagggtttagtttcatcagaaatctttatgtttctggtcaagagacggcactattaaattcttggttgtgtggtttctggaaaagaaatattctaaatgagttccaggaatcacctctgtggcatttctacaggaaaagtgaccactcttgaagcttcgccatcactcacaagaatgattgtgatggtttctaagcggtcgccagccaatctttagttcttttatgcagagtgctttcattcgaagtgaagtgcccttctgtttaatggtgacctccagttattacagggattgcagccgcatttgatggatgtgaacctgctcatctctggctccccagcctcgcctctggggtgggcggcaggagctccacagccatcctgggtgctctggggcggggagtccctagtgggagtggacagtgcatggccgggacgttcctgtccgatgttccacactggcgtgtgcgcgtctctggcctgtttccttcgtccgtgggtctgtggcgttttctccatgcgtgcgtgtgtggcctgttttctccgtgcgtgcctctgtggcgcgtttcctccatccgtgcatctgtggtgtttcttccgtccctgcgtcggtggtgtttctttcgtccgtgtgtctgtggtgtttcctccgtccatgcgtctgtggcctgtttcctccgtccatgtgtctatgacgtttcctccctccgtgcgtctgtggcctgtttactccgtccgtgcgtctgtggcgtttcctccgtctgtgtgtctgtggcctgtttcctccttccgtgcgtctgtggcttttcctccgtccgtgcgtctatggcctgtttcctccttccgtgtgtctgtggcctgtttcctccttccgtgtgtctgtggcctgtttcctccttccgtgcgtctgtggcttttcctccgtccgtgtgtctatggcctgtttcctccttccgtgtgtctgtggcctgtttcctccttccgtgcgtctgtggcgtttcctccgtccgtgcgtctgtggcctgtttcctccgtccgtgcgtctgtggcgtttcctccgtccgtgcgtctgtgacgtttcctccgtccgtgcgtctgtggcgtttcctccgtccgtgcgtctgtggcgtttcctccgtcggtgcgtctgtgacgtttcctccgtccgtgcgtctgtgacgtttcctccgtccgtgcgtctgtggcgtttcctccgtcggtgcgtctgtgacgtttcctccgtccgtgcgtctgtgacgtttcctccgtccgtgcgtctgtggcctgtttcctccgtccgtgcgtctgtggcctgtttcctccgtccgtgcgtctgtggcgtttcctccgtccgtgcgcctgtggtctgtttcctccgtccgtgcgtctgtgacgtttcctccgtccgtgcgtctgtgacgtttcctccgtccgtgcgtctgtggcctgtttcctccgtccgtgcgtctgtggcgtttcctccgtccgtgcgtctgtggcgtttcctccgtctgtggatctgtggtgtttcctctgtctgtgagcctgtggcctgttttctccgtccacgctggaggccgtcgcttctctctagtcaccacttactgatcgctgtgtgctgagcctgtgtcaggcgtgtggcatgtgtcccctgtgtggcaggggtttgcgtgacacacagggacacacgctcggggagccgcagggatggggtcatagccacgtagcggagccctcggtctgaggggcttggtgcccacccagctcttcctgaagcggcctcggggcagatcccagctctgcttcctctcctggaggcacctcatgaagtaaattaagcaaatccaaggtaggaaacggttttgaaatgagacctggtttcaggtgtgtgtggtcatttctctctacatgtttacttcatataccctgaatgatatacttttccacctggtataacaattaattaccagccattactggtacaaaattccatgaagaatatttgaggaagacatagtctcaaaaacatgcttcattttcacagctgtgatttgcatggtaaagctgtcaggactgtgactttcttttgttatcttatatttttagacccttgaaaggaagttatttagtgattacttaaaattgtgaaaataatctaatgattagagaatctcattagaacaagtattatattttctgttccttatgtaaatgaaatcatcttaatccaggccgatgttggcaggaatggtcacgtttaaaatggataagatgttaatgtgatgtgcagccgtccccctatgttgtctctggaacattccagaacatccatctcaattctcacttgttgacaccctaccctgttttgtgattattcttgtttgcatcagaattttgaatccacgtacctgagatgatacttacgtatgcgtgtacacatgcatgtgtgtgcatgtgtgtatgtgtatgtatgtgcatgtacgcgtgcgcatgtgcatgtgtatatgcatgtatgtgcgtatgtgtgtgcatgtgtacgtgtgtatatgcatgcgtgtatgtgcatgtacgtgtgtgcatatgcgtgtgcatgcatgcgtgtgcgtatgtgtgcatacatgtgcacacatgtacacacgtgtacatgttcatgcatgtgcgcacgtgcatatgtgtacacgtgtatgcgtgtacatgtatgagcatatgtacacgtgtggatgtgtgtgtatgcatgtgtgtgtgcacagatatgccttttcctttcatacaggctgttttgagtattgctgttaggcagtgacaactttccgtttcctcagtcagaaaatgggtagctcatcattaataaagatgaacattcgatatcaggaatccctaaaaacaatggaaattgtcatattaaatgaataaattccaaaacaaagatagtgttctgtactgtgtgtttacattgaactttcttataaacattggtatgaatgtttcccacttattggaaatcacatgactagtttaagctgaaacgtggaatattctgtcttcagatcacttttgcatatttatgattgatctgttctgctgttctggaagctctgaaaaccactcggtcttaccctagctggtgccacagttgtgagaattcagggaaacaaggtgtttgccagtttaagtattttagatgtcaagctgcctcttacctgcatcataaaccagtcttaaagaaagacacagtgtgacttgtagtggattatatcagttttattttctgtggctgaatcatcactctacattgtgaattaatgttatttttcggctcatcttcataatgcagggaggttctccagtgttgagtgcaggttcagtgaaagcgctaacactgttaccacgggcttaaacggacttgttttctgaggcgataaccctggagtcaggcattcagtgtctgcccatcacttggttccgagttctcggtcccctcttgctctcctccccccgcacccccttgcttctgtcttgtcttctttttgactaacaggccctctgcagatggtgtgttgggggccggggtctgctgtgagtctttgataaccttgggaaagaactttttctttggagcaagacccctctcaataaactttcagtagcccaactattgtccgttgtgtgaactatttgtggaaaatgctcagcatttttccttggattctggctgatctttctccacctgccaatttctcctcagtttgccgtgtctgtaccgtcaccaaccccgttccagccgcggttacatgtaaagtaattgaagcagagctctgcagatgagagagtgtgtgtcgccccccgagttcccttcctggcctctgagtgtgagttgtgttttgttccgagggatgactgaggctcctggcccctgttttggagcaccccacaccaaagtgggtgtaaaatgaaaaaagggtttatgctatattattgtaattcatggagcagatgataaacatgcttgaatctgaacagcagctgaaaatgaggacatgttaccagtttggatgttggatgaccttcttgaaaaaagcttttgtcatactttagaaactgtgcatgtgctgttttctatttcatacttagaatctgtacagtatgtgttgtatgaatgtgttgtatgagcgtgttgtgttgtatgtgagtggcatgggttgtatgtgtgttgtatgtgcatgttgtgttgagttgcattcattgtatgtttgagtgttatgtgttgtatgagtgtgttgtacatgtatttgtgagttgtatgttttgtatgttgtatgagtgttgtgttgtatgaatgtgtgttgtatgagtgttgtatgtgtatgttgtatgagttgcatgtattgtatgttgtatgggttgtatgttgtatgagtgtgctgtacgtgtttgtgagttccatgtgttgtatgttgtatcagtgttgtgtgttgtgtgagtgccttgtacatgtatttgtgttgagttgcatgtgttgtatgttgtatgtgttatatgttgtatgttgtatgagtgtgttgtacgtgcatattgtgttgtgagttgcatgtgttgtatgagtgtgttgtatgtgtatgttgtgttgtgagttgcatgtattatgtgtatgcaatacacatatatgttgtatgagtgttgtgttgtatatgttgtatgttgtgttgtgcatgttgtgttgtgcgtgagttgcatgtgttgtgtgtgttgtatgagtgtgttgtatgtgtatgttgtgttgtgagttgcatgtgttgtctgtatgttgtatgagtgttgtgttgtatgagtgttgtacatgcatgttgtgttgtgagttgcgtgtgttgtgtgtggtacgtgtatgtcgtgttgaatgtgagttgcatgtgttgtacatgtgctgtatgagtgtgttgtatgtgtatgttgtgagttgcatgtatgttgtatgtgttgtgttgtatgagtgcattgtatgtgcatgttgtgagttgtgtatgttgttttgtatgagtgttgtgtgttgtatgtgcatgttatgagttgtgtgtgctgtatgagtgcattgtacatgtgtgttgtgttgtatgtgttacgtgtgctgtatgtgtgtatgtgttgtacgtacgtgttgtgttgtgagttgcatgcattgggtatgtgttgtatgagtgtgttataaatgcatattgtgttgtgagtagcatatattgggtatgtgttgtataggttgcatgtgttgtgtgtgttgtgtgttgtcagtgttgtatatgttgtatgagtacattgtacatgcatgttgtgttgtatgtgagttgcatgttgtcagtgtgtgcgttgtgagaggcgggggcatccacgtgactgctcctcagcaagtcctgccgtgcagccccttctgagcgtgcgtcctcccgagtagcctagaagcagcagcatgtttgcctctgcccctccccaggaggcctcagccaggtcctgtgctcagcctgccgtgggccatctgcctctctcgtctctctctcgtcgtcatcctgcgcctcctcccagtcctgagtagctgggattacaggtgcctgccaccacgtctggctagtttttgtattattagtagggatggggtttcaccatgctggccaggctggtcttgaactcctgacctcatgtcatccgcctgcctcggccttccaaggtgttgggattacaggcatgaaccaccgcacctggtccgtctgccttttagttacaacctgtgtgttttctgttttaaatttcatttttccaggtcagagcagtagtttctttttcgtggtgttgctgtgaatgtctgttatgattaggagactgggtgggtgccctctccctggtgcctggctctttcacatgaggtgggggtcagcttagctgcttctgattttgggaggcgcactgcttcttggggcagcttgccggccggggtctgcctgtggtatttcctggggagctacatctgtccccgtaggcctggggaagtaggcaggccctgagtacacgcctcaacacacgtgccttccaccagcccccaggcccacgtccagaccccagctgcgtcctgtggtagccagttcagctgctgccaccacgtttattgaacttttaatagctgtgcgcagacaggccacgggcagacaggccacgggcagacaggccacgggcagacaggccacgggccgacctcgtggctttgcttacccccagttctatgttacctgtgtgcagaaaccggctgctcccggagtcctgcaggcttggtttccccggccccgactcaggccacaggatctcagtcttgggtgattctgctgccgcgggccgggctctgggtgccagtggattccccacgcgcggtgttactcccgtgttcacatcagtgcgggagggcggtgagggagggaggcggggacgctctggattcttctccctgctcctcaccagctctgaacgcagaccagccgttcgcctcgttgcttttccagggatgttgtgagtctttcgtgggtagggagtgatgccctttgctttcttctcgctttcccggtaggtgctgaaggaataattaataataataaggccagttcggagaaaacaaaaactcacaattacatatgtcacccggactcgtattattccagatagcccttctttcccacgaactcacagctgctcttcgttcctccaccgtagccacgcgtggagggagagctgcgggacctgggcctttccagggtgctgccggcctgcgttggtgacggccagcgctgagaagttagagcaccccataagtgccacggcaaagacttcggcgtctgttgggggaggaaagcgcttctttgagtgatttccacttgattatttacctcttatcagcagattgtgtggaaggatgagtgaattcagtgtaagatttatggagtgttcctgtaagagataagcctggctcttgttttcctttcgatctcgtatatttcatcgggttcgtttgattgatgtgttttgttttgggaaagcggctgaggaggagtcacgtgagtctttgctcagggattttccagtgtgggaatctggcgctgtggtttcgcgtagcgtttggttctggagggtggaggacgatgtcccagtccgcgtgtgcctcgtcacgtggcggcgaaagcatggattccacgagtcttttgctagagaaaatccaggcgctcccaaccaactgtgtgtgctttccttttggaaatgtctctaactcatatactgaacttagaatttatttagtgtttcttatgtgaagtttcctggaactactgaaaatattttccatgctagatgatcgcgttactggactcacacaattaaaactttttctttagattacataattatttattacctatcccccgtttttcttttcagttaaaaaagcaccacctagaacaatgtcctaatgatgccaccatgattagtgttagaatttagctgtagagtgaggttaataatgaattaacaatcactagtatataatataaagcacggttaaggtatatatgtatattttatgaaccatccaaagcaaaaaataaattagggtcaagagaactcacaggtgcagaagtgttatttttattttctgttttattcaggaaatttaaatctttaaagctgtttttgttttgttttgttttgtttttttaaatttcaaggtcaactccaacagaattgatctgttcctcagcagacctaggggagagtacaggtgctgaacagacctgggtatctgctagtcgcgattcagtagatattttcttgttagttggtaattaaaacatcgttataaaggttttaatgtactttttgagctttattactatatattccttcaggagtctgtgagaactctctactttgttttttcccgtctatttagtattaagttaggagttttaattccttctaccctgatatttatttaaaaattccctatatatttgtagatatatatttggttcattttaaaatgcttgatacattaacattttaaaatatcaaaaatatttcagaatatacattttttaaaatgtaaaaagtaacagtataaaaaattgagatacataaattttaaaaaatcatccttacaactcttagtaccaatgatttctctgtagcattgtaatgttgattaacccggacatataacaatgatcaatagtgttaatgtgtcgagtgtataactgggcttatgtgtgtcattttattggatgatttattaaccacatgaaacagccagtgttacgaaaagggacgtttgaggtttaaagcctttcctgggtcccgctgggggtgaggtgggtctgggcctacccaggactgctgataacagaacacagcggacttggtgatttttagtcaagaactcacagaatttcggtgaatctccccaaaccattccttcttttctctctcctggagcaaaagagaattgttaggttcacgtgttgtgtcttgtgaacgtttatcgattgcaagaccccagagtttgcacaaaaggcagatgggagtttctgtgtggagataccctgagcaacgttgaaaacactggatcctttgtgtccgggcttttccccttggcactacggatgctctggcccagaggagcctttgtgggaggccgtcctcggtgcctgcggtgctgagtgtcacccctgcctcccaccctctggtgtggccccctggagcccttgtggggagcctttgttttttcccgtctttgttttttcctcctgggaggaggctgtcctcggtgcctgcagtgctgagcgtcacccctgcctcccaccctctggtgtggcctcccggagcccttgtggggaggaggccgtccttggcacctgcggtgctaagcgtcagatccctgcttcccaccctctggtgccatcagcatccctcctcccagtagaatcgcccctgcttgagagccgctgccttaagtggtggcgtgagacgtgcaggtttgtgtttcttcattaggagttttaaatttctgaaaatctagttgtgatgactgtgaaacatacctggatgtggaccttcgagtagacaagcttccggatctgtcatggcacacgcatttcaacctgcccaggcgtaaatccgcgtacaactttatttctcagacatctcagccttttcgaggcacggctcctgctgtctttgcgtagctacttatgcctctaaatgcttctgtgtgctggaagctgctgtcctgtccctgcttcctgggatgcagggctgtggaatttctgctgtgttccatgaagggttaaagcattccagggaaggagattctgagatctccctttttaaagacacttttagtcagggaagtgctttccagccatgtccgtctgttctctcctgggatggacagggcagctactgtccctgttcccgagcctcaaaagccattacgaagttccagccaggcctttactttcccaatcctatttcagctgatctcagccttcccttgtagatctttctattcatttagttggcatccttgctttcttgtaccatctcccagttttccacagtttatttacactggacatagaattgcaacagaaactcacccatgctgaggtagggctgccccagggatctccccctctgcagaccaggctgcccactggagagtggtatcactgggtcacggtcaccatctgccccagcagggtccagagtgtttagagtctttcctggacatagaaacccttttgtgtgacgttcagataaaaccaatcagcatgttctgttaatcacagaggtcggagctgagaaccattagcgtacatccacctctcccgagagtgttcacgcctcttccacgtggggctaggctgctgctgagtgtggttctgctggctgtgggtgtggcctctttcctcaaccacagccatcgcaggcctgccacagttttggttcttctaaaagagaataggcaacacaagagaaataagataagttagatttgaaacctttaaaaattatttcctcaaacattgtatatattttctgcccatacctaatttgataacaattttaaaaagatgaaaaagaaaaaaaaattcccccatatcaagtctttgaaaggcatccatcttagtttttatccaatcaattactctctctttggagtcatattttattggtttaagtaatgtgtaacaagtacactggcataaacagatttaggagcaaacacagctgcttcatgattagcgttcagctcgcggggcccagctgtgggggtgcagcctgtgcctgcctgtgcgccaatagggctggtcaccttgaacatccaggagtgtctgggtgagtgaggtctgggcaaggcagcatccatacacctgcgtagttctcactttgtccgcgttatctggcaatgccacaaaattatcaagcaagtgttctccaagtgcgtattcacttagcgtttggaaagtgcataggtacctcatacagtaccttcaggaggagctaggaacccaggaatgagagcaggtgtgaggcctgtactctttgtgtatagataaaatatgcatgtgcctatctgagggcagaaagttagattggggtcagaatgtggaagtccttacctgtcagatactaggaagccactgagggcttcggagagaatcgtgcctttgatgtgcggtatgctgtggagccacgggggacaggccaggctcctgcggggcactcgccatggcgagaggaggagagaaggcagccagtgagctgagcgattcagtgcctgggtcaggaggggaagagggagtgcaggaaggcagatgaagctgtgagtctacaccctgaggtcggcgttgtgctttgctggaaatcaggaggagaagcaagtgtggacctgattcagagatacttagagacaccaccgcaagctgcgagtttggaaatatggaaggaggcttggggaaaatccggaccagggtggatttgggagcctcctacatagaagtgcaggtcaaggagccagagtgtgaggtgtgcatgtcgggagagaggaggccaaaggaaagcccacatttggaaatggaggaagggtcggaagacccagaaaaggccctgcttagagtccagagaagagctgcacggtgcagttccctaaagcccagagccgagagtttccaggacaaagtcccaagtgttgctgaaaaccagggggtgggactccagctggaggcagcgaggggagcctggtggccctgattcctgggagcagccagagcctgggggtcacggcggaagctggtgagaagcgcagggagcaggtggagatggtccttcgaggcctggagcctcacacgggtagccagccgtggaccaagacacagctgaggaggggcctcaacccagagcgtctccaggtggaggagggagccaggaagggcaaaggtacacggaagaaagggggcaggcatggagccaggtccccagggaggctgcagtcttctctctctgttcagggactggttgttggttattctgagttctcaaagtcatccactcggtgcggtccagagaaagatcccaggggcctcaagcctggagcaggccttgtgcttttcccaacactgtgcgtgttgactcagggttactgtcaatggctaattctagtgtgtcttttgttgaagtctgcagaaaagcctcaaccagcaccagcttttgaaggacttacaaaacttgtgttcttctgattctgggatttttgcctgaaatgcctcgtatatttttggctaggtgttgttagcacttgtgttacggcatttggagctctgtatttttgtgatgtgctagctgtgaggatgtttaaaattagattcctagaaatcaggttataggagctctcggccacgcttcatgggttatgttttgacacctcatagtggatcccgttgcggtggctattcttagtatttgtggaacacctgactcttgatgctaggagaatgttatttgttttctttgtaagcctaaagtctaatgaccttgtagagtctttatacccatctcttataaatcagctttaatatgcttgaaaaagtcctcattgtgcccttgaaaagcaggtgcacattttaaaagtcatccttttaaaatccttttctccagtctgtgccctttgtctgtttcgtttccttcactgcaacatcatgaaacagggacaagagctagaatctgtttcatacacagagcttgaaacagggacaagggctagaatctgtttcatacacagagcttgaaacagggacaagggctggaatctccatttcatacacagagcttgaaacagggacaagggctagaatctccgtttcatacacagaacttgaaacagggacaagggctaggatctctgtttcatacacagagcttgaaacagggacaagggctagaatctctgtttcatacacagagcttgaaacagggacaagggctagaatctccgtttcatacacagaacttgaaacagggacaagggctagaatctctgtttcatacacagagcttgaaacagggacaagggctagaatctctgtttcatacacagagcttgaaacagggacaagggctagaatctctgtttcatacacagagctgaactgggctgagcgacctgctctgctgacgtctgtttctgtcatgagagggaacctaggcctcttgacatttccttttgtacattttcaaaaagattattttttcctctctctggtccgttccactgtgagattctctcctaaggctgtttctttgccttccattttgacaactatgatttagtttccgagatgatgaaagggtagtaaaaaggcctgggaaagagaaagcaggaagggaaggaattatctcatgattttagtcagaaggaaatcactcagacagaaacgcttttacaagtggtcagatcccgggaagtgggattgaataagtggcatcgtatcacacaaccctgttttacattcttgctgttgccaggggtaacgaaaagaacgagtatattcattccgaggtcaaatatatatctttgctgactctgactataattagcagaattcgttcaattcaagtttgagaatacctttacagaagagggtcttcaggcatgtgtgcctatttctattcgtatgttcacatgtatttgagtatgaatgtgtgtatgtgtgctgtgtgtgagacctcattatttgaaatcaagaaatgtgcagtaaagtagagtttattaattacaagaagttacatttgggggataaaccattttgtatagaattgaataatggggtctttgaggggtgtatatatgtatgtgtgtttgcatttatgtgtatgaaagtgtgtattgcatgtatatgtgttgtgcatgtatgtgtcttggtactgtacagatgcatgcatgtgtatatgtgtgcatgtgtatttgtgttgtatgtatgtgtgtgcatgtgttacatgtttaggcatgacatcgcacacatgtgcaagtatgcatgcgtggatgctcctgtgtatatagttataaatgtatatgtgtgcatgttatgtgtatgcatttacatatgtttgtgtgtgccagaatgtatatgcatgaacatgtatgtatatgcatgtgtgtttgagtgttgtatgtgcatgtatgtgttacatgttggtattatgaatgtgattatgtgaatgtgtgtgcatgtgtgaatgtgtgtattgcatgtatgtgtgtgtgcgcatgtgtgtgtgtgagatatgtgtctgtgcatgcatgcatatgcacatttgatttgtgagtcctctctgggagggccatgttcctggagagagtgcatgggatcctccgctgtcctctcagggagagagatattttaaaggtttgagccattaggtaaacacgcctgatgctctataaaatatatatttacatataccattggggttaaatatatgttaaatgggtgcaaagctgttatattgcattaaaagtcatgttaatacttccttgttaaaggctttgtgaatgatttcctgcacatgaaacataatacaccacacagaattacagtgggtcagtggtgatatttgccaggaggtctggctaatgattggtatttctagttgcagacatgcagtttgagcttttctggacttaaaggagggtcactgactgcccactgaatgatgccagcagctctgcctcattctgtcggcttcatccagagctgggacagctgctctcagatggattgtacttttctctccataaaggtctgcagcatttgttagcagtccagtagcagacccagcggcaggtccagggtcaggtccagtgtcaggtccagcggcaggtccaggggcaggtccaggggcaggtccagtgtcaggtccagcatcaggtccagcggcaggtccagggacaggtccaggggcaggtccaggggcaggtccagcatcaggtccagcatcaggtccagcggcaggtccagcggcaggtccaggggcaggtccagggacaggtccagtgtgaggtccagggacaggtccagcggcaggtccagcgtcaggtccagggacaggtccagcggcaggtccaggggcaggtccagggacaggtccagcatcaggtccagtgtcaggtccagcgtcaggtccagggacaggtccagggacaggtccaagggcaggtccaggggcaggtccagggtcaggtccagtggcaggtccagcggcaggtccagcggcaggtccagggacaggtccaggggcaggtccaggggcaggtccagggacaggtccagtggcaggtccagcggcaggtccaggggcaggtccagggacaggtccagcatcaggtccagcggcaggtccaggggcaggtccagggtcaagtccagcggcaggtccagcatcaggtccagggagaggtccagcatcaggtcaagcgtcaggtccagtggcaggtccagtgtcaggtccagcggcaggtccaggggcaggtccaggggcaggtccagtgtcaggtccagcatcaggtccagcggcaggtccagggacaggtccaggggcaggtccaggggcaggtccagcatcaggtccagcatcaggtccagcggcaggtccagcggcaggtccaggggcaggtccagggacaggtccagtgtgaggtccagggacaggtctagcggcaggtccagcgtcaggtccagggacaggtccagcggcaggtccaggggcaggtccagggacaggtccagcatcaggtccagcgtcaggtccagggacaggtccagggacaggtccaagggcaggtccaggggcaggtccagggtcaggtccagtggcaggtccagcggcaggtccagcggcaggtccagggacaggtccaggggcaggtccaggggcaggtccagggacaggtccagtggcaggtccaggggcaggtccagggacaggtccagcatcaggtccagcggcaggtccaggggcaggtccagggtcaagtccagcggcaggtccagcatcaggtccagggagaggtccagcatcaggtccagcgtcaggtccagtggcaggtccagtggcaggtccagcggcaggtccgggggcaggtccagtgtcaagtccagtggcaagtccagcagcatgtccagtgtcaggtccagtggcaggtccagccaactttccacatggcccatgtgaaaatgtacccactcccttgcattttttaaagcagtagttattagtagagcctactgccatttctccttgagttcctcacagtggatgttaagcatttgctttattaaagcaaagttccatgctctttgtgctaagtcacctctgcctttctgtgagaggctagaattgggatcgaccctcagctgtgccagagccttggtacctgtctcagttctggaatctactctgtccttgttgccttccattcaccgacagccgtctgtcttcctgtcactccttcaacacggagtccagcagtgtgcacacaggtgagcctgtgtggatgctggtttcgtaggatcttatcgggacctcactcatcttttcactaggaaatcagacactgcaaaggacttacagaaaagcccaaagaagccgtattgatagaatcatagagacagaattctataaccataggaaacggcattgattatcatgaaatgtgcacttacgtgtggcatagtaaaacatcacatttgaataccgcactgggtaagagcttggaaaagagattatgaaagtataactggctctgctcttatgtagtgggacatggtaaagcgatgcctgatactgtatagaatggaacaaacaggatagaattatacagagtagtgcagaatagaacaaatagtagagtgttcgataaggtagcatagagtagaagaaacagtgtaacatatagtatagtatacaataggagaaatggtatagcgttatatagggtagcatagaaggaacagtgtaacattatatagtatagtgtacaataggacaaatagtatagcgttatatagggtaacatagaatagaagaaacagtgtaacttatagtatagtgtacaataggacaaatagagtgttctatagggtagcatagaatagatgaaacagtgtaacattatatatatagtatacaataggacaaatagagtgttctatagggtagcatagaagaaacagtgtaacattatatagtatagtgtacaataggacaaatagtatagcgttatatagggtagcgtagaacagaagaaatagtgtaacatatagtatagtatacaataggacaaatagtagagtgttctatagggtaacatagaatagaagaaactgtaacattatatagtatagtatacaatgggacaaatagtagagtgttctatagggtagcatagaatagaagaaacagtgtaacattatatagtatagtatacaataggacaagtagtattacatagtctagaatagaacaagtgggatagtattgtagagtatacagttgaactaacaacgtagtattgcatagcataatgtagtctagattagaacacacagcatggtattaatattacatagcatggtgtgcagtagtagagtcgcaaagcacagaacagagaggacagtgactattacatagcatagtgtggaatagcagagtcgcatagcacagaacagagaggacagtgagtattacgtagcgtagtgtggaatagtagagtcacatagcacagaacagagatggcagtgactattacatagcgtagtgtggaatagtagagtcgcatagcacagaacagagaggacagtgttctgtagcactgctgcaggatttttgctctttagctcagctgggtccgggttcttgtctcacaaccaggaagaaacagacacatggacatcgaagactgagtgcagtagaatttattaagcgaaaaggaaaggtctcagcaaaaagaggggtcctgagagcaggttgctggttgcccccttcccagttgactacaagggcttttacatagaagctgatggggctgggctccctgtttgcataaggagcgaatttctggtggctccaccccattcccccatgtgtatggggaccctcagtctactgtgagcatgtttaggcaagccccctgagcaagttcccctatctgcacaaaacatgggctggaggctgtctgggacccttcgcttactgtctgcctaaagcaagctggctaactcctttcagtatagaagaaaatagtatagaatagaacagatagtacagtattatatagtgtagaatgaaacagtataatattgtatcgtagagaatggaatagtatagaatagaacaaaccgatcatagtagtgtagtatagaatagtagcctcgcgcagcatggggcagtgttgtgctccatactacagagtataaccaccaggagagcgttcttcagtggggcgttactggcccttcatatttctttagttctatgaaaatgaggacagggagataagagggggaggaggttggctttcttacttttaaggcactcattacttcctggggatcatttgatggtcctctttggtagtgttctgtgaagcagtctgtatactctgtgtaggatgaaatgagatgttttctgtaaacagttgtctcatgcctggcacatggcagagcctccgtggatcttgctgttgtgaatacactgatgacgtctctacagtgccctccacgctataaatactgtgcattgtaggaagtccgggccttttcaaaggctgggtttcattttaacaaaattggaaagccgtgcatatttggaatggccagatcatcctgcacctaaatgacttcacctgtccagctgggtacagaaacgggcttctgtcttttgtcccattctttcatctggcagtctcttctgagaaaccttgactttgttgtcagaaaaacactgattagcatgagatcagatagcagctgtgaagaatgaaagcgtcactaccaatctccggcagcgtctgataaggagaaatgcacctccctgcgtgctgccaaggtttatggagcagaattccctgacgccactgccctcactgcctgtgcgtgcatctgctgtggggtcatttccttattggacttggctggggacctcctgaggggtggatgggtcaggactgggtaatttggggaaggtattcgtggtgttcctgtttgcagtctgtgtcccagttggaagagatgcttttagtgcatccattaatccagacatgattagcaagggtgtctctcccaggtaagagttggtgcgtctcttctgagtgtctttctcaagtctgttacaaagagaactttggtttctcaaggtttaagaattaatgtcaaagagcaatttagtgttcgagtcaccagccttgctgtggatgattgctgagtcctcggaggttagggccacagcacaattggtgggccgtctgttccccaccctggtggagactttctcacccaaagaaatgtattctgttagtatgtctcaattagaatattttagtaggagacagttatggctcttgttttaatttgtagtggatgattactgtagcaggatcaaggttgagacttgcagcgtagctcatgtaaagcattgattttaaacacccaaaatatattgccagcttcgttgccgtggctccaagggactaggaatgcatatgttgttttttgttattattttttatttttatttttgaaacaagagtctcgctctgtcaccccggctggagtgcagtggtgtgatctcagctcactgcaacctccacttccagggttcaagcagttcttgtgtctcagcctcccgagtagctgggattacaggcacccgccaccatgcccagctaattttgtatttttagtagagacggggtctcactgtgttggccaggctggtctcaaactcctgacctcaagtgatctgcccaccttggcctcccaaagtgctggcattataggcatgagccactgtgcctggctgccatgaccattttaaatgtggcattgaatatctgctttttttttttttaaggcagtacagacgtcacccctcacacctctgttctggggctggtctgggctggccaggagggcttccaggctcgaggccgcgtctgaagtgttgttggacaatgtggagctgtgaccccttggtctttggggacgtggggcaccttgagatgcccacagtcttgcgagggtttatggctcagtgtgtggctgctgcgaggtagctgtgggcggggaggaaggagagcagggtccatctgtcctggtgtggaaaatgcccaagaaagtcaagaaatggtacaaaaaatcatcatctgccctggtgccatttctgtttaaaaaaaaaaaaatcactctgcgtgcggttctgtgcttgaggaggatagaaaatacctagaaagacgcacaaagtgttctcatggggtcagcaccgggaagtgggatgggaggcttgggagtgtgtggaaaggaggacatggtgttattttgttctgttttatttggtagagcaagtgatcaaagtgaagcttgagtgattggcgcagcttggcctggccatgggtagatcccagcatgtcccgcctcccactgcagctccgtttctcggtcacggatgagacaggtggcctgaggctgtgggcggaggaggggcagcccggtgtccccagcaggtgattgtccaggctattcttgggccagcctgagggaaggggtggaggagagctgggagggtgcacagtgcgcccccccgccaccccaccccgggactggaactcagttctcagcctcgggctgggaggtgagcccaggctgctgtcgatggaggaagatgccgaggaagatgccctcaggatggaggaagatgccagtggagtttggtcagcagccagcgtggtctttcccgcaggggatacgcagtgcgcccacttgcaggaaaaacgctgctttagtttttgaattttgctcattctgtttatcgtgctgctcatgctaagatttggatatcgttggtaggaatcagtgtcaattgcatacagttgactcttgtaccacacaagcttgagctttgtgggtcaacttatatgtgaattttttcaaccaaactcagggagaaaatacagtgttcctgccatgtgaaacgtgtgtcggagggccgactctgtacacgcaggttcggcaggtccacttgtggggcgtgagtgtgcctggatttggtgtccatggggtcctggaaccgactccctgagtacagcgaggccgtttgcagtagcaggtggtttcttttgtagtttccccattggtttcgccccacaccatctctctcatgccgcagctgctgctgatgatgactgatgacctgggtgggcgatgccaggccccctctcagctcaggccacttccttggagagactcctgtgctaagggcaccatttagcaaaagtccagattttgggatacggaaaatttgggggacgtgaattcactcaaataaatgttcaaagttggcctcagagccttgcgttcttgttttataaaagatgcaccttttgggggaaatactgcttaacaacatttaactggaaaggcactgaaacaaagttaagctttttttgcataataccttcacgtggatacggattttcatataattgtaattgttactcatacattctactaagtcttctgctatttttacttaacgacttaacatacttgttcattcagtcacgagtttggttgttccacagtttgctggggcctccctgggacctgagcacagtgctggggatgcaaaagtaggtggttcctgatgggatcgtgtccacgttggtggctctgcttgtaaggagtccacgttggtgggggaggccgactggtgaccggaacccacgctgtgacgccatcattggtgtgatgcaggtgaggacagggtctgtagatatgcgtggaggacggtggtcccagacctgggcaggtggaggtgcccctgaggcccccagtggacattgactgagtgtggcgagagctggccaggagagagtttgggaggtgtgggagagacaagagcaggaggggtggcaggggctaggatggaaaggggcttctgcagaaacgggggctggggcctgagccctggcaccgggagagatggagagagggcagtgccggctttggaagagaaacagccagagctgtgtagcctcggggtcctgcatggacacaccctcagcttcccccgtgaggcccacgaatcccagggggagtttgtgttatgccacggacctctcacaagtgggggctgaggcagaactgaggacatctgggttccatggtggatcagccaggattctggttgcaaattacagaaaacaacttaaacttatgcagggaagtgagcatgagggggggtcggcccagagcactctggccagaagccatctgggctctaaggctgggaggccccttgccagctcacgtgctgtggaatggcttccccgcctccggccctcggcaggtggaaggtgctgcctggcagcccctgcaaactgaaggggcccacgtccctcctggctctgcatcccattctcagggacacggctgtcatggggggaccagctggggcaggggaagagtatagggaacccagtagaagtggccgtggactctcttaggaacgataaccgggtcacctaccatagatgaagatgttgtcggcctgcgttcttctcgtgttggtctggggcgtgtggctgccgtgggctggcgttatccacagccccggtctggggcttgcagtggctgtgggctggcgtggtccacagccccgggcaccatggtccctggccctgaaatcgcatccagtgctgtgtcacctcgggccagctgtctcctgaggggaagggaacagggaacagccctccccgtgtggcctccccagcaccacccaccccgcaggacctccagtgttgactctgctggggtcttctctctcctggggggtccttgtcccaacgggaggactccatgggccgcaggaggtgtcaagctattttctctcctggaactgggttgctggcagctcccagatgcaggaggaaaggctcagaattgccttcctaataaggaattgttgatgtgaactttggacggcaaacactgcttacatttccttttccgttttgatgtgttaatggtgtgcggcaacgccgtgacgcacggggacgcaggtgacgggcacccccccacaaggggaccatgcacctgtttgataataaggcatgcttctcttactgcaaataaaaacttcaatggttttctgccagaaagaccctgtcttttatgtaggatacatagaggatcatttggcaagtgattggggattttgggttaaactaaaaataaattaatttcattttatagcactctgaacacatttgagttaattattcatcgagaatttgaatagcacacactgttctgacttccgacttcccccaatgaatggcatttgctgtaacgtgacaaaaccctgagtcttagaattattgggtaatgtgaaaaaaggaaaagttggttctctgttgttttgctttaaggaaattatattattttacagtcacttagttttctcctttccaataagaaaaattgctttcttactacctgaaaattcgtgaaggtcaaggggacacaccctgcagtgcattaaaagccaccatcaaatgtggacctggactcagtttccctctgttccctcccaccctcaaatgtggacgtggactcagtttccctgttctctcccaccatccaatgtggacgtggactcagtttccctctgttctctcccaccctcaaatgttgacgtggactcagttttcctctgttctcgcccaccatcaaatgtggacgtggactcagtttccctctgttctctcccaccgtcaaatgtggacgtggactcagtttccctctgttctcgcccaccgtccactgtggacgtggactaagtttcgctctgttctctcccaccgtccaatgtggacgtggactcagtttccctatgttctctcccaccatccaatgtggacgtggactcagtttccctctgttctcacccaccctcaaatgtggatgtgggctcagtttccctctgttgtctcccaccatcaaatgtggacgtggactcagtttgcctctgttctctcccaccatccaatgtggacgtggactcagtttccctctgttctctcccaccctcaaatgttgacgtggactcagttttcctctgttctcgcccaccgtcaaatgtggacgtggactcagtttccctctgttctctcccaccgtcaaatgtggacgtggactcagtttccctctgttctcgcccactgtccactgtggacgtggactcagtttcgctctgttctctcctaccgtccaatgtggacgtggactcagtttccctatgttctctcccaccatccaatgtggacgtggactcagtttccctctgttctcacccaccctcaaatgtggacgtggactcagtttccctctgttcttgcccaccctcaaatgtggacgtggactcagtttccctctgttctcgcccaccatccaatgtggatgtgggctcagtttccctctgttctctcccaccatcaaatgtggacgtggactcagtttgcctctgttctctcccactgtgaaatgtggacgtggactcagtttccttctggtctcgcccaccatccagtgtggacgtggactcagttttgctctgttctctcccaccatccaatgtggacgtggactcagttttgctctgttctctcccaccatccaatgtggatgtggactcagtttccctttgttctcgcccaccgtccaatgtggacttggactgtttccctctgttctcgcccactgtccaatgtggacgtggactcagtttccctctgttcttgcccactgtccaatgtggacgtggactcagtttccttctgttctcgcccaccgtccaatgtggacgtggactgtttccatctgttctcgcccaccgtccaatgtggacgtggactcagtttccctctgttctctcccaccgtcaaatgtggacgtggactcagtttccctctgttctctcccaccgtccaatgtggatgtggactcagtttccctctgttctctcccgccatcaaatgtggacgtggattcagtttccctctgttctctcccaccatccaatgtcgacgtggactcagtttccctctgttctctcccaccgtcaaatgtggacgtggactcagtttccctctgttctctcccaccatccaatgtggacgtggactcagttttgctctgttctctcccaccatccaatgtggacgtggactcagtttccctctgttctctcccaccatccagtgtggacgtgggctcagtttccctctgttctctcccaccatccaatgtggacgtggattcagtttccctctgttctctcccaccatccaatgtcgacgtggactcagtttccctctgttctctcccaccgtcaaatgtggacgtggactcagtttccctctgttctctcccaccatccaatgtggacgtggactcagtttccctgttctcgcccaccgtccaatgtggacgtggactcagtttccttctgttctcgcccaccatccaatgtggatgtggactcaatttcgctctgttctctcccaccatccaatgtggacgtggactcagtttccctctgttctctcccgccgtccaatgtggacgtggactcagtttccctctgttctctcccgccgtccaatgtggacgtggactcagtttccctctgttctctcccaccgtccaatgtggacgtggactcagtttccctctgttctctcccactgtgaaatgtggacgtggactcagtttccctctgttctctcccaccgtccaatgtggatgtggactcagttttcctctgttctctcccaccgtcaaatgtggacgtggactcagtttccctctgttctctcccaccgtcaaatgtggacgtggactcagtttccctctgttctctcctactgtcaaatgtggacatggactcagtttccctctgttctcgcccagcttgccaccatggctcatttcactttcactcaggaaaggaagaaacattgtttttaataggtatgaaggcagttgtttttaacctaaggaacagaacataattctagcaatggaaattaccaaccgagtctgtgtgaggtttggaagaaaaaaaggattttcacttccacactctgtgtgtgcccacctcccccagttgagagtcacagatttaattactttaattttgagcttaaaataatttgacagcctaacaaaaactactacagtcctataaaattctgcttgtgtgtttggtttttcagttgcttggcttaatatggtgaatgaatgcattatgagttgttattttagtaattgctataaaaattaatgtacgttatagccaagtgttataaaattaatttaacagcaaagtaaaactaaagctgcattgatttctcactgtacttgtgcttaaagacggctccatgaggcaggccctgtgatcctgcaggccggcaggagcaggtgctacctggctggtgcggtcgccacccgtcccctcttgctgccaggcagctttgcagtttccaggctatgggggagtcgaggcgggtggtcagtaagagacagtggggagttgggtggtgcaggttggcgtggggtggaaggaggcgtggagtgtgggtgtggagagcctgggggaggctggacagcagctccagtacctgcacagggggacagggtgcggggggcacggggcagtgagtcgctcctggaaacagcccttggggtttttatagatgggcctgtcgtcagctctgcaccacattcctgctggggctgggtggagagtggaggcctcgagcatgcgtttctccaggtgagggcccagctgacacagccagtgtttcctggaggcccctcacctgggaacgtgcccctgctcttctcagaacaaaataaatcttaaactctacacatcacctttccagaaagtgtttaagtctgtgtgcctgttaactcacctaaatttaaagagtaatgatacaatatgcttctttttaggggagaaaacttagctgatttaaaagataaaatcagaggtcgggggacgcagcattttgggggagacagggtttatgtcctagtggtcagcagtgtttcctgaactattgtgtttgctctattattacattacagaagtgacacgtcaaacctagggaaataggcaaaatagccccccccattcagagataaacgttatcaacatattcatgcacttccttctgtttttgctgtttgctttttaagaccacgttcataggatgggtatataattgtttacagtgactttaaaagcacctttcttgttaaaaagagtattttttcattctggaaaatttagacaacatgttttgtttaaaaattacttataataccaccatcaagtcatcaatgtttttatacattctcttggtctctttatggacttaatatatacaatttaacagatgggaaataacataattttatgagtaaaatgtttcttggcgttagagatggagcagagaggaggcacagggcttcctgctggctgaggtgtgtggccagggtgtgaccagtggcctcccaagtttagggtctgcatggagaaggatttctaaatcaccttacaccacaccccctgcagccgtgtgccactttgataagggggtgtactctgatagacttttcaagacaagactctgctggatctgaggctgttttggctgcttctggagactcagctctggaacgttcatgccagctctccctcaagaccccacggatgccatgtcctcatcttttggaatccagtgttgtagaggagaagtctgaggccagtttgatttttgcttcatggtaggaaactgatgttttcaggcttttcccctttatttccatgatgaagatgatgtcccacctcatccggaggggtctttcttgtcttgtcgggaacatccagcttttaggtgcctcttcaggtcctcagtccctttctcaccttcctcacagtcctccccatctcatccatcttcactgtaattcggttattttttcatttttatgctcactttcccatgcgacttttgttcttgtttcacagatgctggtgctaaattgtatgtctgaggcccaggggccgtgtttcattctgtctgcctctgcatgtacttttgagaagtaggggcagggttgccccctagatgctgtttcagctggacctgcccaggctccctgaagtgggggcattgggcagagcccatgtggctctatggtgggccgtgttgctgaaccctacgtctgagatttgggggccgtgtttcattctgtctgcctctgtgtgtacttttgagaagtgggggtgggggttgcccccggacgttgtttcagctgcacctgcccagactccctgaagtgggggcgtcaggcagaacccgtgtggctctacggcgggccgtgttgctgacagagcaagaagccgcgctcccaggacgcgcctgcagctgtgggcaagtctgggattgtgatgggatcgtttccttctctaaaatacgtctcaactattatccagagggttggctgtaggctttcaacagcttcactcttcttagtgaccaggagacaattcactaaacagagttgctgtcagggtttaattagtcaggagtttctgccagaggctggcgggacagctccctctgcaagcctcctgcagcctccccatccccactcttgggcccggccacctgccttggtctgcagaaggtgcacattctctgttctcctgaggggctcctggacttcaggacagccttggcaagctgatgtgtaactcccagtctcttctcttttttagtaaggaatacgctcacggaatcctgaccttctagattgtttcatctttttaaaacagccgcagcttcctaagccaccttgtgtctgagtgtgaatcacttattatttttcactgcagaatgaacagaactggaatcataggatttagagggtgataaaaagacagaggttaggatattctattttctcacctcttccatacactttttccttaaatacaccctcatacgtctgtgaagttcttcccaattctgtaacttcactccaccctcaggtggaacatttgtgaacagtaacaagtattgatgtgtgcaactctgcaacccagctggaattaatgctttttatttatcaatggatggtcattggatggccagagggattccctgtgcattgtgggggcccagtgcctgcttgtgagtgacatggacataacgagggttagggaatctcagcctctgtgattcgagtagtgacatcaaggcaggtggatgactctttgagcttggcatgctcctgggtggcacagcacaggtgacgtggactggggcaagggcttgttccacgggcttctgtgttgttttttgtttttgtttttttttgagatggagtctcactctgtcacccaggctggagtgcagtggtgcgatctcagttcactgcaggctccgcctcccgggttcgtgccattctcctgcctcagcctccccagtagctgggactataggtacccgccaccacgcctggctaatttttttgtatttttagtagagacggggttttaccgtgttagccaggatggtctcgatctctgacatcatgatccacccgccttggcctcccaaagtgctgggattacaggcctgagccaccgtgcccggcctgtttttttttttttgagacggagtctcactctgttgcccaggctggagtgcagtggcgcgatcttgggtcactgcaacctccactcactgcaatctctgcctcccggttcaagccgttgtcctgcctcagcccccaagtagctgggattacagacatgtgccaccatgcctggctgatttttgtatttttagtagagacgggattttgccatgttggtctggctggtcttaaactgttggcctcaagtgatctgcccaccttggcctcccaaagtgctgagattacaggtgtgggccaccgtgcccggccctgtgtttgattcttaaatcttctttttctttttaatctttctctttctggaggaccactcagtggatatgaggaagagttcacagatgtccatattacattcctttcttaaattagcctcccttgaacactgctgtagggtacagacgcatgaagggctgaaagggtggttgtgtcccagtaagtgtgagagtggagctggtctgtgagaccccggtgccggtgagggcacccgtgtgcgatggcctgggacgggggtgtgcggagccctgaccgtggcacacgcccttcagctttgatgtttcaggcccttgctctggtcatcagtgagcagaaggtctaacagcagtgatatttatcactagttgtgttggccaatgtgttaggagggtgaagctgtttgacttaagctgcttgattggtttgcatttaaatagacacctggtggcctggtgcctggacacttgctctgtgacctgccccgtgtggctcctccctctggcatgcattagatgagatgggcgtgtttagggcgatgtggccctagactggaatgcattcgaagtgcaaaccctgccccaccccagacctgccccaccccagtgtgacgttaggaggcggaggcccagcatccttcacctgccctccaggtgggtctgaggatgctgaggtttcagagcactgctttgctagcacaccagcgagtcctgcttaaagaggccaggatctgaaagggcaggttaccaaattgtgtagcagaaaaatagaaatgtttccttagaaggggtgtaggaaggaaaataatttccttcatcatatctggaaaagatttcaaattagtaggcactatttggaattattagtggtctcctgtatttctttctttctttcctttttttgatacagggtctcgccctgttgcccaggctggagtgcagtggtgcaatcttggctccctgcaacctctgcctcctgggctcaggtgatcctcccacctcagccccctgagtagctgggactacaggcgcgctaccacacctggctcatttttgtatttttttttgtagagatggggtcttgctatgttgcccaggctggtctcgaattccagcatttcttctgcctcagccccccaaaatgcttctgtacccctgccccaacaaggaaggacaagaggtgtgagccacacacacgcctggcctcctgtctttccttgttggagcagggatgtagaagcacttgccgcagccgacttgagtacatctgactttacttagctttcctcatgggtagcctggcagtgctgtgcaccagtgctgctggccagctgttttttcaatgtactggcagaaaatcaagctgacacccgggttcctttctccctgggtactgaccaggtgggagaggaggggcgttgtgtgagtatcatcttcatgagggctggtgggggaacatcagctttaaggtgcctgggatctaaggcatggaacccagcagtgcagaggaacgtaggggatgtagcctcgggagcagagatgtgcgggccggtgccctcgttcctggcggggtctgagtgcaggaataggttggtgacccagccgaggtcacaagacctgcctggatgcatggctggcgtccgtgctggccccaaaactgcccatttggggattcccctcagtcacagactcacctaggggtccggagagcgtccccactatgacctcaaagaacgaggtgttgccttgagatcttccaaggtgagggtaggatttttttttttttgcaattagcaataatttgttgtgaatgatcttggacctattttccacttctttgtataggaagagagacagaataaaaagtctcaatgtgccagatgccatgtaatgaagccatggggttaacgttgttgattattacgtagcatcacgttaattggaacatattcacacgtgtccacagcgtgtgcgtgtgcccagtccgatgagcacgttgggttagggtcgctgctggttcatgcagcccctctgggtggggctgtctctgtggcttggccaacacccttgctgctgccactgttggagtctccagccttgaccggccttgctgcccccaggttctcggagcctgcgcaccctcttcccggcgcccaccctcttcccggcgcccaccctcttcccggcgcccaccctcttccccgcgcgcagcctcttccccgcgcgcagcctcttccccgcgcgcaccctcatccccgcgcgcaccctcttccccgcgcgcaccctcatccccgcgcgcagcttcttccccgcgcgcaccctcgtcccggcacgcaccctcgtcccccgtcgcgtctacccggggtctgtcgtgtgtttctactctggccatgcccgcctcttgctgtgagctaagtttattgaggtgcagtaagaaaccaacagaggggagcagagtccgaggctgtcagggcgcaagggagccttgggcatctcttccccagctctggcgacccacccttcgggttgaagtgcaggggagaggtgagttctaaaggtaaggctgcggtgatttcctgagccttaattatctaacacttggccatctgccgtgtgaccccatcgaagggcacctctggggacaaagcaaagcccttggtggccgtgggcggggcggccgtgcctgtctgtgtgtcctgcaccgggagccccgccagccgtggggacgttcaggcacttgccacctgtgggaggtgtgtgttagccgcgtggtaggtgcggatgcgtggagggacaggcacaggcccacaggcgtggcgggtatgggagatttagccgcgtggagatgcgtggagggacatgcacaggcccacatgcgtggcgggtgtgggagatttagccgcgtggggatgcgtggagggacatgcacaggcccacaggcgtggcgggtgtgggagaaagcgcgcagagtgcccagcagatgccgcgtggtcagcggaagccttggatacaggccgggcgggggagggacatctggaaatacgctttaagcagcatcaatggataatgctgtgattttccttcttttcgtggtccaaaacacgttctagtgatgtcgctgatttgtgtgtacctgggacaaggaactaaatatattagggccttgatgtaatctgtaaaacaggcacaatatgcctatttcaaagaggcagtggacatgaaagactgctctaaactattcagtgcaatgagaatgcttcgttgtcattagcaaagtaaaatgcctccaaggcgagcttgccatgcgtttaatgaccttggacgtgagcttcctaaacctgccagaaagtgcttccagcgtggcttcatgcagtggcttcagtggagaatgtgcatatgcggctgatactgagagccgggcagcaccctgacagcctgacacatccccatgtgtggaccgtgagccgggcagcaccctcccaacctgacgcgtccccatgtgtggaccgtgagccggacagcactctcccgacctgacacatccccatgtgtggaccgtgagccgggcagcaccctcccgacctgacacatccccacgtgtggaccgtgagccgggcagcaccctcccgacctgacgcgtccccacgtgtggaccgtgagccgggcagcaccccccgacctgacgcgtccccatgtgtggaccgtgagccgggcagcaccctgatggcctgacgcgtccacatgtgtggaccgggagccgggcagcaccctcccgacctgacgcgtccccatgtgtggactgtgagccgggcagcatcctcccgacctgacgggtccccttgtgcccattgtgggacctccatcatgcaggcaggtgacatgcatcaaactgaatgcaaggaggagggtccaggattgtgtgcgggctccgtgtctcgtccttctgaggccttctgggaagccaggagggcagtggggtcttttgtgtgtttcctcctggtggccgtgggtttgtagaaatggctttttgcaaaagggcccggaggcggaattagagcctgtcctggaaaggatgatgccttcgcgggcacctctttccattactccagtgctcccgtgattttaaatatgtgcaccctgcagacttcagccttctagtgtcctgggtgaataaatgccaggattgctccaatgctggcaaacctgaaacaggaatttctctgcattaagtttgtcaccaaaatgggaggtaaggggagaggggaaggaacttcttggcctcgtcagcccttttcttgaaactcacagtcaaactttgtcaagttctaggtgatagtgcttgaggcgatgcacttatttatgttatgtcttgttttctgagtacggtgcttcgagaatttaaatatttaggtgaaattgccatgcacagttgaattggcaccataatttgactctctgtaaagccttttggtttcctgttagagtgaccattttttgagtcaactgaagcaaaccctgctgtcagcacgaaggagccactttatagttaggagatcaaattaaatagaattctcctaaatagagcgtgctcttttcataaattttaaaaattcatttattcatcaaacacatactgagtacttatcaccctggttgctagttactgttcatatatgtttttaaggaattacttccacctagctctgaaataacattgcatttagaatttagcccagaggtgattaagcatgagcttttcacagcagtcctgttttcatttttacttgagaacatgttctcagactcggtgcccagctgacgttacctgtgcattgcccgaggcacacacctggccggggctgtgtctcgggggcttcagaagaggaaggaagggctgccaggcatctggcccttccacgtttccctggtggagggattaggccttgggcaggagtcttggcttgtcttaatggatgagcttgtgtctctcagtcagctctgccttggtgttaagctctggactgactctgacctctgagtggcagaggagaggacggtgatttagaatcagtcatgcagaccagggcactcagcgggtcttgggtaaaaagtggtggcaatcgattgcttgcccttttgggagaactgtgtggattgactcctctgaagacctctttgttttgattttatcttgagactttgtagaagcaaaaatgcctttaaacaaaattaaatgatgggcttttgtaatgtttgtgtctccccaagattcacaattggaatcctcaccccggaggagatggtgctaggagggggagctttgggtggtgaggaggtcatgagggtctcataaatgggatttgtgccctcataaaagggactacagagagctccctcgctccttccactgtgtgcggacccagtgagaaggcgccgtctgtgaaccaggaagccctcaccagacaaacctgtcaggtcttgaccatggacttcctagcctgagagctgtgagaaatgaacttgtgttgcttgtcagcccccgcccagcctatggtgtgttgttacagcagcctaggtggacaaaggcaggttgtgaattttctgttgtttgtcagtccccgcccagcctatggtgtgttgttacagcagcctaggtggacgaaggcaggttgtgaattttctgttgcttgtcagcccccgcccagcctatggtgtgttgttacagcagcctaggtggacaaaggcaggttgtgaattttctgtcagattttctggcttcagatacctggtagggaaatgtcaccatcttacgcaggtgggaccgtgtggaatcagacgttatgttatgatttgaccctgttcttgccccacgcctgtgcagttcacacctccaggtgtctcggctgcccgcggcccctccaggtgtttctgatgcggggatgtgggtgctggtgcacacgagtcccatgtggtgccggtcgcagctatgccgtcggggagcaggactaggagctcccgcccctcgtgaaccagcagcctcaccgggaagctgctgagaagtgtatgacggaaggtgattgcgcctcgagactgaaacttcctgtttacagggaactgaggtgcataagagggaatttaatgatgccctgagagacagatgcatctgggggacgttctgcaggacgttggccccagactctcgaaaagtcatcacagataaagggtgtgaggctgtccctgacgaagatggggaaggagagtcactcggcgcagtgtgtggcccagatagaaaagacgttttcgggagaattgtgcttattgaatataaagtggacagcgatgctctgaaatggttcttgtctgccgatgatggttctgcggctgcagagggtcctttattcttagggaacgcgtgcgtgaggactcggcgaggtggcaggagcctgtcaccttcaactggctccagaggagaaacgaatctgtctctctgtataatctacagagagagagagtgagaaagcaaatctaccgaaatgttagttgtcggaactccacgtggagaaaacttggccactcattgtactgttcttccactttttaaatatgtttgaacattttcataatgaaaatgtgggaaagtaaaaatacatctggaaattggtatggaagtgagtcaagccaagcacccttgggttcagccgggaagagccgacgagccgacgagccgttggtgttctgtcgacttgtggggatttcctcctcctgggttcaccacctagttttccttgtgataaagttattttgtatgtagctatgagcacaggttgatgctggaaacacacatgtagtgtggattgtcattaagaatgtggagaactggctaaagaaaccacttgtacagttttgagatgagcactgcctgcctcagcatctgtggtaacggcttcacttgggtgcagagcttggcagaggtttgagtgactctatctcgatgatcgtctgtcagaggacaaggttaagtgtcaccaccgaggaccccgttgagcctctgggctggaagtaacttcccctgggccggtgaggcagcctctgggggtctttcctgacaagacccttcactgagctgcagtttggccacctctgccctcgcctccctgactgcagggcctcgaggtctcaccacctccagcctgagcgcccagtgcccaggggcaatttcccgccttccccgggggctcaggatgctggctcctggggcagtgcccgcagctgggcccctcctccagggctggccacggcctcctgctgtgtcataccagctgcttccccgcagctgcagcccacactgcgcggccgcttctgcttctgttggatgaggagacgcaggccctcgcccaggcccccatgggccctcaacgccccagagacccggcttcccggcctcgcccctgctggccctaaggctgtgccacctccccctgcccagtccctggtctctgtacagtgtctgtccaggacgtctatccatccatccttgacaacctgtccagatgaggccactgttatcccagtctgtgaggggcgatcacagcccaggtgccggccgatgtggagacgctgatggacttcagtgtgcaggaaagtgagttccttcatatccacagccagctgggagcccaccccattcacaggtggatttgccttgttttttggcccaatcacctacattaaatcagaagaatcacagttccctgctcttctggtttttgtgactgtccgcctctctcctctgccttggattggagggtggggtgtgtcatgggttcgtggaatcctctctctgttcttgtgtagccaccagggactgttatccaggctgattccacaggaggagtttggggtgagttcctgagcgagagttgggaagactgacgtctgcgtaaatcttgcttgttcgtggttattcctctcagtcttcttaaattctgaaaaattgggggccaattagaaataaggatttaggtatggatcggtgaggacagaatgttgatctaattggctttacgttgtgtgtgataattttacgctaccctccggaagaacttaagatgttgacagtgtcgtgagaatcatttttttctttttctttttctttttcttttttttttatttttgagatggagtctcgttctttttgcccaggctggagtgcaatggtgcaatcttggctcactgcaatctctgcctcctgggttcaaacaattctcctgcctcagccccccagtagctgagattataggtgctcaccaacacacccagctaaatttttgtatttttagtagagacagggtttcactcttaaggacgttgttcagtaagtactaattggtggcctgccgttgaactaatttcagtgtagtactgacatcatcagccacggcagaaacttacttggcatccctggaagagagggcagggaagcatagcaacctgaaaccacctcattctccagcgctacttccaactctgagctgatggtcattacgagtggatctgccctggacaagtagtttagtgtagctgccttggacgggcaggtgaaaagtaacaaaccgccagaaaactcagctaataaaatgttaggagagacttggggcaccaggaaggggtgaggcctgtctgtgtgccatctgtgtggagcctcagtatctaggggacagcgttgacgctgagccccaggtttttattagtgtttccctgaataaaacgccactcctgagctgtggactgggaggctctttctgatgattaggcttcataatgcgggatcactaggcaaggtggatgtgagggccataggatctggagactgtccaggactgctttctggaaggcggccagcctgctggagggggacaacaggcttgtcccttcagcagtgaagccaccaaagagagtctttttgagaataaaagagagaagcttttaaggaaaaaaagcagtttctgtctctgtttgggagttgagtgcattttcctgcatttattcagagatgttcgtcagttcccactgtgtgccggggccccgctatggggtagggtcaccccaccgcgtacctaacccaggaaaactcgtctgcagttatttcagaggctgtttgcatttcttgtgcttcaatgggtggagggagtttttcctcctactgtttttagtcagttttcttaatctagcctgttactgggataagttccagagccgagcagttttaaaaacaatctttgcaccttgcatggagagcagtccatctgtgggtggtttgttcctggaggtgctgcagtggccttgggtgacgcgagggccccctggctcaggatgggccgagagaggaatgcgtgagcagtgggcaccggccggaggcaggggaggcgtggccacctgtggctcgaactctccccatccactctacggcaccacctcggactccccgcgtccgctctgcagcaccgcctcggactccccgcgtccgctctgcggcaccgcctcggactccccccgtctgctctatggcaccgccggaatgtgaacgctgttgccctggacgttttctctctctgctcagtgcccaggctcttgggtacacaggcggccccgggttttatttggaaagggtacagagaacagtgaagtaacccacgtgcctaagctttgattgacatgaagaaatgtagaagctgctgaaatcctggtcattttagaacaaagtatcttattaacatttttctaaaagaaagaaatcattaaaaaattgatcccggttgaggtagaaggatctcgtcctcatcctcctcagttccttccagaatcagcttcgagttcagctgcagaacgggttctggtggtggctggagcagcccaggagggtgccgttgcgtctgagttcacaccggtgcctgtgtggtctccagttacggtgctggccgtggagtctgggttcacaccggtgcccgcatggtctccagttacggtgctggccgtggagtctgggttcacaccggtgcccgcgtggtctccagttacggtgctggccgtggagtctgggttcacaccggtgcccgcgtggtctccagttacggtgctggccgtcgggtctgggttcacaccggtgcccgcgtggtctccagttacggtgctggccgtggagtctgggttcacaccggtgcccgcgtggtctccagttacggtgctggccgtggagtctgggttcacaccggtgcccgcgtggtctccagttacggtgctggccgtcgggtctgagttcacaccggtgcccgcgtggtctccagttacggtgctggccgtggagtctgggttcacaccggtgcccgcgtggtctccagttacggtgctggccgtggagtctgggttcacaccggtgcccgcgtggtctccagttacggtgctggccgtcgggtctgagttcacaccggtgcccgcatggtctccagttacggtgctggccgtggagtctgggttcacaccggtgcccgcatggtctccagttacggtgctggctgtcgggtctgagttcacgctggtgcccgcgtggtttccagttacagtgctggccgcttgtacctttctgggaagttagaaggaggatcatttcatcgcctccctgtcctcccacaccttgacctatactgggccaccgcgaattcttccttttaactgtttctctcttcacaggcaacactggcgttttgtggtccacgtttgcctcttctgaaaacggattctgtgttgctttatagaatcacatggtctcttttatgaatttcgcttttctttcataaaataatcgtgcttttatctcttcaatctcaactctgttccctggcacaggctcttcccagctcaaaaattaaaagtaatctttgattacgcttaatactttctaaagttttgaagtttatcagcatgtgggttacagaacattgactatttatttaatggaaaattacattctaagtagagtattaaagtgaaagggatcttttgattttattaaaatattcaggtaaacatatgaaaatgccttcgccaaacttcatgcttgtatatcatgaaaacattaagctgctaagctctctctgctcccgggaatgcattattagagtatgtgtttgaaggtgtcattccagtcttagttttaggtattttttaaaggggttggctggagaagtgacatttagcattgagtgaatgtttgataaagatttgtctctatataaaaatatttaaaaacaatctttagcgtttcctttcagggttcacccattaaagaatggtcttgtaaaaaaaaaacatgttaagagtgttggcgcccagaggtgctaccctgcccacagtttcatcatccgctgtcgccaggtgacacgtccagtgtttagctgcatgtcagacgtggccacagggccacaggacatccctgcggacggatgttcttatgcagattaattaggatggagactgctgcagaactgtaaaccccccaggggctgacggaagcctgggaacacccgagacaccagaatccgctgctacagtgggtggaaggaaacctccctggaagatgggacatgtaataaggagaaagtaccaaggcacgtggtgctttgaaaactgagatgttttaattaaattaacaattaaaataatttaattatgtgaattatttgaactcattttagttctttttaggaaattaatactttaagcaagtttgtttttgtgaatcgtttgaattaattgagtcagcacaaatgttagcattgatatctgacccccttccagggttggggcagaggagatgggggcggaggagccaggcctccaacccgctttcccctggagctcagccagaattccccattgaggagccctcagctccctgagagccaggagctcttgcggagaagccactgtctgcacgccacctgcttcgatgaccctgctctgccatccctgtgctccaagggccgggccctgccgttgcctgtgccagacgggtctcagggagatgccggccagcaggtatgcatggcgaggcctgggcatcaaggcccggattctatggctgccagtttcattctctcgttgtttgtccccctagcaagacttatgaggttccttgaggacaagactccctcctgccacctggtctgtttcctgaacattcactgcactagcacggccccgggacgcagcccttgggaatcaggccgtcggccatggtagagcggctggcactgctcggcaccgtgacggacgttggccgctgtgcttcactttggggacatgtttaagtacaaaactaattttaaaatttcaccattatttcaagacagctgagagcatattagcacagaatccctggtctaaatgaaatcgaagagttcttattaattattcataatgccatgaatatgttaccttattttttataattgccagtctgtataattaacctttcatttggttaaagtacttaacattaagtagagctataattacaactgtttttaaaagtatatggaagaatgtttaaatgtttaattagaaccactttttttagcttcataaagaattttttttacttgtcaacaaggatctttaattatttaaaccaaaagagcagaacagaccagaaaagaaaaacaactagtcaagctgggaactgcaatggtggcgtcgttccgtgagtctcgggttttgcttcttgggtttgtggtcagagtccttacctttgatttcctaacacaggttgttagagttggaagtgagtgtggagatgagttaatccgactttattctttcacggatgagaaagcgaattatcttcagcaaggtgggtgcaggtgtggcccccgggggacactgtggggaataggccgccctcgtggggagccaagttcgtcgtctccgggacagagcccaggacacttccacggctggctggcctcttcctagaaccccacacattgcaaaggatggagtccagatctatactgtaaagaaatgagggcagttacagaaagcaccacattctcggctgagtggctctgggcaccccaacgttgggacacctcagcatcatgtatggcgatcctcaggctgtgcccagcagtgaggctgggcctgatcaaggctgcggtctccaccctgagagcgagggcttccttcccccagcgcgggttaaagcagtgaggccgggcctgattgaagctgcggtctccaccctgacagcttgagcttccttcccccagtacgggttaaagcagtgaggctgggcctgctggaggctgtggtctccactctgagagtgagggcttccttcccccagtgtgggttaaagcaccatgtgtccacctatgcagtggctggtcccagtgtgccctgaggggcagaaaccctgggtcctgccgctggtctggggtatctacttcccattcctgcagttcctgggagtgtctgtgtgtccagggggctccgatccctgcctcaggaccacgggtgaggggtcaagatcgcccgctttggagttggcccggatcttggttctgtgtggctctggagcagttttgtcctcaggagagggatcctcacagccgcctcttgggaccatgaggagaattaataggatgacccccaggtagctaccgtagccctgtgcagggccaaccgtgtgtctccaccgccagttccttccgtctgtgctcccaccaactgtcacatcaccagcctttattttctttttcttagacccagacagcgagtgccccactggcctcggcagccccttctctaacttgtcctcaaatcagttcctcacggacagccctgaccagccattggcatgaccaaaaccccaccaaatagaacccaactttcctattaagctgtgcagagcagtcccagccccacttcccacaggctgacctcattcgccatgggatccgtggttctcacctggggctgggggtgcccctggcatctggtggggagtgtcagggatgcccttccaggtccaggatagtcccccagctggtggccgacagacagcagcacacagcctgatgtccctgtggcttccggttccccgaggccagctgtgctttgctgcctcttcatcttctcagacgggtgccctctctccaccttcgctggttagcaatgttcatccattagagctcaaagcactgcctgctggcagcacagccccttctcctggccctccgtccgcctgtgccccacggtctgtgccgtgtccccgccttccgcctgtgccgcatggtctgtgccatgtccccgcaggcccatcagagcgaggctcccagggacagagcgtttcctgtttgtgtctctgtcccaccctctctggacctggcatgatgcccgttgccaacagaggtcttgggttgattgtcaccaaagcagataatctatatggctgtaaatggctgtaaacatgcttgattggggtattttttaagtaattggatatgtaaacatttgaatgtgacacaggtggatttttgggccaatggtctcgttcttcagggaataaccacaggcccatccacaaggaccatttctggctgatttatggaacactgttctacctggttaattttggacgttatctcagcctgagaggtaggtcagcaatgtgacgaagagcactggtttgaatcctaatctgctacttagaagctgcatattttcctgccacgttctgtgcctcagtttcttgcttggttaggtaggaaaggtatgagctacctcagagtggtgagtgaggcctgcatcgagtgtccgcattaaagtgccgaaaactggacccagagtgttgatatttaaagacctttaaacattccgatgctgcattttagtaccccggtaaaacagcaaagtcgttacagatgcagacacagaccctgggtgaggtgggggactgatggtgggaggtgggtcaccaaccccgtaatgagggcgtggtctgttcgaggctgaatgaagtgcacgtcttcacgtgtaccacggtggtgcctctcgtgaagtcctgtaagcgtccacgtggctgagccgtgcggtctgtttgtgacgtctggcaggagcagagcttttgggcgcagcctcgctcttgcgtgcacggccctcaacgatctcaaaagtctgaggcttaaagcaggcttggggtttcccttacacctcccggacatctaatttgcctggcaaacatgttattcttgggtgtaaaggtgaaggagtgggtgactctggtgaaagtgtactaattactgcacttctgggtcagtggcgctcggttgaagacactgtctgccctgggtggacatctctggtgtggtgagaaccggcggctggatgtcgcgaggttgccaagaagatgcccgctttttcctttttcctcagtaacaaaaccctactttgtttagggaagcagcgaacccagctgaaaatccagttctcttgtacggcagagcggctggtgacacaggtccagatgctgggatgctgatggggggttttggagagggaggtgtcgggagggtttcccgacccacagcagccctgggcccttgtccggccttcttgcccggggcatgacgcctggagggaaagcagcttcgggggcctgagggccacaaggcagagtcctggtgtgtggggcaggcctgggccaggctccttggaggatgttacagagccactgcgtgtgcggggaccacccatctctgagccccacgcggattttcctccatagccgagcgaaatcctggtacggcgagcgaggcagtcagaggcaccttttgtggaaggaggacaaagctggagggaaggaggttttcctaaaaggcacaaggcactgatactgcgttaggagtaattcctaggagcgtggtagctggtgggtggaaaactgtagccaaagaataaatgggaatggcccttcttggtatttaactgattcgttcacgaatggtccaaacagttgtagtgaaaaaaacattttggacaccgatgttttcatcctgcctgacgatcggcgtgaccgtggggtgttccatccttcctgggcaacagtgagagggcctgacaatcggcgtgaccgtggggtgttccatccttcctgggcaacagtgagaggggctcaggcccttctggccccatgcaggcatttccccagggtgtgtcccccgtcctgaataggccggaatgcctctgggtgcagctgagcctcttgaaaagggaagagtcatgtgacatgctctcggtgaacaggaaaatgagggaggacaaggagaggggcctggaggtgaggaggatggtgaccaacaccagggatgggatggagggtaaccccggggacgggggacggagggtaactccggggacggggggacggagggtaacaccgaggatgggggatggagggtaacaccacttctccaggtgcctttgggggatgctgccgcccctcccaccccagagtgaagtcaacaggattctgtccccaggagccccagagcctggcagctgggattggcccagtatgaaccactgttcactggctctgcaccctgggacaggctccctggtgtttccgccccagtttcccatctggacagtgagaccctgactgtccccgtcacaggtgcacatggaggcctggactctagcatgtcatcggcactcgttagtgtcagccctcgttagcgtttcttttgtcgtggtccatggacgaagtggatcttgctttgtgtgttcacagacctcctgctcactttaccttctgggaacactttgtaaatagcttcgtatgtggggaggactcaagtgattaattgaatatttcatcaggtgcagttctctgtgtcccagcttgcaaaacgctcttttgacacaacatttggtgaaatttccagggactcctgtggtcagcctcatggtttcactctgtcactttctaatgcagtgttctttgggagtcttttaaattaggtgccctcatttaaaagtaagttttataatatgcagtttcaggttacttctttacctttgtgtcttaggcagtggctccccacctgtgagtagtcagaaaggttcacgcagttttccagggcggcctttgcatttactggaactattaagagctcgttcctgcttcagccgtgattgaagcgcagtgtgcgtgaggccgtgcatggcttagcatcttctgcaggctagaggtcactttctgtccttccccgagcctgctctgctgtgctgagtgttccctgtgggcgacggtcacgctgtctggcacaggccaccgaggccacagggcaggctccccgtaggggagcctgcagaaaggcagagcccggcctcttcgcggcctttcacagggagcagaaagcgtaagcctgttattagagctgtgctagcccagaaagcctccgaacagtgtttaatttaggaatcggctcctaccaactgcccatttttaggatgtatttgagtttttgtgattttttttctgcactgaagctactgtgctggctctgagtcactgtcatgggacttcacgttgccctgacgggaagcggcgggggaggagggctgcgcagaggcttgcggccgtgataatgaagggcttgttgcctcttgggacagtgagttcaagctgtttgtaattgtcagcgtaaacagtgacccgctgaggacacggctgtaattcagggtggcatggttgattgtcatcgttaatatcaggcacctgcgtctaaaatgacggtgcccatagtgcggctccaggagggctgggcagctcctgcccaacacacatgctcctgggccctggcagccaaggttgcgccgccggccaggcctgcagctgtgggtgcagcggggccttcagggcaccgagcgcctccctcgtttgctcgtggggcccacccctctgtccccagtgcggctccccccccgggttctcccggccacatgcacacctccgtcttcacagcttccgtagttttctcgtgggtgccccaggtgagctcctggggagggttcatgtgtcagtcaggttctctccaagcgtccctggctcgtggctcagcaggtccctttcagatgagtcagccagctgtgtgcctgcatattcagcatacttgtcagggggctgcctcaggtcagagcaagaccgacgctcgcctcctccgtgggactttggagcccgccctggagagactccagccacatccagaggggctgcccgggcccccgtgggctggtgggagtgacttccaagccactcaaggccccactttgtgttcgtacaccctagaaaggcacttaaagagccgtgttctggtgctgtgtgcctcttgagtgaggcacaaaagcctggatgtggagctgagcgggcgctgccttcctcaggctgtgcttgtgttttggggcccctggagcacttgtggctgtgatttttgatgctgtctgtgggctcccctagacggtcccacctgcagcgtgagggccccatctgcagccaccgaggagctggcaggtccggctttggtcccactcagtccttctcaactttggtgacagaggtgacagcaaagcttcagctgggagccccaggccttccccgcttgggaccctgggaccgagataacagatccctccatccatgtgctgggggcctcgccgtgcggctcccttctctggtcaggggctgcgcccttgggctgggcagttcccgagtcctcgcactcaggggctcagggcgggtcccgggtgcagagagaaggagcagggtggcggttcgagcccaactgtgttggcttcatctttgacctcttgtctctaaatatatttgcaaagttttccagatgaaaactcagaaggaatttttaatgactgtataatctgtgaaggctgtggaagccaagtctgtccgcctctttcatccacctcacttctcactgttggggctgattttggcagcattcataggggcatggatgcaaggggcagtggccagccctcggccctacatccctcccctgctcccctcagccctgcatccctcccctcttccccttggccctgcgtccgtccctcccctcctcccctcctcccctcagccctcggccctgcgtccctcccctcctcccttcagccttgcatccctcccctcttcccctcgcccctgcgtccttccttcccctcctcccctcagccctcggccctgcgtccctcccctcctcccctcagccctgcatccctcccctcctcccctcagccctgcatccctcccctcttccccttggccttgtgtccatccctcccctcctcccctcagccctcagccctgcatccctcccctcctcccctcagccccacagcatttcggtttcatccccttctctgcacccgtcctcatgaaaacctaagtgcggctggagggagacgcctgtgcccattcccgtgacctccctcgccagcacggctgcagcgtccccttggcaggcatccgtctggtgctgcctctgtgccccctcctgtcaagtgcggctggagggagatgcctgcgcccgttcctgtgacctccctcgccagcccggctgcagcatcccctcggcacacatccatctggtgctgcctccgtgccccctcctgtcacctgatgctcgtgctcctgaatcttcacacgcgtgctccgtgcagccacctcactggctccctgggaagggtgacaatgtctcacgcctgtcagaatgcacctctctgtgcactgaatattccaacacagaatcattcctctgtgatgatttatgctttgcgctgtagaattggaataaagaaaaagtgaatttagacattacagccatcaggctgaagctgggtaattgcattagggaattaaatgagagcatttgagcttctcgagctctaattccacatctttgtatccccatcaccccatacccagtgtctaacacagctcttgatctagtagtttcttgataaatgcttattgaattgaactggactgagcttaacattcccacctggagttagaagccagtccctgagcaagttacatttagaacgtgaagaacgtgagtttgacgttactgtggtaaggggtatcctacacgtcataattccaagtcaatatcgggtatttagtcaaatggactcaagcatagagaggcattggcccatcggcgaaagggcaaggcatggtgctttaggtccaggtccctgatatcaactatgaaaataaaatgttgtcaactccaattacagccctgtcctcagctggtcactgtttatgctaacagttataaacagcttgaactcgctgttctgagaggcaacacgccttccattctcactgcaatgcagctgctttggtggatggaacatgcctctcttccctccctccctccccctcctccctccctcccccttcttctctccccctccctccctcccccttcctcctttccccctccccctccccctccctcccttccctctcccccctcctccctccctccccctcctccctccccctcctccctccccctaccatctctcctgggcgaggggtggaggagaagagacttctggaatcttccgcttcatccaagcagcttgggggcagcatcaacagctgcgacttggcagccccagcaggtgcctcagggcagcctttctaatgggaatcctggaatcatgtctttccttaatgtgtcctaaaggctggaggacacaaagggaaacaatgctcaatgctcagtcctgtgattttgtgtatttattggacttactttgaaattaaactaagacacacggtagagcattaaaaaaaagaaaaaacaggctatggtgtttgaaaaacaaacaaaaccatttggtttgttggtttgttcttagaccttcacagtagattctaggtcacatgtttcagtttatcagcgaatgacatcctctccggaagccatgtcaacctcttgtttgatgatgtcagccgcagcagaaagaagcactccgtaggccccgtgctcagcaccttggcatgagctcctgccgtcttttgttcatgctcatcacagctctgtgcagtgggcgtcctcctgatccacgtgggaggatggaggatggaggcggaagggtgagtgatggcaggatcacacgaggggtctcccccgagatagggaggggagccggcccaagacctcagtgcccatcgcatccttcctcctcctcctcttcctctctgtgactgtttgactcaggctgcagggacagatgtatgtgcagagtgtgtgtgcacccctggggggtgtgtgctcatattggcatagactcgtgagcgcatacagagcgtgtgtgcacacctggggttgtgtgctcatattggcagactcgtgagcacatagtgtgtgcaccccgggggtggtgtgtgctcatattggcacagactcgtgagcatgtacagagcatgtgtgcacaccttgggggtgtgtgtgggtgttggcagggacagatgtgtacagagcgtgtgcacacctgggggtgtgtgctcatattggcacagatgagcatgtacagaaggtgtgtgcacacctgggggtgtgtgcttatgttgtttggtaagtggcgaatacgtggcccgttgcgtcgggcggccctgtgcctgtgttgagtccgtcagtggccccttgggtcggggtctccctctctgaagactgcactcaagtgtcttgaggtttcagattcttcctctccaggtacttgggcctcctcaggaccaaacgtcagaaccagccaactgaaaactacaagaacgttcaaatgcatcttcagtgggaaaaacaaaaacaactggaataatcttcccacatgaccccgtggttaagccgttagatactccagccgacagatttagttactataaaattcacaccaattaaaatggttttgagagttgcagagctttaccactaaacgttgaaataattgaagcgttctgctccacttgcttacaaagcagggttggggataactttcagtccaaagtagcaaccttctaaatccagcttagatgcgaggctcccactgacacaggaggagacagtggcccttgtttattctcccgtgttcagatactttgtcatttttttgtatcctgatcatcacttctgcttttccaattcaaactaaaggtagtttagttctgttttggagaagctgtggttagtggtttcttttcatggtttgcttaatttcttgtctggtgcttaaatttacccaaatggacttttctttagtacgacggtgccatagcccagggcttctccctccgtatctgcccctcaggaggccccctaggaatgggtgctggagatccagcccctctccgtgtgccgttttctttgagtccaatgtaggtttggctcagagaagaaaacaggcctgtggtttaggtgcctctgactgcttgcttgtgaaacgtttaatgataaggcgccttccaaactaattttacacattgatagttgtagcttgaagtatcactgcagttgtaagaacaagaaacactcccataaaatagataggcagaaaaaagccataaaaattgaataaagcacaaataaaatggccttgtaagactatacaaggggaaatgctctccgtccagccagatcggctgtggcgtcctccgtaaatacattcagccacatgtgaccctgatcgcaatcactactgtgaattgtgatccagaatgttcttgggggccgacacctgggctgtgccagcagctgcatctgattgggtgtcttgccggtgatgtgcttagtgcagccagctgggctgaaggggtggccaccccgtgcacttgccacgtgcagctgttattctagtgatggagccgtgagtggtgtagcttgtccacctggtctacttaaagtacagggaacccatccacgggcgggtgcctcccaacacgggagctgccatttttatccaggactctctggcgctgcagagcccagcctgccggtccctgggcccatggggaggcaccagagggctctgctgggccatggaggtccccgaccaggtggtcactcattgcttgtggagtggtccatggcccatgagtttattcctggggtctgtgtgggtgagggtaaccaggttcacagctgggcacttaccccttgcacaggtgacactagttaaagtggaatctatattagctcgcacgggagtgcgtgaggagctgggtgggagggcgggcgggcgggcttggtcctggccctggcataaagcctgtgctcccgatattctgcgtcttcctgttgaggagccgccagggctgccgtgggctctgaagatggtgggtgccataaggaccaggggatgcggaagcctctagaggctgagggaggcaaggagacggtcgcttccccggagccagccctgctgacatctcgacgttagctggtgggacctgttttggattccagtttccagaaatgtgagaaaataagttcgtgttgtttggggcactaagtttggggtgatttaatagagaagtagtaaaactagcccacgaaggtgcacgtattgaaatgtgacttgtccaggtgttcacagtggcgttagggggacggcatcagtgttctgggaactgcagttttactgaaggaagggggctcaccgtgcctttcctcacataactgaaggtatgtccgcctgccacacagctcaggagacagcgactagaattctgattttatttcttatgggaagcaggccacagtcagaacacagtgagggctgaaatgagcttcctgcagcctcagctggaaagaagaattggaagtatttttgatgtttttctacacagacctgtcctttcaggttttgttaagttctggaaaaagggagaagccaggcataccttggcgagggacagtgtttctggcgatcgtgcggcttcagcctgaacgtggccgtgtggctgagcagtgcgggagggctctggtctgcacgtgtctgtgtggaccgaggtcacggggtattgtcccaagcacttatcctgatctggcagaggctctgttcccaaataattattccacggtttcagaggctgtagctgagtgatagtcttttaactttgttgcataaaagcaaacaaagtctgtcatgagagtctaaaaatcattatttagtagtcatgactaaattcatacatggagctttgggatggagtgaaagccaccgtcacctggcgtggacgctgtgtggtatttttagcatggtgggcgcctgctcgtgccttgagctctgtctgcagtgcgagcgacagctgtgcatttgagaaatgtgggcaggtcagcttgctcctccaggggcctgcgggcgtccggctcaggggcctgggacgaggccatgtcagtgggaaggagcttggttgtgtttcagcagatatgtctgcctctccaggcctgcaagccagccagaacccagttttcctttggtcatctaatgccagaaaaaaacctgtttcttagagattcttgtaatttatattaatgaaccatttgaccatacataagaaaatattatcagaaaaatgcatgaggctttacaacttggcagatgtgtaactcacatgattgaatcaaactgttgaagatacttgtttcacttgagggtttttagcattttatgtgcagaccaaatgccaatagcattctgaaagagtattttggaattttaaacacacaatcacagagtgggacagtactgggtcctgggatgctggtgaggtggacgtgacctcaagctcttggagctcacaagcaagcaggattcctaaattgtcacacctgcagtgcagggaagtcaaagtggatttctgtaaacgaggtattagtgcaataaggaacagatgagtgcccttggagggcagtttttgagcctcccagacacctggggctgggggggcggttacccaccagagcctggatggtggagctgggtttgctggttgccctgtgtggcaggtcattacgtgcaacaaggagcaggtgagcgcccttgagggtggtttctcagcctccttcggaaccgcaagtggaagacgccccaagcaggggtgggggtgggggggtggtatccacaggagcctggacagtggggctgggtttgctggtggccgctacgtggcaggtcactgcgtggagcaatgggaggtgggtggagtgggaatagaggacacaccctccacagctactgttgggagttggccctggtggcagagggtgcatagaaggattcccatcaagggcaacacggctagggtcccacgtgtgctggatgccgtgatatggccatgtgtggtctcagtctccacagccaccctgggaagtgggttcagttaccattcccatctcacatttgagaaatctcaggggctcacatcacagctgagtggggtggaactagtgtctcagccaggacgttggccctagagcccagctcttaccccgctgctatttgcagtcccccaagtttgtagagaggcatgtgcggtagtggggggcggaggtcgtgtatttcagggggcggctgagataccaacacagtaggggcggggggcaggaaataagtcaggcgggaggcacagaggcagtgcctgggaggtctgcatggggtctgggtgtgggggcacctctgggcctgtgaaccccgttgtgtgctcctggcttgcctaaccttggcccttagccatgtgctacgcattttatgtgaaatctcagtccctccctggctttctttccttaaatcacggagtctcagtggggatggggggtggttggtggtccatggaatttgccctccacctccccatccttgtcctgtctggcctgttatctgaatctgtcttttcagagcctgcaaatgagtagaggccacggcggcctctcgctgatgggcgtggctctcaaatattttcatcagaattgtgttaaatgctgattcctaggcaccccattagactctctatgcttgcctggcctgggtactttgaggaaggtacacagggttgctgggctattccaggagggaatttgcatttgtagaatgtccactgtggtccttcccgcactctgctctccacgcacacgtggcattaaacctggcagacctctgggtgctgtgctggtgaggaagccctggctgggcgaggggctgttggggctcagacttgattcctggtctgggggctgcctgcttattctgttcagtgggcccgctgatgggatgccctgggaagtcccgctgtgcagagacaggcttgggaaatgcagaccatggatttaaaaattcctaaaataagaaaatcttttatgaacaaagcaaattaatttgcgtctgactgaagacaatccttgcttgaataattggtttgtttacaaaatgggtcctatggacaataaacacagattaaagttttcattcatgcttgtctgtaacgtaaataggagctattactgccacctaaattagctttaaattttgtatcggattgcggtccagattacaaacggctgcttgataatctaattgataaaatcgaggaatttagtacttggaacccagagtgaagagaacagaattgcttttgtttctcaagtgtgtgtgactgagggatgacctgggtgaagagaagtgcctggagtcattacactcaaggaggagatctgccccagcctttctcagcgtcttcaggataaaacaaaagggtgataaatgtggaaaaatgcagcactgagtttgtctatggtctgagcttctcatgtggtcattaatgtgagcgggctgtatctgtggagcctccctacaggcacaaaggaatcaggctagagtaagacggccggcaaactctggcatctgggctgcgtgtcgtttcctaaagcccttttgggtgaagtgacacaggcgcaatgtctgtttggaggagtgtaatctcacgcatgagacgcagattttaaacactaaagtcaagaagcttggtgggagtggctgtcttccaagtgggtttctgtgttgccatggatgaggcatggatgtgtcatctgtcggtgaaatgcgctggtgaagaggctaagcaaaccctgtgtgtgtgtgtggggcgggtgtgtgtgtgtatatgaacctacatctcttctggcatccgaagtaaatagacgttttgtaaaactggtgaatttgatgactctgaccctaaccctgagagttgaagtctggtgcagtgtcttgagccctcttctgcattgagggtgagtgactgtaaatgactgattcctcagtggcgaaagttcaaatttagcgtccctgaggaagccagacctcatagtcacctgtgtctccattgtaaacaccgtggcccctatgcgggtggctgcgagtttccaggccctccttgcagaagcagccatgcagtgcttggtgatttgataacatcagccaccttctgtcttctgtctaatcacggtacaaatgattttcctacagggaaacagatctcatttcttccccgatcgttgggagaagcagcccgcctagggaccgcaccgtcctctgcactttcacagtgaagcctgtgtctctctccgagaagtgtcacgtgtgtcgtgggaatcacgggaattgcttccttaattctcctttcttaatgagggcttgggacagcgctgcctgtttcacatgggacgagcagctggtggtttctggctggcgtgggaccagcgcttcggctgtgtcatcacatctggtggcctgtccagctgggtgtcattgtctcttgtctcttggctgaggcaactgtgatgccatgggggtcacgcttgtgtcagggccaacccagttcttcccatgcacacctctcctgctggagtgcttttccttatgatgacgtgttggatcagtgtggagaatgcagagaggctctgggcctctccttcccatacctactccctggagccgcgatacccggcaagggagcccgtagccagaggctcctttaaatttcattagaataaagatttgattacacagctaaacacacttgaaaggaactttatggatcacattcaagactcagcccttcaggcccagtggccatgtttcggggctcagcagctgtaggtggctgttgtctttgtgtcggccgagcagattgggacgtttccagttcagcaggcagttctcttgcacggctgtgcctgtggtgagggcaccttggctggagagcctcgtggggggatcccttaggcctctggctgcagccaggctgcatggttcctgtgccccgggtcctctgcaggccgagacggatcccaccacagagccggcactgttagacttgggtactgtgtgcagacaaagaggtgcatgtccaggcctggcgggggctggggtgactctggcctccttggccaggctcccgtctccgagtctccaggggaaatgcacccatcatccacaccatacactggaggaaaactgcaggcttctctgtgtggatggtgaattgagatcaccaagtgtgactcggcttgggctcctagccaccgtggaacccagtgataccttttaggtggaacctgacatgcctccatgtgtgcatggcaaagagaatgcagcgttgtcagcttgaatccagatgtgtgcctgttttgaggtggaaggttctgggagcgttggctgttggtgactgtcctgccatggaggacgttgaatgcaggcactggtttaggataatgcctggtttcctggtcctgtatgtgggtatccctgaatatcctgggctggaggaaggcagggcagatgggagggtgacaagaggtcaggtgtttccagctgtggggagtgatgccatcagatggccgagatcaggagggtggccggggaaccaaagcaggggtgtgtggaaacgccatgtttcccggggcacagggaagacctgttgagatcaggagggtggctgggggaccaaagcaggtgtgcgaaatgccatgtttaccagggtgtggagaggatctgttgaactccattcctgggcaacagttcttccattctcaggaatctgccattgtaattcagtagcaaattctgcaattgctctaattacctgctgttaagtccccatcccaattaccatgaattagaaacagtgacaattattgagaggtaaggaatcgcatatttccagggtggagacgaatgcagttgtttgcctggtcaagccttgccaagaaaaaccagtggaaccagttttaggtgccttgagttccctccaaatcggattccttagtgggcttgtgtccacagctgctgcagttcctcccgggcctggcaggcacgttccagacattcacatctcagctcagatgcaggcgtgcacattatttatagaaaatcgcactgcactgtgatcggctctagctgacgttttctaggtgggaggcggaggccgaggacctgtaagggactgtccgagcgtcctctcactggcttggagcaggtgcacatctgttcttcaaaagttctaatgggatgaaattagaaatctgaattttaaaaattcacatgttatgaactctggtaatttcccctgaaatgagtgactgttttttgcagacgaggcagtcagcctgtagctctccttagaacggtcctagaccttgggccatgctgtcctgtgacctcttcctgggtgtgggatgctctgcttgaagcaaaactgcaggaaagaacgtggtcagcgttcatcactgctgcagccagctcaacgtgcacacccactgggaggggggccggatcccttaaaattttacatgcatttaacagtaaaccagcaagtcagccagtgctttccgtaaccaagctgcttggctcatgggaacctgacacttcttgactttccggaagagaatacttgcttctgtggagcgtcaatatttgtctcatttcttgagactctgttcaaagcaatgaacatgtgtgtaaattaggacctttttgtgtaaattgggccacagagctctctagacacagtcggcggagtaaacggctgtgaaagatgccacctgatgtgagctgtggccgggccctttggaacctgggatcccatctccagcctttcaaaggacgtagaggaatataagatgcagatgggagggttcatattttgggcatctctgttcttttgaaatcaaagtgcaaagaaaaattttgccttgaggtcttaccccacacttgtttttctcctgaggttttaaaatttccttaactgtgctttttctccttccatccttggggaacttctttccatcttcatatcttcttaaaagatagttaaattcaacattgaaatgtaaacacatgctttcatattatttttcttttagctgatatatttgacatcggtgaagaattaagtgggtgtattggtttattttttttttttgagacggagtcttgctgtgttgcccaggctggagcgcagtggtgtgaccttggctcactgcaacctcgcctcctgggttcacgccattctcctgcctcagcctcctgagtagctgggattataagtgcccgtcaccatggctggctcatttttcgtattagtagagacgaggtttcaacatgttggccaggctgtctcgaactcctgacctcaggtgatgcgctcaccttggcctcccaaagtgctgggatgacaggcgtgagccaccgcacccgtcctgggttattcttgattttaactataatagatcccttaaaaaaaagctgtctgaaaatcttgaaattaaagagcttacttggacagggattcggacaccagttgaatggcccagcacaaaccatagttacatgggtcactgggcctgttagatcctagggtatttgaagtcgtggggatatttgcatttctgcctctgaatatcatgttagtacgaattcagctggtgtttgagggccaggctcagatctgggagaacaagagcccctgctctcatggcactgctttcctacgtgtgtgccttaggaaaatagcatcggatgatttttcagtgagtggggaagatggaaaaaaaggaagcttaagatgtttaattgttcagagcaagggaagtgcaaggaatgctcagcttttctgctgctaaagaggccctggtgggaggctgtttcagaggtggggtttctctgagaaaggtggtaagagacaaataggatgccccatctggtttgccagagatggggaaagttagtttcccaaaaacagtctgtgctctggcaaaggcttcggaaaaccagctagagtgcgggaccttgatggccgctgggtagaaggaaaacattgctggtcctgcggcctgcgctattcttccactgctataaagaactacctgaggctgggtaattgataaggaaaaaaggtttaatcggcatactgttctgtgggctgtacaggcttctacatctggggaaacttacaatcagggtggaaggtgaaggggaggcaggcacgtctttacatggccggaaagagagagtgaaggggaaggtgccatgcactttcaaacaaccagatctcatgagaactatcatgagacagcacttgggattgtgctaaaccattagaaacctccctcatgagtcagtcacctcccaccagggcccacctccaacactgggtgttagaaagcacccccgtgagtcagtcacctcccaccagggcccacctccaacactggggggttagaaagcacccccgtgagtcagtcacctcccaccagggcccacctccaacacgggggggttagaaaccacccccatgagtcagtcacctcccaccagggcccacctccaacactggggggttagaaaccacccccatgagtcagtcacctcccaccagggcccacctccaacactggggcgttagaaaccacccccatgagtcagtcacctcccaccagggcccacctccaacactggggggttagaaaccacccccatgagtcagtcaccgcccaccagggcccacctccaacactgggggttacagttcagcatgagatttgggtggggacacacagccacaccatgtctggctccccgttcttacctgcacttgcttcgcaaacgattctgtcattggtttatttttgtttttgttgatacataatatatgtacatattttcagggtgcatgtgataccttgatacgtccctatattgatcaaatctgggtaattgggatgtctttcactttaaacattttcttttccttgtgctagtaacattcaagttattctctcctagctgttttgaaatacacagtaggtgacccactgacattcccctgctggtttatcaatagtagatcttgtgctcctgtcaggctgtgtgtttgtgccccttaccagcctctccccatgctgcttatgagtgggccctgctgaccacctacttttggcctccatgacatctgctgtcagctcctgctcatgagtgagaacatgcaccatttctttctgtgcttggctcgtttgcttaatgtaatgtcctccagctccatgctgttgtggatgacagggctctctcctctgtgtggtggagtactgctcctgtgtatgctcaggccacattcccttcatcccctgttgaccggcactcaggtgattccggatcttggctgctgtggacggtgctgcattgaagctgggagcagtcactggctttatatttgggggacgtgagccactttgatgttctcaagcagcctgtccccaaagccctcggtggaatgccgcattcctttgtgcccctcgcttccactaggaagaaccgctgggaaggggctttgagtgaacgcttgggtttctgtctctaattggtacccggctgcactgaccaagcaggggtcccagtgaccctggacattgcctcacataagatccaaagatgcagttaggttctttttaacttcttaaaaaatgcttttgacctggttaacctatagcattatcagttagtgtttttgatattggaaaggtgatgtattttattttctaagaaggaaagaaacacaagttatcctgttaaatactctaaccacagactaaatcacatcaaggaaagaggaactattttggggggaaattagcccttcatgtcaaagataaaggagatgacttacattgttttttaattgagttaattatgaaatcttaagtgggtttgagaagatgagctgtggatgctgaaaggagagactgatgctgattgaatgttagtcagccctgataggatgtggctagtatttcaagcttgctccagtattgtttgatagattgtaagtgaatgtaaagatctatttgatgcttttattttacaaaatactattgagaaaaagtttctgacagccagggaacagccttcaaccaatttcttcctaatttccatcaccagaaaaaacttgtcctgttaattccagaatttacttttggaaagttcctgtaaggagagcagaggtattggtggttgaatggtgacttgaatttaggtgaagatcattaaatatttttgtagtcatgtttgtcttggtggttttagcaatttcatattaaatttagaactgcgagtcataaaaaccaaacgtggtcttaccctttgcttttgtgatactccttttgtttatatgactatactggtaaagtgatgacaaaatcatgcttatagggttttcttctgtgtagatattaggatttttaggggaacaaattcttctaatagacattgtgccatgtgttggggtcctttgtatattagtcaaatcactgtaatgagaaccacttgcaagtatatttctatacaagatcttttatatgctgactcgtggtatgtaaaatccttcatcctctaagaagactaagcaatgggttggaggagaggtttatcccccattaggtctattccgaatgcccagaattgaatgcaagtacgaattgtttttgaagtggtgtgtgtgtggggggatgtgtgtgtgtgggggggatgtgtgtgtgtggggggggatgtgtgtgtgtggggggggatgtgtgtgtgtggggggggatgtgtgtgtgtggggggggatgtgtgtgtgtggggggggatgtgtgtgtggggggggggatgtgtgtgtggggggggggggggggtgtgtgtgggggggtgtgtgtgggggggtgtgtgggggggtgtgtgtgtggggggggtgggggggtgtgtgggtgtgtgtgtgggtgtggggggatgggtgtggggggggtgtgtgtggggggggctgggggtgtgtgtggggggctgtgggggtgtgtgtgtggggggctgtgtgtggggggggctgtgggggggtgtgtgggggggctgtgtgtgtgtaggggctgtgtgtgtgtgtgtgtgtgtaggggctgtgtgtgtgtgtgtgtgtaggggctgtgtgtggggggctgtgggggtgtgtgtggggggggctgtgggggtgtgtgtgggggggctgtgtgtgtgttggggctgtgtgtgtggggtgtgtgtggggggggctgtgggggtgtgtgtgggggggctgtgtgtgtgttggggctgtgtgtgtggtgtgtgtgttcctttttaggttatgagagggaggtagatcaaagaccagatttgctgatgaacatttgtgcatattctagtggagaagtcatatgacttgaccgcacctgcggactccgattttggtttcattacggtgtctgtagccgcaagcctcagccacctctgggacccacactgaggggctgtggtgtgggttattacagagtcgtacgtcttagcgaatgacacaaatggccttgtgggcctactttggctttgtttgaacctgtagattgttaaactaattttagtttaacattttgaagattataaattgtgattcttgtctaagaagaggtttccattgtctctgaagacagaagccgcaatacagatggtctctggctcacaatgtttacacttgtgatttttcaaccttatggcgtgaactagtcacactcattgcatcgtttgggccgagatgggctgcctctggatgaacccgttgtaagtcgaaactattatgtcaaatgcactttctatttaggatattttcagcttatgctgggtttatcagaacagtttagccacgtggtaagtcagggagcatacgtgctcataaaggtagagacgatctcatagataccatttaagatataacgtctctgatgttatagagggatacaatgaaaaaaatcaagtgggacttggaagtcttggagggactcatgtaggcggctcctggaatgcagacgtgagcaccactggcttctggataatgaagtctgtgccttcttagcccagtgggttatcagctgctctcgagggcagaggtccagcagctcagctgaggaccgttcctgtgtttaggtgtttgagctgccttaaaagaggcaggtcagttctcactggtgtcttcgaggctttaggccttctgaataagcaggaggaaggacgactttgtagagctttggaaatctcagcggacttcagggccatcctccttggcaggagagccccaccgaggtgagcagggtgccgtgcaggccgtgctgggcccaggcatgtacggacgttaagggccacgggacacagatcggtcttggttcctaagtgatgttgatggccacgcagcatttctgccacgtacatgagtgcagggacttgggtttggggtgtgcgtcctggctgcctagttgcttggaaggcccctattcagaccccagcctgagtcaccatgacaggcctccagcttcacacgccacacggaagctgtggcgtccgtcactgacgcccaccagatgtcagatgtcagatgtgcgtgtgtagcttccctggtctcgggttgggtcttgttttgaggttatagaaacgttctttaagaggggttttggattttttgttgtttgcaaggaggcagcagagtgcttaagcagtgagatccctttcctaatgagaattcagatcacagcacgtaattacagcagtggggccatgagatcccctcccaaccaatgagaattcggatcacagcaggtaattacggcagcggggcgagagatccccttcccaaccaatgagaattcggatcacagcaggtaattacggcagcggggccgtgagatcccctcccaaccaatgagaattcagatcacagcaggtaattaccgcagcggggcgagagatccccttcccaaccaatgagaattcggatcacagcaggtaattacggcagcggggccgtgagatcccctcccaaccaatgagaattcagatcacagcaggtaattacggcagcggggcgagtggccgtgccctgagctgtgtggctgtgactggtgtcttccccctcggacagagcgtgctggggcctcagtggtcctctgggggggtgggtggagcccatgagccaggtgctgctgggccgtggctggcaccccagcccagggtttatgcaggactcgttctgaggacaacttagaacccagaaagcagcgcgaggagaaacgggttcgtgggtttctgtatctttggtgcttcccggtctccacgctgcgcaggctccgggggttctcgccaggaagacttgcacagtcggaccccggcgtggagtggggctgcagagagtcttacaggagccggaagtgggggggaacgtctcgcaagtgggacctttcagatgggcccagcaggatgcatatgtggaaatggcacggcctgaaaggctgcagtgggctccgtttctgctctcctgagagtctctgcccggttttctttggtttttgtctgtttggaggacgcttcctcctttcttgggcttacccagccttctgagcttccttgttgagtatcatagccctgagaaggcatttttattgcataattatgttatcctggtggctggttaagtgacctgcaaatgtgggtgattgagtagttctgagggagatcaatatctaagacagaggtggcaatgaaatgttcaggcaggcgtcaggaatctgttctctgcttcatattggggccctggtttgctgacagtcttcacactccatctaaaatggggaaaataaagtttcacagattcggcttaagctgagagctttctccagcacagtcttgtgtgagtaacagtttatgtggtgcgaagggcgggcatcagttgatcttatttgttgtggtgcttatggtagtttttctgtaaggaattttattagcttgggcaagggaatcatgagtgataaattgaaagaatgtttcaggaaattctggaacctgtagtgaatctggaatctgtatgaaattgagatttggagtctcacgatttcctaacgtgtccctgaaacccagtagttgagatagtcgtagagcttcagttctgctgcccccgttccccattttaaaaggaacacgttgctttcatctagaaggttctgagctctgagtgcagccggcggagtgaccagctctctgcatcagaggggaagccagggctgcgctcacggcatcgcggcagctgggagccgaccctggacctcaggcacgcatgatgctgaccattttctgtaaactccaaggttgcagtggtctccttggtgctttatagtcttctgaagcttttgatgtgtctgcacttcatagatctttcggaagtagatggccttttccccgcacccttgggctgagttttatcagaggctggtgtgtgggaagcaccatagccacttctgacagaaactcgggtgcccagccgaggtcagagtggaaatttgtgcttttccttcgctccagtatggtctggcttctccctgcttggccagaagaaaatcatgcttatccaagtcataggcaaaccccctaaattaaacatttgtcttttttctttaatatacccatttagtttatatgggacaatagattgacaaatgtcttttaggggaaaattaatttaattagagaactttttggataaaaactataatcaagagaagctgttttgtaataagatctagttaaatactaaagttgaaagctccttatatttgatcttaaacttgggcccagggtgcgtgtccgcacgcttgcgctcatgacgccaggctcagctgtgaactacaggcacactgtacttactttctggttgcttttttgaaagtcttattgcttggcctctccgactcagatgttgagttacattgattctgttccgaatgtgttcatccctccatctagggtccactcgtctttcagggagcaactgccttcctcatctttgtctcctatggtattgtatatttaatagtcaaatatttataggttgcatgggtgactgatgtgttcattaggaggaaaacaatgccaatttttacgtcattataatggacttgttaaatgcttgttagtgtaatgaagtttacatggcaaaagaggctttggagatgtgactgcgtaacagacagtgagatgggggaggaccctggattgtccaggtgggtccagtgtcctcacacacatgccttgatgagagggagtacgagggtctgcctcagaggagacctgaggatgaggtagaggccagagggggtgtggggctgagggcagggctggggggtggggtggtgttgtggggctgatgagggagctggggccggaggggcttggggccaagggtggggcagtggttggaggggtgccgggccggaggggtgtggggctgaggctggggcagtggtcggaggggtgtggggctgtgagccaagctgcatggtggcctctgatttgggagactccaggcaggaatgcagcctactgaccccttgacttcagccctgggactcctgactttcagggctgtgagaggaggtctgcgtgtgtggtaatttgttgcagcagcaataggaagttaatgcattgtatctattcacctccagacctttgaaaagtaaccctgttgtatcagccttttgtgtgccctaaattataatgagatggtttgtgggaaatagacacaaacgatggcagaacagatagttggacagaaacagtgtcttctgtggttctatgatttgggtctttaaagttagatttcgatcacagtatggtcttgttccaggtatacctgatatacttgttcagagctcctgggggagtggtctttaacacatgacgtgttaggattaaaacttcaagcacatcagagacagaggtcctgagtcagtgttaggcgacctttgaataagggttggggtatagaatctgcccacattactagtatgaagcagcaaaatctcatggttggtttttttttttttttttttttttttttttttttttgagatggagtctcattctgtcacccagattggagtacagtggcgcagcctcggctcactgcaacccccgcccccctgtgctcaagtgattctcctgcctcagcctccaaattgcatgatttattttcctgttttatatacttagtatatgaaaactctgcagactttattaacacaaatgacatgccagaacttacatatgataatccagcattttcccgtgcaaattagtggtgatgtggaattcctgggctggtttggttttataagacgtagggtggattctttgcctaatttctatggagctaacaattgttaatcacccagcactcttgcctcccccaacggctccggtgaggggtgttatcaccactgttgtgttgagaggcgggagactgaagcttagacgagcaggtgacatgttgctgtccggcctcacccaccctgtagtttcctgccatggcccagctatctttctgcgaaaaaggatcgacaccctggttctgggtagaattccttgtgaaccccgtttccattctccagggagttcttgctttatggtggtggctcacgggaggcctctggcccactgagaaagtggctaatgttgtaacatgactgtctgggctgctgtagattgggtgatctgtagctcacagctctggaggctgggaagtccgaggtcaaggtgcctgcagatctggtgccccaggacctgttgctcacagacggcaacatctcactgggcctcacgtggcggaggagcaggagggctccttcaggccttccaacaaggacaccaaccccggtcctgagagcgaggcctcccaaaggccacaccttttaacgtatcccatcggagattgcttcagtgtgcgtgaggttttggggacagacattcaggccagagccattgctctgctgtggtgttagggctgcgatggtatcattactgccacagagccacagccttctcagctgcatttgctgcaagaggaagacacaggtgcctgtgcaagttggggttcggtgcaagaagcggagaccctctgggaatcagaatcagcaggaggaacttaagggctttgagaactgacactttaggactgcaggagttttcttcagactgtaaaaaccttggtgtgtgacaatactgaacgttgcctgagtcctgaaatcctgtaaacagtgatggttaagacattccccgcccccaccccgaccttatttactgcaaaaagccccttcccatgtggcttaggctgacttgcaggtgaccctttaccaaggacaaggccagagtcaggacttcaaacacccattctctgcctcataagtgattagctaaactgccggttcccactgatcaatcagaacaaaacgcgtgttagccaaatcttggttcctcccgttctctccttacccgagcctgaggcccctctggagaacaggcagcctctgaggaaacctctgatccccgatcagccaccccatcgcctgcgtccccagccgcttcctcctggccttgttcccccttccctgtgaaggagagaacagtttcggctggccctgagatgctggcaggcctgcagtcagggcagtgggcgcctcccaccttgaaatggtccttcgtggtgcagttctgcttacggggtagactttgttgccttccacagaggacagttagggtgggcaggaaggaagtctctgccacaagtctgcattccaggctgtttccagaagtgggaattctctcgtgccctggagtctgggaatgcatttttagtttcccagcttcaggtagaattgaaattgagtgagccaacccaccacatccatctggagccaggaactagtgccgttttaaagcggcagtttctccgtaagattacaaaaaatgcacttagcacgtttcttactttgacatatgcatttggacatctaaaatgggaatggtggtttttgaagcatggatgtagttttaaattttgagtgttgtaaaccttaatgtagcttcctaaaatttttgcctgattatctagagatttactgaacctttggagtggtaatgagtttatctgtatgactttgctttctatgatgcaatgaaagtactataattaaaacctctacagttgggtgcagcaggcgattggccaaaacaaattctgccttttggtttttcttaaccaaacaagggagtaaagagtgtaggctgaagtggcaaattcatttcagagtacgccagagccctcaacgattgactgagcagccttctcaggtgaacatgtaacgtgccatgagtcttggcaaggctggctacccatgtgtgcacgtgacaccacagagccacacctgggaagatgtggtttctgtaacaagctttggaaaacctaagttcaacttaattatccaactttgttacagaaaaagctttgaccagatggccaaagacctgattctcttatggttgagacgtggttataaaattgcccttacttggtgccaatcagtgtttgtccacaacgatactcctccaacctcactgaatagtttggagaatgaaatgagactgtgaaaatctccttaaggtgaaaagcgctctggggcacccaggaatatccacacaccctgggccatcctctttaaggtggaaagggctgtcgggtcattgaggagcatccggaaaccctctttaaggtggagagggctgctgtggggtcgcacgggagcatccgcacaccctgggccgtcctctttaaggtggacagggcttgtggggtcgctccggagcatccgaacaccctgggccgtcgtctttaaggtggaaagggctgtcgggtggctccggagcatctgcacaccctgggctgtcgtggccgtcccacttgctgctcagtcacctccatgttcccacattcaggctttgggacactcttattagcagctcatcccctgggctggctgaggaaggagtgggaggttgtgctgaggctgtgtcaccatctgccctgacatgagctgggcaaggcagcggcagtgactccagaggaacctggtcactgagggttccagtaggaagtgcagaggcttggggtggctctgccggtcgtaaccaaatgtcttccctcttatttccacgattccttctagttctgtgccttgtactacagggtctctgtgtgcccataaatacatgttagttatgatacaggttcctctttcccctctgcctggagctgggcccggggaatgaagtgcagacctccttgccgctggatgcccgctggcatgaggcactgcctgccctgctaaggcctagagagagtcctggaagccccctcctgcacacccggcctcttgaggtgtacacaggagatggatgagctccccctgtcccacactgagcagagactggggaggcggcggcagcactgtcccccacagtgcatcctcagtgcatggaggaaagtctgttcatgcttaaaacacagctcgtcccctctcctcaaaagcaggatgacaaccgcatttacatccggaatcttaaaaaagggcccgttgggacatgagggttgcagttgagtacttgctccgaatgcactggagctctgggctctgtggccccagggggtcctctgtccactgagggtgctgggttacctggaaggtccctccagcctctgcgattttgcccttttcaggttaacatgtcgtcattttcctgaacagcactgcctttcgttcactgacccacgagtgaacagctggtcagatgaccactgctgcttccttcgactgggaagtggtgacatgattatacttccatggaacttggtttgttcttggtctagtaagggttcagttgtatcttgatgtttaatctgcaactctgaattggtcttttgattgcaaagagattgcttgctggatttgtttctaaatatttcatggataataggagaaactcacttacctgtgtgttcctgtaacgtgtttttgccgggtatttaaatgggtgtcttagtaagcccttagcccactttctgtgtgtggtggattcattctaaccattctgttgagaccagaggatgtggggtgctgtctccctaaactagggggaaatggcattattctgccctcctccctgggaacgctggggtttctgggtctctaacttggctcccacgctgggagagtggctgtggcttctggagcctgttttgtgagggactgactccttcacttactttattccacacggtcttcgccgctttatgatgcaaggatgagggaggtgggcccgggggccgtgcctgtgcctcaaaggctcgatgcagaaagtcgttgttggaaggatgttccttgaggcagtcttttctacttttaacagaaaagtaactattcacatggctctattctgctagtgatgtttcaaaataattgatgcagagttacaaagatgtcggagacacccatgacccactccgggctggggccaggccttctgctcagatgccttcagaccacattcagatgccaaagattcttgcttggttattctcaaacttaagagaatctaaaacacaagccacggtgtggattttctcttgagctctcatgcctttaattgctttgtatttggggaatgaatgacttcatcaaggggaaagaatttgaggaagcagcctctgaagctaggagggggtggggaggggtggcgtgaggagcagagggaagaggagctgtggggggaggagccaggctggggcctctccccatgatgctcccctacccctgtcgcgaggcctcggactgagactgactttcccacaggaaatgcatgtgatgattgcatgtcggttttgtgggctggccatatggattgagggaatgtccatgttgtgattcttcattgatttgaaggttggaaaggtttgtgctcaatgcaggggtctcttggtgcgatgggaaatgtgatcgcagctgccctcggggtgggaagagaggcccttggtggccggtgccggctttcaccttcctgggtgagctgcccttggggtggggagggaggccctcgtggcccttggtggtggccggtgccggccttggcctcccccagtgagtgctgctccatccctggtgtctccgactctttgcctggcactttcctcgtgggaggccgtgatccatcagccttgtccacgcgtgtcctgcagacttgtgctgactctgcaggtccagcggtggttagaggaggccctcctaaacgtttaatgatggcgctgctgagtgcatgaagccacgtcagccccagagtccaggtagggaaccgtggggtagagggaagagtggacagatgggtgctttccttggcccctgggggcatggccaggtccacgttcagacctcctggtttctcccgtatttccataaatagccaggaaaggactcaggacccctaggacctcatgggtgtaagctgtgtcctcgtgtggccccagctgtggccagtgacgttattctctttaacctcaagcttattttgtataaaaacatgaagggacagaagtagttcaggagcctctgaagacttacgtaattgttagtaggcctacttttatgatttcttacgtattaagagcaaatcatgaaacaaactcatttctgtttgaaggaatctttactgttctcatttttgtggcaagtgacattgattctttgcatagtgacagcgttagtgcactcctgcccagccctgctgcccagcgtgtcctcggcacacacctctgtccattggtctccattcaccaggtctccattcacctttccacctagaattgtaggggggcactgggatattggggctagaaggaaactctgaagaccacttctaggggcagcttagtcagggctctccagagagacagagccagcccggtgtgtgtgtgtccagggggaggcttgctgcaggggctacggaggccaagaagccccaggacccactgcctgcaacctggaggcctgggagggtgtggctcaaaggcttgagaagcggagggtgcagatcccacccaggtctgaggagctgagacccaggagcaccgggggcagaagacggatgccactggcctgcagccagacaggtggagcgagcccagccttccccgccttgctgttttactcgagccctggagccctgggtggacagggtggtgccccctacactggcgaggatgggtctccacttagtctccactcagtccagaggcaaacacacatctcacacagaaataatgcagaaccagccacctgggcaccccggggcccactcaggtcgatacacaaaaccaatgccacgtgtggccctcatgtctgcatgttcgcgtcactatgcgcattgctcagtcatcgccttggtgagcttgaaagctcattgtgtggttctgggtgtctttgtcctgggcagtggtggtgatgacaggctccccaccaccccagctcaggcacaggtgatgccaccaatggctccttatttctcagacgcttgagccgggtgctctgtgaagccagttccacttcccgcagcatctgttccctatgccgattccattcacagtatgtgccttccttccttggggtgcagccttctgtcagggaggaactgtgtcctattcacctacgtctcctgtgatgtatctcatggctgaataagtacctataggatacctcggtggcagaatgataggttcattggaaggaaaacttaatacttttttttttttttttttttttttttttttgagatggagtttcgcactggtcgcccaggctgaagtgcaatggcatgatctcggctcactgcaacctctccctcccaggttcaagtgattctcctcctttagcctcccaagtagctgggattacaggcacctgcgcccggctaattttcgttagagatggggtttcaccatgttggccaggctggtcttaaagtcctgatctcaggtgatgcacccaccttggccacccaacgtgctgggattacaggcgtgagccaccgcacccagcaacttaatatcattttttatcatttataatgggcttgttcaatacttaggttacttttattttttaaaacgttatctgtgacctttcagcttttcatagcacttctcgcgtgaatctttaaaaaaggtcctttagccgtggggaaggagttatccgtttgagcagagggaggcggaggaacaggccttagtgggtctgagcacaggcagtcaccccagccttggtgcttatttacgtctgttttccattcaccatagcagtgtccactctttgtcggcttaaaaataagctttttcctccgctttctaatcagaacagttagtttgttaaccatccctttatcaagaacgatggctgtcaggcctcagattatgacacaagtagtaagtgcggctgaccctgaacaacatgggcttgagcttcgaaggatcatttacgttaattttttttcccaaccaaacccttattgaaaaaacctgactttgtggagggccgacatttcctacatgcagctccacagggtgggcgcgggtcctgcggacgcgtggatttcggtaaacccggggtgtcctggaaccgatgtccctgtgtagatggagggacaactggagctttttaaaagtttgtgtcctgccttgttctaaaaaggcttcaaggtagatgcaaaatcatttcattctttcagttctcttggtgggatattgatgtttgttcttcagtgtctcaaatcctgagtgagaagagttagtgcttcagggacaaagccacagtctggaaacacatattgagatactcactttttcttcatggtttcacaaaaggttgtggtcatattttattcagttgaaccataggaaactgccaatatttggctgtttttggcctacaaaatggcaagtttgtatattaaaaccaaaggcttcctggatggggaaaataggaactaataagaacctgaagttttctgtcatggcccacgagtcacaggtgagtaaacctgcgtgaggggacgttggctgtacagtattttctttgttttgagactgtcagaaaaaggtcagtttgattccgtgtgggccctgcgcctcgcctttgctgcagaggggatttgccattttacctcttgtcccgagtgcccaggaggctgatgccatgtagaagacctgcgggtcggtggatgtgaacgggcatcggacacactgcaccttgggacacatctgagaagtgcgtgctttgcaccaggtctgcggtgagggcgtgttctgtctcctctcccttctctggctttgcaggccttggaagttggtcctgggaagtgaaattagctaatgctaattagctcaaggtcaaagcccgaatcaggctcatcatttcctgcagtgtccacagcagcaggtcgtaaattcgacatgatctgaacccggagagtcgagattccgccctggtttgcggctcggttgtgtgtggtcttgagaaagtgaacatgggttttcttgactctgagggggccgacgagacctgcccttcactaggggtgttgaagcattgggccttcctgtcaggaagcagccagggactcgagaaagcaccacgtgccctccagttcccttacgttgaaatggtttatactcagccacgttcccttatgttaaaatgatttgtactcagccatgttctcttacgttgaaatggtctgtactcggccatgttcccttacgttgaaatggtttgtactcggccatgttcccttacgttgaaatggtttgtactcggccatgttcccttatgttgaaatggtttgtactcggccatgttcccttatgttgaaatggtttgtacttggccatgttcccttatgttgaaatggtttgtactcggccgtgccaggtcattttgggaggtaagtggggagtttcatgtggggttgtgcagtattcttaggtgtcaggtgtgagagttgaatttgtagaagctgtgcagataggaaagggcctggcaggagtgctatttacatggagctgacttaaccgaggtctgtgctctccctgggtccatgtctggccgttctctcccagtctgcaacgggaccttcacgtgactcagcaccgtcggcccctctgtcatcccactgcgtaaacgtctgaggatctgtgcacggctgctctgttagtgagttgtgataatgaactgagaaacggtgaacacaccctgaattggttggcactggttccacggccagttccgccgtggttggagtcattcatgataaagtgtgctggactcctacacagagctctgaaattcagaggccctttaactcggcagctaaccagctgctgctttcagaagacattcgagtcccctttacctgccagggtgaccctgggaatttgaaggtgagtgagacaagctctccctttcttgtggactttactgtccagaggggagacggatgtggatggtaaaggaggccctatcggaggtcagtgcatgtcggttttatttcttcagcacttgctgtgttcaggtggtgccccaggccgtgtgcagagcatctggggaccccgcccgtgacatcccaggcacagctaggatatgtgccgtctccatgcttggcccagcttttggggggaagtaccgaggagggcccctgcctctgctggagagggttggaagtcagggcagccttccacgaggagatgatcgccagctgatttctccagaaagggtgggggggggggggtcccgcgtgggcagagcagggcggcatgcacagacccgggtgtggggtctgctgggagacagcgggggtgaggtgtgaaggcagttggaatttacaggataaattatcactaaggtgatgttgggaaaacatataaaattgggactctctggggtaaacgtggacttagggttacactgggcgtgggtgtttgcaggctctgaagtcagatttaggaaagtggggcagagctgagccccagatgacgatgagaccaccccggggggatgttgaatgaggcagggatggaaacccagtgagtgtcctggggttggtcctgcaggaaggcggcagaggagaccagtgccctcaaaggtgtggggactgcctctcagtgctgggattgcaggcatgagccaccgttcccggccactactggcataatttgtaagctactctctcatacccactcccatatatatatttttaaaaccagttttatggctgtatttcttccaagagaaccaaactgttacctgtttgaagtacaaataacagtgacctcgtgtttaaaaaccaaaaatgccattttgcacagaagtttccaaatacccagttggtttgagccttgcagtgtcatacctgctctcagatttctacacgagcagggacggctcgtacatcttcaggtttccattctactaacttaactggagctgtattctcatggtatttattttgaagcttgtcaaaggaacagttgggaaaaatttcacatttttagaattttcatagtaatagttataatttacaaagaattaaaaatagtgttgtcattattttgcttttttctagatgtgcctccaaacagggttgctaattagtttctgaatcccaggaattcagaaccataccctttctaagcagacacctgtaatcgaggaattccacctagtcagttcactttaagcattttaaaaatattttctttatgctagttggtacctgtggctatagtttattttcactgctgaggaatattccatggtgggaacaaaccgtcattcatctgttttcgtatcgatggacatttggattattttgggagggtatgtatgtctattcagccttcatttttttcaggattttttgtagaagataatgtggtgatataacatccgctgctacggaggcaacatgagccctcattacagccacacaaactgtcacgccttgttaccaatacacagaaccattttcttcagttgaaacacagcagaacctgaagtcatctgaatgggtcctccgattattacacttggaattcactttatattaatatgcttcctaattagcagaaatatcaattatacagaaatgtgagaatgtctaattatacgtttataacagaaaaaaacctcttgttgaataccccagaacacatggctatgaatgtgtctccctcatgccctaccactgttttcttcgcttgaaatgtgaaatgacacttgaatatggttttctggcgacttagactcgcatcgttcttcagagacaagatgtaaagcacatggagactttctgctgtttgtggaatgtgatttcctggtcgcctcattcaggccgccgctgtcttcccctctggctgcctgcactgtgggacgtctgaggagaggtccctgtttcatcctgtggaagttctgaaaaggaaggagaggagggtgtggggtgtggtacctttgtgttggtcccttgagcttttatttggagtctcggttaccttggtggttcctgccttcatgtccctagctggtggcttcgtccttgtgtctaactcaccggcaggcagatgaaaagggaagttgtatttagccaacagcttgatcttattctcaaggctcaaatcgactgggtatttgtaaacttctgtgcaaattggcatttttggtttttaaacatgatgttttatttgtacttcaaatgggtaactggttctcttggaaaaaatatagccatataactggtttttaacaaaataggggagtgggtgtgagagagtggcttagaaattacaccagtaatggcagggcatggtggctcacacctgtaatcccggcactttgagaggccgaggcaggtggatcacctgaggtcaggagtttgagaccagcctggccaacatggtgaaaccctgtctctactgaaaatatgaatattagccaggcgtggtggcgggcacctgtaatcccagctactcgggaggctgaggcaggagaaacacttgtaccgggaaggtgcagaggttgcagtgagccgagatcacgccactccactccaccctgggtgacagagcagagactccatctaaaaaaaacaaaacaaaaaaaaccagtaatggaaacctgactgttatctgtgatggaggtggcggcttctttcattttttagtgacaggatgaattggatgtgtgtttgcagtgttgatcttgacaagggaaatggtcagaaccaatgtgccacccagcttgggccttgccaccggcagaagaacctggtgggggacagactggaggctcggagaccgaggggggaattctcacgccatgaagctggtgcagtcactgctcctggactcctgctggagggaggcggccccttcacctcgcaggctctggtgcggtggagaccttaggacgacctgcctaggtcatcagaatggtggctgtaagatatttgagtttcaatagcgtttctgggttccttctatttttaatctgctttctagcactaggtaagtgaagatatgtaaagtaaaaacccgtctaacttgtagagatatagtgttgtgtaggagcagactatggcctctggctctgtttaaagattgtagtaaactctcatctggcatggtcagggtgcaaattatcttgttgaatcgaaatgtgaatgagtcaaagctggcacctgcatcgttgatgaaacacctgattttaaaggaacatgtcgatatgccgtaagataccagcaagttcctcactgaggttcggcgtgggttcgcaggaactgggccttgtgtcaccagggtcacctctgggagaagatgctcagtgtgggcgttagtcatttagcctttccagagccaaggaacagcttgctgtggtttttttagaagctgtattttgagtcagtttgtcccacttgactcgaaggtgctgtgctatttcagacctttgccttgcaccatgtactcattttcttgtcccctgataactaccttggttgcccctggcctgacattcgagcctcgtcgttcatggacgcagaggctcagtggtggggctcaggccgtgactccggttttcacagttccgtgcctctcactgtggtttatcacgtcactcccgggacctcccgtttagaggaagagtgtccatttcccacaggccctgtgtgatgtggaaaccactcctacctttctcctgtttgaactatactgtgaaaggtatttctcttctagtcaaccgtcagaatcttgatacggtgatttatgtaacttatcacacgcttctcagcagttcttatgaatttcattctgttgtgaaattattgcagttttaatggctacattggtctcatgttgtggcccttggtaactaccttgaaatgaattgccttcccccttgtgtgttaaggtttcacctgggagcctttgaggcctcacctctgcatagggcagtgcctctactctcctgacaagaggaagaatctcattagagtatttctagtgtggtttttgcttccagacagaattacttttttcacaaagagacatccactgaagtcgtaaattatgctcaggagggacacacgggttagctgacagagtggagtccagaagacccaaagatgcaaaagcaggtcagtggaatttgagtcttttcaacaaatggtgctggaattatcggacagccatatgcaaaagagtgaaaacaaggagaaattcctgtatgaaaattaaggtggaccataaccctgaatgtaaaatgccaaactagaaaacctgtagaagaaatggaaatcgtcgagaccttgggtcttgacctagggttagagctcttagccatgataaccaatgatccatagggaagaaaacaaggagacaagacttcatcaaaattaaacttttaatataaaagacacccctagggaattgaagagacacattttctgcagacagggagaagatgtctacaaatcatgcagctggcaaaggacttgtgtccagaatgcatacaggactcccaaagctcatgactgagagaacaaaccacctgacttaaaagcgggcagagacctgaacaggtgctccatcgagaaggacggggagggtggcctgaaagcatctgaaatgaccttcagtgcgactggtttcagcgagatgtgcattgcagctgcggtgaatttttttacacccctgctggagcggctgatggaaggtcttcagcaccaggtggtggtgaggacagaggcagccgggactcctgtgtgatgctgcggttcagcatggtgcagacggctcagcagtttcttacaaaactgaactcacacaaacgtggggcccggtgaccccactcctgggtatttaccccagagaaacagaagctgatgttcaagaaaaactgtgtccagatgttgaacatgggggctcttgtcagtggctggggtgagagtaccagcctggcaggctggggtagcctgtggggcagttcaggcaccaccctccccgcctgcgggacggcagctggaggagctcgaaggctgcctgcctcacgactgtcagcacagcagcccctcttggccctggagcaagctttgggtccacgagcctctgcgcttggacttgcctcctgggacctctgccgggacctctgttactgtcctgatagggccctggtgtcactttcccggcagggacccaagccgcaggcagctgcgacctcagattcggttgaactttccctgacctctcattccagcatgagtgctcacctcacccagtgcggagcctcaggttcccttgagacccccggagatggaatctcccaatttaacaagacagttgatgacaagatttgagcagcactgatttgactcagcttccagagtttaagttcccaggacacagtcctggtccttccctgccctcctgtggctggtgtggatgtggggtttccggagggtcagggctgaagcagtggctggtgtggatgtggggtttccgcagggtcagggctgaggcagtggctggtgtggatgtggggtttccgcagggtcagggctgaggcagtgcctggtgtggatgtggggtttccgcagggtcagggctgaggcagtggctggtgtggatgtggggtttcaggagggtgagggctgaggcagtgcctggtgtggatgtggggtttccgcagggtcagggctgaggcagtggctggtgtggatgtggggtttccgcagggtcagggctgaggcagtgcctggtgtggatgtggggtttccgcagggtcagggctgaggcagtggctggtgtggatgtggggtttcaggagggtgagggctgaggcagtgcctggtgtggatgtggggtttccgcagggtcagggctgaggcagtggctggtgtggatgtggggtttcaggagggtgagggctgaggcagcgcctggtgtggatgtggggtttccgcagggtcagggctgaggcagtggctggtgtggatgtggggtttcaggagggtcagggctgaggcagtgcctggtgtggatgtggggtttccgcagggtcagggctgaggcagtggctggtgtggatgtggggtttcaggagggtcagggctgaggcagtgcctggtgtggatgtggggtttcaggagggtcagggctgaagcgacttgttattgatcaatgtcttgaggatagctgggattaatgacctttataggactgtaggtttggggtatttttatttcattttattaaatgacctggatttcacatggggtgacctatggcagtgtggcctcccacgtgcccagcaatccgtgtgctgacgctgttcctgtgtgtgatcccgtcatcccacgaggtggccacggttatcaccgcgttttactgacgcggaacttggagagcagagggtttaggaaactcctgaagtcatggtatcagcgggaccctgggtggtccagccttagaccctgcactgtttgcccctcgccacgctgtcagcagggacccgggtagtctggccttagaccctgcactgtttgcccctcgccacactgtcagcagggacccgggtggtccggccttagaccctgcactgtttgcccctcgccacgctatcagcagggatccgggtggtccggccttagaccctgcactgtttgcccctcgccacgctgtcagcagggacccaggtggtccggccttagaccctgcactgtttgcacctcgccatgctgtcagtggggacccgggtagtctggccttagacactgcactgtttgcccctccccatgctgtcagtggggacccacgtggtctggccttagaactcatgctggtcgcccctccccaccttgttgtggggttttccccacaaaatgtggggggcagcatttgatagcttgtgaaacaagaccaaggcttaccatgagtggataagccattatctatctgagatccagaacgttccctggacctggccttgcagatgtcacctaaagggaggtaaaaacattttcattgtggtcattggggctcttgagatggtgtttttcccagtgaaagtttcctcacaaaaatctgttaactcaatactatgtgaacaggaagagatgtgttgggctctagttaaatgtctcagagccacagaagtaaatgagggcaccttccgagcacagcctcccggaggaggccgagaaagtttgcctggagggtttaccatgaagcgggacttagggctggtctgcctggggtggcctctggcgtgacgtaggttagtgaagtagtgaggggtggtggcgtgaggttggtggtccctgaggaagcccctagcaaggccgcttgtggtggggtggaaaactgctgttcagtggctgtaatcctggtttcatgtgtccgatatgcattcctgcacttggatcccagccaggtcagatggccctgaaaggacattcaggctgtgatggctgcgtccattctcagcatctgcagggccttcccatgtgtgtttccattttctttcagaggctcagcacaatttaattctctctcccagagaagttgtgagaaatagaaggaaacgtggaatgaagacgtggttgagggaagtgtggtgtggtcttggaccttactttgccttggttggtgctcaggaactccacctgcccttagagttgagccgtttctgcccaggagtcctgcctttaatcctgtgtctccttgaggcccgttgagacactgcaagaagcgtcattaccaaattgccttttccttttacagcagttggatatatttgctgcaaaacaaaggaataaccccccttaaccctctaatatggtgattaaatgcatttaagtatagataaaattcagtcttgaatggcctggtgttttaatcatctttgggtcatgtaactagtgttgttggtgattaaaatctgacagctttgttctgccacaatcctcagttttgaatgatgatcttcctggttgtaccttgcagcggcgtttgtggcagtagagagcagagtggtggttcccagaggctgggaaaggacagaggtgaggcccctgcaggacgccggtgttcctggtttaggggatttgggctcagccaccttcctgtgtccatgtaaattatacccaggatcatttcactcgccccgcttcagttgagtgttggagcttcaggatgtgtgtgcccacatcacctgggccgtgatcctggagccaggtgagacggatttcccggttttatagaattactctgggattattaaaagcgcttgaggcattcaaatgcgatttactgaatgtaatactatgtggaatactcagggctgtgtgtgtttgggaacacccgtcttctgagcgaattcagtagggaatggagagaggcctcctgtcagcttggtcctctgtttccagcttgtgagggcgatgcccgctggtgtcccagggagagaaaaacagggtggcgtgggatggggaacgcttgctctgacgaagtcagtgggaaagtgtctacacaaacgtcggtgttctccgggctcatagaggtcaagcttgttttgtgttgagggaaaagtacccttgttccttaccatttgaatggtgtccaaggctctttctgctggagaggtgatgcccgtgagtgggggccaggtcgtgggccctgagattgagaggtgatgtgcgtgagtgggggccaggttgcgggccccgagattatctgagaggtgatgcgcgtgagtgggggtcaggtcgcgggccccgagattgagaggtgatgcgcgtgagtgggggtcaggtcgcgggccctgagattgagaggtgatgcgcatgagtgggggtcaggttgtgggccccgagattatctgagaggtgatgcgcgtgagtgggggtcaggtcgcgggccccgagattatctgagaggtgatacgcgtgagtgggggccaggttgtgggccccgagattatctgagaggtgatgcgcgtgagtgggggtcaggtcgcgggccccgagattgagaggtgatgcgcgtgagtgggggtcaggttgcgggccccgagattgagaggtgatgcgcgtgagtgggggtcaggtcgcgggccccgagattgagaggtgatgcgcgtgagtgggggtcaggtcgcgggccccgagactagagaggtggtgcccgtgagtgggggccaggtcgcgggccccgagattatctgagaggtgatgcgcgtgagtgggggccaggttgcgggccccgagattgagaggtgatgcgcgtgagtgggggtcaggttgtgggccccgagattgagaggtgatgcgcgtgagtgggtgtcaggtcgtgggctccgagatttggaatctgtcaactgatttcctaaaaacacagatgcttggtaaagatgttcctgattagctaaaacatttcaacaggacatgatggctggtggttgtttaaagagtatcacaattttcctgttactttttaaatgcctgttgaataggggagtattggtgtatatttttcttttcctgtctgcatagttgatgttttgtttttagttatgtgggggtgcagttagcaggatttagaagtagtctcagccctggggagacttcagggcagcctcagagtcagtgctgaagggatgcagggatttgggggccacctcctccataggacagacaccaagggacagaggtcagtgaggtcacaaagacggacccacccagcaccctggcccccgcgcctctctctttcacatttgtggctgctcaaagctgctctccttctgcgtcattacaggcgatctctaggcacgtgcttggttcttggagaagtggcgtctggctgtggtcagtgtgggccctcaggtcttccatgtttttggctcacatcagtattgggcagtggtgtgtttttgttttggagcgatcgggtggatttcggctttgataactcatttaatacctgtttctgcatcgggtgttctttattttattacaaggaggatgaccgtggcagaactgcttccggctgttgagcgctggctgagagctgcttggcgtgcacagatcggtttcagcacagtctcgggagcagccccgggcagtgcagaaagcgaggcccaggtgaggctgtgggacacaagagggccctgacctgtgtgctttcagcctctgagccgcccctctcctgactgcttacaaagttatatcgatactgaaatctgaacattgaaagttcactaggagaatgccatttccagggatgttactgtgaaccttccgtaaaggaccttatgtaggataatgaattgccttttaatgcaggtaccaaacaggctccctgggataattcattccatataaactttttaaaaaaatgttcccaactagctatcctataattctctttctgctaagagaggtgctccgttctcctttgcgctttagtgatatgccgtgtttgctttgcatgccccttggcttttcagaagaaaactgcgtttgcagatgcacttggagtacaacgttctttttcctatgagtgtatttatggtgaaggctccattggaggagatatgctcatgcatttctctgtgtgttgtgggggataaaagtagtcactgattcttgcaaacctagaagatgcccaaaaggtaatacatgtgaaaatatgtggcaactgccataaatcgccatgtattatgtgtggcaaagtgctgtgtgttttgtttatggagaaaattagtcttccccattttcccaagaggtaacacttgaatatacatcagaaattttatttgaaaatggtaccttccttctattgttttgagactatatcataggaacttaggtatataattttctcaattagaacctccaggttttgtcatagcccctttgtgtcattacagtgtctgattccactatatttaaaccaggaagaggccggccacgtggccacgctggtgcttcccaagcacagggtctcacaagggcgtgaacacttggtttggagacacgcttttcttcctgatagaaacgctatcacaccattctctagtcttctgcggtgtttcctccacctaaacgcatccagtttctgttggtttttagtttatttatattttctgagacagggtcttgctctgtcacccaggctggcatgcagtggtgtgatcccagctcactgcagcctggacctccctggctcaggcgatcctcccacctcagtcccccaagtagctgggacctcaggcgcgcaccagcatgcctggctaactttcttttctttgttgcagggatggggtcttgttatgttgccccggtgtgactctgttttatgttaagtgtacggtgggtttttacggagaacctctgtatttgggttgggtgcatggcatcctggtcagggagctgccctcaggcttcctttctgcccagcagggtcacgagtggtgtctccacctgggctggtgtgggtgctggccggtagggcttagccctgggctgcagactggtgccagtccacggtctgttaggaaccgggtttttgtagcagggggtgggtggccggtgagtgagcatgactgcctgagctccgcctcctcttggatcagtggcagcattagattctcatagacactggaatcctattgtaaactgtgttctcatagacgttggaaccctattgtaaactgtgcgtgagggatctcggaggtgctccttatgaggatccaatgcctgacctgaggtggaacggtttcattccaaaaccaccccccagaaaaattgtcgtccacgtaaacccatcgctggtgccaaaaaggctggggacagctggcctaacatgtgctaagatgtcagtagatttttggactcggacctcagttggagaggattagattttgaaaggtgggggattgaaggcttctcaaggacaagttttcatctccagtagggcctgggcagaaccgggtagaactgacccagaacctgacaaccagccagccccggctcactgcctgcatcctgtgtgtgcagccttgctgtttgattctctcgtggtggtgggttccatccatggcctcagagggtaatggaacccattacttcaaggctgaccttatttaactttaccaaaaatacattaaaatcatttagtataaatcttccagatacttgtatcttttctttttctagaggcttttaagtattgcaacttaaaaatcttcaaatataactttaaaaaaaacctctaagtacatttttgattagcacctttgacagcttaacatgttaagtaaattcccttgacttttgtattcctagaaactcatatttgcagaagactgcctgtattttgtcaacagtggccactgtttgaccatcatacttgccatctctcatttagaaagttgggtgtggatgtattaactttttagacatacaaacacatgggctgtttttgttgttttttccccagctgaattcaagaaagggaaacaagtagactagagtaagtatcagaaagcgtctaagtggccaggtgggggatgtccactttgtggtggggaatcctactttggtgttggattgcattctgccagacatcgctcctagaaaagctgaccctgaagggcttggtgttgccctcaccctgggacattggtctctctcaccagaaaatgaataatctgccagaatactgtgagtcaaattgtcagaactcgattaaataagaggctttgtctcaaacgccaaaacatgaggacacacttctaattttttaaggagtgcttcatcgtgagtcagtcctgacgtgtactatgttaggaaacctctgaactccacagtcaagccagagctctgacagaaagtggttgcgcccttctcactgtgtttttgtcactagctttattcatgaaaattatttccttaaaaccctctttgtatgacttctattacagtttggaaaaaaaaattatgtggaactggaagcctttctgcagcgttaatattcatggcctgttctgggtctcggtatatgtgtactatacaaatgtgtacttgtatgtggtgtatgcgtactatgtattgccattgtacatgtatttacaatgtataggtatgtacactacatgtgtcctacatgtgtgcatgctatgggcatgcatgtacatgtgtacatatgtgcataactatgggcactattatatccacactatttggacatgtatctgtactgcatatgtgtacatacatgcatgtatttaacgccatatatgtacctgtgtacatacaccatatgggtatttgcacatttgtgtacttatatatatacatgtgtgcacactgtaagcatgcatgtacactacgcacactgaataaacttgtggatatgtgcacactaatgtacgcatgctgcatatgtacatacactatgtactgcatatgtacatactttacacatgtatatgttagtgtactgacatatatacattatatatatgtgcatatgtatacactacgcatgtgtaggcatgctgtagtgcactgtacatcggatatgtgtacactatatgcatgtatatagatgttatacctatgtacatacaaatgtgcatgtgtatgctatatgcatgtacatacaggttatagtatacctgtgtacactggatagagatgcgtgtacatgctattcatgtacatacatgttatagtgtacctgtatatgtacattggctatggctgtgctttattcatgtacatacatgttatagtgtacctatatgtacattgtatgcatatagattgtgtgctagatgcatgtacatgtgttatagtgtacatatgcatgtacactgtacagatgtgtgtacatgctatgcatgtacacattatagtgtacctatgtacatatgctatatggatatggatgtgtatgctctgcatgtacatacattatagtgtacctatgtatgctgtattgatatggatgtgtgtacactatgtgtacatacatgttatactgcacttacgtacatacactatggatctggatgtttgctctatgcatgtacatgttacagtgcacatgtttgtacactatttggatgtgtatgctctatgcatgtacgcatgtgttatagtgtacctatgtatgtacactttatggatctggatgtgtgtatgctctctgcatgtacacacatagtgcacttatgtttgtacactggatctgtatgtgtgtacgctctatgcatgtacacatgtgttatagtgtacctatgtacatacgctatatggatctggatgtgtgtacactgtacacacatagtgaacttgtttgtacactacatttgggtgtgtgtacactatgcatgtacacacgtattatagtgtacctatgtgtgtacactacatgaatctggatgtgtgtatgctgtatgcatgtacacatgttagtgtacctatgtacgtacactaaatggatctggatgtgtgtatgctctatgcatgtacatgttatagtgcacttaggtttgtacactgtatctgggtgtatgctctacgcatgtacacatgttagtgtacctatgtacctacactacatggatctgcatgtgtgtatgctctatgcacatacacatgttgtgcacttatgtttgtacactgggtctggatgtatgtacgctctaccacatacacgttatagtgtacctacatatgtacactacatggatctggatgtgtgaatgctctatgcacgtacacatgttacagtgtgcctatgtgcacacactgtggatctggatgtgtgtatgctctatgcacgtacatgtgtgttagtgtacctatgtacgtacactatatggatctggatgtgtgtgctctctatgcatgcacacatgttatagtgcacttatgcttgtacactatatgtagttggatgtgtgtacactatgcatgtacacatgttacactgtacctatgtacatatagtatgtggatctagatgtgtgtgtgctctatggcaacaggaatagggcccctgcagggatcccggaacacaccatctcgttagcaccggagagtataggatgaaaacagttgttcattacaagctagtgaaatttggcaggttagtagatgctttgcaatgatttaggaaccaatcacttccttgatgtgtgtgttcctgacatcataaacagctctgtgaggtgtgtttcatccccagatgagagaaacgaaacaacagggacttggtgatttcagtgaggtagaactaatatagcagctgtctagctttccatatcacaactttgtcagccctcagctcaataaatgagaagtcgccactcatcaggaaacgtgttcattttctactgttctttattcgtggagtatttactgccttgtgttcttcatgatgtagcaaaatccctcctagtgttgtgaatataaacagttcatgacaaatgcagtatcttctttgttaacgttgaaaatgatatgtaagttcatcttcaggtactgtttggaaggatgagaaagaagatatttaggataaaagaagaatagagagctttcgagtaaacagggaaaataaggactttgtgcaaaacatttccaaatgtggaatttgagaataatctcaaatctaagattgtagttatttggatttttaaaattagtacttagttttccacacctttgggaatttcacccttgatggaggattgcaagaataatctgatttttcagaacagaaggacagtctgtctcaaaggtaaattccaggttctaccatggagaaatagaaattgctcccaactttccaaaaggttcttaagttctttcttcttttgtggttaaaaaaaaaaaaacacaaaaaaacaaaagaaacaaaacaaaacatctctgggtttagtctcagccaagttcctcttactaggttgccttacatttctcccaggtgttcagagtcttcatcattactagttatttagcttgttaaaagcaaaaccttgtattagttagatctgagcaccttgaaggcagggctttgttttatactttaaataagcagcaggctgatggcagggctggggcccttcatcccatcatgcgttcctctgagcattcagagttctcactgcgtgctgagtgtggtgttggctcttgaaggtttaaataggaatacgaggctctgcgactcgcgaagctcttaccaccttcatagagagcttggtgacggcttagcatgagaaagtacacacaacaggtgtgcaaactgttacggccacatagaaagggtactgacttaaacgtgactaatttctcatgcttatttttgcctttatttctagttacagtaccgatacttcttcttcctctaaatttttgctaatcgctagtgaattagtgataaactgtatttacatgttctctaaatccagtgacttaactggaggtcattcttcttgtaccatgtgtcagtgctatgtcaggatggctcagttttaccttgtcaaaggattaattgcagtaggatgcagccatactggaacttactcatttatggaatatctgcgctttattttttgttgttagtcacacttgaggtgtgttcaaatgtaaacatgctgagcagtgttagaaagatatacaagattgtaacgaagtaagaaaaaactggatcaactaccagctaatgaattttatattttaagtaaatggaatgtggaccttggcaattagttttcatcttgccctcttatttttttttttattagacagaatcttgctctgtcacccaggctggaagggtggagcacaacagtacgatcttggttcactacaacctcctccacctcccaggttcaagagattcttatgcttcagcttcccaagtagctggggttacaggcgcgtgccaccatgcctggctaattttttatttttagtcgagatggggttttgccatgttggccaggctggtctccaactcctgatctcaagtgatcacccacctcaccttcctaaagtgctgggattataggtctgagccaccatccctggcctgatcttctgttttaatattggttattcagtctcaatgatagcacctggttgtattaaattggagtagaaagcacaattgaaatgaatgtggttgtgtatgtacatgctaatttagcgctcatggcagcactgtgaggtgggcattgtttctgaaggaatgccggatgggcaagtcagggcttagatacgggacttgtgggcagttactgctgtcccatggctgagaccaggcctgtctgactcctgtaccctgaacgcttcttaacattgcctttcaacacacgtatgagtaattgtcaagagtcagtgagtgctcgagtgtgatgtggtctgtggcgtttgcctcgcagtgttgctttggcttgggataactgggcgacagctcccttccttctgcagctgcctgggagtcccaggagaaccccactgataccatttataaatgctggacatgtgacattctgcttggtgccagcacatctggaatccgacagcgtagttagattcttggtcagcaaacccgtacaggagcgtgtgaactctgcatttgcttctcccggacaaaggtgagttcctggtcactgtgctggatggcaacaggtgtggcctcaggagcaggacagagactggcacccacgtgcaggagtagcatctgcaaggaggtgggggatgtgacagacacaaaaccactgaaatcctgaaagtgcgagctcagctgttaccatggaggagaggcgcaggtaagaccagattgtttctcattgttgcacgtttctgaaaatgaccctaaattgactcttctttggctccttgcgcttcctagttgggtgggaggaaactgtgcccctggctctggccctgcttgcggcgagatggaggctgctgtagcttgccctgccctccctatgacttcctctgtgctgttctcctccaggaacagttctgctgagcaagcttggactctgctcccttctgctcttggatgtcatgtctggaaggcttgtgttcttttctgggttttgatgatgctgagctatgtttttgcaaggatcacacgtgcccatagcagggagaagcccctttgcgacttcaacatcttgacactctcagcagagctcgctgtcgaagttgagagacttttgcgtttgttttggcagaagctgagtttcagtcctaggacggcctcagcacacttgatcccagctcctttctctcactgctcccctcgtgtatggcagaaatcatatgccctgaagtttaccagtcccttcatttgaaaacttcagttaatgtatatgatcctcaaatgagaattttactttttataaaagcaatcacaaagactggattttgcgataccagtgttttatgtgtagattaattgtactcacaataaactttgtcttctaagtattaataattccatgtttcagattagcatggaatcatgccctggagtagttttgcttttccgctgtttttggcgaaggtaaagttgagaacgttgtgatattagctgtagtgagcctttagttccttctgtctattttccttgaagccaagaccagcagactgattgataccagtttgtgagcgcctggcatctcctaggcctttcgtgggtcttccctctgctgtctcgtgggcagagcagtcactcgtggaaggtgaacctgagaatctgtggaattacataaacttcatagctctcttctgtgacaaaccgaatcacattaaacccagtaaattgtaacagcaggctttgcacatacaaagcattgaacaccagaacaggaaaccgcgttgcgatgcttctggtcctgcacaagacctctagtatcatagcacattgaagatagtggcagcattgagtgtttggaaatattatgtaccatggccttgattttcgagggcctggataaacacctctgtggttatggcaaactttatcaatgggagctgaaggttagtgctggggcagattgtgtttcaaagaatcagggtctcttgagtatgtttcggttttcccatgaagaagaaagatgttacctgttctttcctggactgtggctatcagggtgccccaccacgatcactaatacatgtaccctgtttccatttagctgggcttgggccagagtccttccgttgtcacacgtcatatgaggctgtctgctgaggaattgtcttctgcttcatcgttagcatgttgaaatattgctttccaaagcatattctactttatcatttgtatttatgtaaaataatggaatggttattctaaccgtgcagtttcctatccttggttatttaattgcggaaagataacagtgggttttattttgctaaaatctgctaggaattgtgcaaaatctttgtgaaatgcccaatttcctagcttaagttatagatgtttgtatataagagaaaaagcctattgctaaaagcagcaatgtctttatcgatgcaaaaagctttaaacttactggccgtgtagtcagtaaaatgcatcagaacgtggcaaaaattgagaaaagcattgaagttttaaaatctgctatgcagttttcttcaactcccttgcaagatacttaatttgagtagaagacagaataaagtgttcccgttgaggaaagtgacagggaggaccgttcagaacgtgtttggaatctgagcagtcctgtcacgctctagtctgtgatgtggtggtgtgtccatggtaccactttatagaacttgaagaatgctgcttctgtgaataaaatacattttattcttggcatttcatttgtgagttttgagatgtgtaaaacgtgttaatggtttctttctcttacacaattacttgttctttttttttaagtacctacaagactctgaagcacataatcacttaaaaagaaaagaggaaaaaaaaagccggcgtgatggctcatgcctgtaatcccagcactttgggaggccgaggcgggcggattgcttgagcctgggagcttgagaccagcctgggcaacctggtgaaaccccatctctactgagaacacaaaaattagctgggtgtgagggttgcacacctgtagtcccagctactctagaggctgaagtaagagaatcgcttgagcctgggaggcggagcttgcagtgagtggagatggcgcccctgccgtcaagccttgttgacagagggcgaccctgtccgaaaaacagcaacgataataacatgtgggtgaactgcccggctgcgctctgtgtaaactagagtagaataaatccagttatgtttgtcttttattagcattgaaattttcttaatcatccctgttttttcattacattgtagcaatatattgctgcttagagtctggaacaagtaggcttctcttgatcatcaggttgttactggattgctaaaacttggcatgattttcccttccttggatgtgagttatagaactttgccttttgaggtgacatgctgcattatgacagcagacacaggaactcccaaataattcacttacatgctaaaatgtacgtgctttgtagcatttccctccgagaatgaaaatggtacctctcattcgtgggtggatgatgctatttgctgaaaacatgtttatttactgcctcagtccgcagttgggtagccctgtcctttgtaggatattcagggagcggggacatcttgagtcttgaaagtctctctctgcgagatggcaatcttccggctgcctgtttagcgagtcccgccggctgtcatttactggagagtgcagtttcctggctgccctggtctttgaggggagggagactgaggggtcattttctcacctgcaccaacgtgtttattaaagctggcttgtggatcatttggaggaaaacccgcatctgtgactttcagatgaatggaagtcattttaaaaaacttttttttgtctattatggagaagttttgtccttgtgatctgtgaatacagtcactggagagcagaatgttgaccgtgtgagtgcttacagtgtacatacaaagtcacatcttcacaagtattacattaaaaagtgacaaataatagaaaactatttttctcattacaacctcggtaagaagctggcagtactcttttgtttttggaggggtgtgatgggaatattgagagagtgtcatcaacattagactcacccactctgcaaatcctgtgctggctggaatggggaccccgtgatggaaagatgcaaccctctgcctggacggagttgaatttttgtggcgctcaggatgcacagttaactgcaatataaaggcagagtgtgaaacgctgtggaggctgagagaagagatgtggttagcaagtatgagtgagatgtttggggcgtgttagcaaagcttgctgcacacatgccaggtgctgtctgcacacgtgtgatccttagaacactggcgtgtggagccatgaggctgtcgagggccccagctcccggcaggctgagggagtctcctgttaccactaggataaccgtgatcgaaggctgtcactcaatcccgagaagggtctcctttcagagaggaaaacacccctagagcctcgggcagaattcagtgattttttattataatgttgcttagatttcgcaaacatgaaaccaagaacatatttcggaatgcttatggttcttttgtaaccatggatacaaaataattcgcagttgatggacagtttttggaagctgaactgcttacattatgagcacggtgctctccctactgccctgggccttgctctggtttgctggggaagctttgcagggcctcttggctgggatacctctcccatgtcccatgttgctacccctggtcacagccatactgctgggcaccagcgccgtgaggacactgagtggacacggagcccacggggcagcagctggtcatgaggtggcatccagatggtccaaaacacgtttctgttcattaagaataatcattgcaataaaaacagagtgaaagaaaaccctctactgacctgactgagaatgtgtcagctgagttggatggggaagtgcagtgaggaaggtgagggctgaaaggagatgagggagggagaggaaaggaaagaagggaagtgaaagggggagggagaatgggagtgaaggaggggggatgcaggaggagaggaagagagagggcagtgggcaggagcctgggaaatgagccccggagccggttcccgaccctcgcgggtgcgtcacagctgattttccaggagaggcggcctggcagggctgacccttaggaagtgtgatggccggggggagctgattggccctcagtggggctgttgctgacctgagatgtggtcgacgttatcccgaagaggtcgtccgcacagccactgtttgctgtcaggttggagagagaagtgcttctccctgtgggttctttctgttttgtggatttttcccggtttagctgagcggcctgtcattggaaatgtcagggattcctcacatgtctccattctacagagcagtcggccagcttcagatcctgtaattgtgggggcaccactctcgtgtcgttaggccagtgccggtccagcgtggaagccgcagcccagggcgctgggaagcctgcggggctcttgctgccggggctccggtgggagtcgtgcgctggaagaataacgtctgttgagcagagcctggcgaggagggggatgctgctgttgcagcagtacatggaatttcaaatgatgaatgaaacacgcttttaattattaccagagctccatgctctgcgtttcttcaaatggaaatgttgtgctgaaatgaatttgctgttaatcggttgcctcatgcaaggtagtgtgctgggagcaaagtaggttgtggacttatctacaaagcttcctcctctcaacagactttaatcagttggatggtgctacacaggaatacgtgagaatttgtgtgagaaaggcgataggtgcagacctgtgtgactggcaggtcgggtggtaggggaggtttgagagaagcttttggctgaagtagtgttgggtgcaggtactgaagtgtgatgtctggctggatggaagagcgcaggcctctgggctgcgggaaactggtaaaggaggaggtggagagatgtgggtcatgtcttaggaatggtagcaattcatgcagacccaggatcagtctcccacaggggaggagtggacgtcaggacctagggagtgtggggttgggggtcatgcccaggcctttgtggggcttgctcctgtgtcagcagggccctgtgcttggcctctttaaaactgtttcctgatccataaaatgggcacgacaaaatccaccttgtgacactgtgaagtttaaatgagatgatctacatagtgtcttccttcccttcctgacacgtcatagactcacagctatggtggcaatgacaggctggatggaatgctggagctgctttgtgcctgatgaagccacatggatttgtgcagtgctatgactatctctgaaagcctttggtcgtggcagtggcagccttgagtggctcttggcatacttcagtctgtggagtgcaaggttggctggagctctgaggccattgatactatccaggggtgagctgataggaccctaaaacatgggggaaggctgagaggacttggctgccagaagcactgtagatttctggcttccagaacttgctgacttatggacataggaaggtaaacccagatggcttcaaaattttaagtcaggaggaaaggtgtgcgagggtagaattgctgactaggtcatggttgccatgtccttgtggccatcctctctcctccctacccctgcctttgtgggtaggagggcctgagcctgcacagccgtctatttcatggtgacgatggctgattattaccctgcagtaagaagtctctccattttattttgcagcagtagttaaataaatttaaggagtgatggtgtagtggtatttgttttgtttttgcttttttttaaaaaagaatataaaacaaatgagtatcatttaaccgaatgttattcccaatttcactgatcactttaagaggccacacatgctttggtttgttattttgcgtttgagtttgagctagttcattttctcacgggaatgccaattcgttattctgttgtcacacatcattatgtatctcaaattgtattactataatacttagctgaattgcctcccttgttttggcttttacaaaactcaaatctgtgttaaacacaggatggtgcatctccattgagggttgttcaaaagtgtgacttttcctggcatgcttgagaatcaatgacattattttatagaaacactttgtagctgacagcaaagctagaagcttctgtaaagggcagggtaggcaatgtgttatgccttgtgggccacggaagtctctgcatattctttttcttttgttaaaactttgaagtgtaaaaatcacttctggttccctggccaaggctcggggattgtggtttgcagacccttgaccgcaccttacctgaaagctgatctcccatgcagtgagcaggagcccacttcattggttcagccaggaagccgctgccctcatgctggaatttacttcaaacaaactttgaaagctctggcacagctgttcatttcctccttgttgcaggccatctaaaatacggagcgtgccttggcatttttgattttgttactcttgaacggctctgagatggctcattgcaggtagacatttgcagaaacgatcaggcagagccacagccatcttgcagatcaagtgaaggtttttttttttttttttttttttttttttttttgagacggagtttccctctgtcgcccaggctggagcgcagtggcgcgatctcgactcactgcaagctccgcctcccgggttcacgccattctcctgcctcagcctcccgagtagctgggactacaggcgcgtgccaccatgcctggctaatttttgtatttttagtagagacggggtttcaccgtgtcagccaggatggtctcgatctcctgacctcatgatccgcccgtctcggcctcccaaagtgctgggattacaggcgtgagccaccgcgcccggcctcaagtgaagttttttccgaaagcttgttacaggcttaaatttctgatccctttccttctactgatcttggatgattcgtttctttttgctctcatttgggtctatgaaacttgttgaacagcgtctcaccccacggtagaactctagctctgatttcacgcatgagtcggtatcttcactcctcatttgcaaggagaaagcactgcaggtcctgtgtggcttccatcccctccctgcacggggattgatgtgagaggtgtttgaggtgtgtgaactcgctacccctggagcctcctggttcagtccctgggccgcactcctcccttttgggggcttggtggtttctgctgtgcttgtgccaacacaacaaggctgagtggagctccagggctgtgacagctcacgcagctgtggcattagtgcagagaactgcggggatgcagctgcccttgctgtgatgcttcgagtgttgtagtcggtgtgggaagctcggtgggacgtggatgtcctgggatgggatgggagcctcccctcagcctctatcaaacacttctcggccaggcgcgattgctcacacctataatcccagtgctttggggagctggggtgggtggatcaccggaggtcaggagttcgagaccagcttggccaaaatggtgagaccctgtctcaactaaaaatcagcagggtgaggtggtgtacacctatagtcccagctactctggaggctgaggcaggaggatcccttgatcctgggaggcggaggctgcagtgagcagagatcacaccactgcattccagcctggacaacagcgagactgtcacagaaaaacaaaaccaaacttttctatgtcatgctgactggtgctcacggcttgtaagcagaggagagaatgtttgtttggcagaaatattcagatgatttaggaagtcttttctgattaagagaatcaacagcccagttaattatctgctaactttcagttgtgttgtggctgggagcaggggtggctgttaaaacagatgcctgtctttgggaggctgaggtgggtggatcacgaggtcaggagttcgagaccagcctgaccaacatggtaaaaccccatctctactaagaataaaaaaattagctgggtgtggtggcatgcacctgttgtaatcccagctattcaggaggctgaagcaggagaattgcttgaatctgggaggtagaggttgcagtgagctgagattgcaccactgcactctggtctgggcgacagagtgatattgtgtcttaaaaaaaacaaaacaaaacaaaaaaccccccaaaaccggtgcctgtcctccttccgccggagttggatttgatttggcagctctgagatgggccctggatacgtgtaattccagattctcagatgatgctgatctgggttttgtgcaaccaagttgagtcttaacgtttagcttctttccaattacaaagaattatttttccctttctgaataggtcagttcatctcaaagagatttgagccaccggaacatcagttctgagatggctccctcagcatttgatggtgtatggaatgggatttctctcatccaagccttggttcagaggcagtacgtgctgtggatgagatgtctctgtggcacgctagctgtgcatcacagcagccatagacgctgctccgcatggtgcctgtgagccaggctgtctgtccgatgggcctgactttgagcagtcgtgggccacggctgtaccctgcttgggaccctcagaggcaccgttgttgtctttgagaacaccgcctccatggcgagagacccaagaaatcttggccaggggttgctatgaagaaagcctgggcttctgtgtgctggggctcatgggccctcgcctctggagagggcaggaaaaggtgctgacacctgtctcctcagcagcagcatctgtgttgctatctgaacgtgtaagtgtcaaagtctaactgaactgtaaaaatatcagtgtgcggtgtgtctgtgctgtttgtggtgtgctactcgagaggaaaggcaactgtaacactccagggtttggtggcgcctctggtgggtcagcggctcatgcaccaggtgaaccggcagcagcaacactgcttctgaggaaggcctggtgcggttaccccgcgagggtcacgtgaaaaagtatgttggtaagattcctggccaggcttttaataaatggtaactacgattacagtttaaaaaggggcaaaaaattgtttcttcagacactcttaatggtaactacgattacagtttaaaaaggggcaaaaaattgtttcttcagacactctaaaatgtaaactactaaagtcctaaaataaggcattgattttagaagtttctattcttagagcatgtcccagtgttgagatacgtggtttttttgttttgttttttctggtgagtttggaatccgcccctctctgtcagggttctgacagtgtctgaatgccggcctttgcaggagtccaaggtgctgcctccagcaggagagtgggtgacgtggatctgaaacagcaaatcaaagccgggagcccacatggccctgcctgcttcccaacgtgtgaagtgctggtcagtggtttccttccacccttggactcagttattaggctgttacatacctcggagaagggcgccagcctgagagggtaactcctgctttagtctccttgctgcgctcgactccgttacgcgactgtaagcacatatttttatgcttgggttttgggcaactgcaggagtttgaaatttaagtgcatttgatgatatacctttaaaaatgaagcttacatgtagcaaacgggaaacacaccattttacatccttattcctttagcatgtgtgaattccatggttttaaattctaggtgaagttgggttagtagtctgtggaaaatgcctctcttacgattggaaaaactgattgttcatcatatgccttgtttaaaaagagctaagatggaaaaagggatcttctgggctgactgtagttgctgacagtttcactgcatgtgagatgtgtggttttgaaagtttgactctgcattatggggttgtgtgtgtttgtctaggtctttttttttttttttttagaatgcaggtactgtttcatatttttaggagtcacatggtttcctcagctgaatttaaacttgtggaagggcggtactcttaaggttcttaaatgctgtgtatgtacaaatgccagcatgatgctttgtacagagaggacattcacgcttagtctattgatggaatggacgtgttctcttgcctgtgctcactcgaggccctgatactgactaggggtggtccaggctccatggaaagcttcctaaccaattaggggagtgatggaaccgccctctcctacagcacctggtttgccattgaatagaggaagggaaattgctggtagcaaaggggaccagaaaagtgtttactcttcatcttcaccaggtttccagtagatgttaaactcactgagttctaatgtggttttgcttggatttattgtaaaggtgattgacaaacacagagaagaaagatttctactgtgtgtgtgagtcttctaggaagtcaggttgggaacatatttgttgttttccagtttctgctcacgtgttatgtgtttttttctgagatgggaagagcactgggtggaggtggctggtgtgttcggccgagtaggctgagttctgtgcagtgcctggtgtctgctggacgctatgctgaatgcttcgggcatattggctcattgagtcctcacagaaatccgctaaggagggaacttcttttacctcatgttagagatgaggaaacagaggtcaaaaggagacaggcaaaatgccacagagtccagcggcagacctgggatcagaacacagtgctcagcttctgtgtggacacccttagctctgctgcgcttggccctcagctactggccaagatggaataacaggtactagacttgcccctgtccctggagaaaatatgtggaacaatggttcttaaggctttggacgtcaggcagtgaaggcctgtgggtgagaaggggagtgagtgaggctgccccaaggtgacgtccaggctggggtgtggggagggtgatctgtggttgaggagatggagctgtgggctggagagatcaaggagatgaggatggttatgtccaagagagccagtgacgttcacccagacgctgctgcctcaaccacgtgcgggggtggggggaacgttctcccccgagggcctgctagtgagtaatgagaggaccaccatggactcagacactttatattctcacagggtctgagaatttgctcccctaagtctttttctgttccatattttttacctgattagttatgacacatcttagcagattccacttcaggttctgtagaattagtgttttctcagctttgaaatcttctctcaaataattgatccattcagattattcacagactttaattcttcagtttcttcaaattcagcatcgattccctgaatgagcgacctcagcagtgttgggatttttgacacattaagaactaaggaaaatgactcacactcatttgccttgcttcttaattgactattggtatagcccagtagtctgaacttgttcttgactattggtatagcccagtagtctgaacttgttaagcaaccattctcaccgaaagactaataatctttaaaagtctctcttcctctggacgcatctttggctgctgtaatcaaatgcaatgtaatcagcactggttaatggctttccttgctttgctaacaaatgctcctcagaaactttggtttctttttcattttcattgttgtgaaattctgctataattatattttaagccttctgatttttctagctttcctgcgagttggaaatactgtgatgggtgcttagtttgggatgttgacgtacactgtatgcctagctactatgccattgcatgaatactgatttgtcactttctcatgaagactcatttcacctagtttggtaaattctactaattttaaggaagggggtggaatacaactgctgttaggaggttttttaaaggatcggggaaatattgccattattattaccaccattacggaaggaacataaaaatacgtgctgctttcagtcattatgaatatgtaagtctgcatctgtgactgcagaaaatggcagccccaagccttaaaatcgtatggatgcaccaagcccgcctgcagggcactgtggaacagtctgcattagtcgaagttggcccactagccctgagggggatggtgtctgatttatgataaggccctgacttcagattacaggcctccagatactgtgatattctaaacaaagacacaatactgcccagagagcacttgtaggcagtgtaggtgagaaaagccttcaaggaagattactgctgctcagctaggaggattctgcaaggcagtagactttataaggttgcacacgtcaatgttcacagaagagtatttagctatattcattccttttaagcagccaggcttgtgtgtatttttaggggcactcacatggcagctcttccactgtcactgctggttgtgcactgttgtttgatgttatggatttctgtgttgagtgtgtcctctccaaatgtatctgtctctagaatattttagagtagaccatttattggttaaatatatgaaaagctctctgagggaacagaacacttgttttcagtgaggaagaaatctttaaaactggccatgcagaccctgttataaatgtttagcaatggaatgtttaatgtttaacacgtaatgtttaaagtagaaattttaatttagaaatcctgttggaatgccaacttaaattacgaccatccgtgtgcatatggaaaagaatgagagtgaatgtacagaattggaatttcgtctatttcgtagagattctgtaatgtatcaggtacaagtctcacttcatgattcaaatgaaggagactgaaattataaaaactgacaaaaacatgcctttgaatagtgagccattatcctccttgaaatagtgattcattcactagaaggtccacctgtaactttgtcaaacacatttgttgcattagtgctcaagtgagctcaattttccagacagggaaattattgctgcttaaagtttgtcctgatgatgttggtgaacagggaaaatcctttgacgtggatcctctgtgtgtgttaaacatcagatgcggcctgcccaaccctctgcctgtaactgggaaccttaactgtcaggatcattgtggagaaccttgagaaggcaaaacaaaaagcctttggagtagcaaaagatgtagctgatttcatgcagtaaagcttacacatttttctttaaaatgcatccttcggaacgtccgcttgctgattattttagaatcactatagtctggtgacagcagttgtaggaacaggtgcacggcccggctggtgcaggagggtctcagcggagccgcactgctgacaccgaaggtggggctagagctgtcacgcgtgactcgtgcagatggccttggctgacctccagaagaggaattgtcagtatctaaggaggaaaaagtgtattaatttcatgagtatttgccttcacaatggcgaaaacactgagttttgtggcacctgctctctctggaatgaggagtcttcccttcctggcagacaagctctagacgggaccaggagttgtgttgctggattgaagaggtttccttcctggggaggtggccttcaagcctgacttgaaggaagctgtgactggcgggaaagggccttggagacagtgcgttaccaggagggtcagtggctgagaaccatcctgttccgactgttcccattgtggttttagaggagtaaacttggggagaagcaacagccaaaagccttgaggaacattctgtgatgttgatcacgtttggttgcgttgttgctgagactctcaaatgagaggccctggaggtgcaggtctctcaggccttgggacatgggagagctgctgcttcaggggttggagtccccatgccagtggctctcagtctgcagagacttctcgtacagtgggcaattgctgcctccaatccattgtgagtcccctttaacctgccccaaaataaatacacatgaaaggtaccatgtcagcaaagagaatcaaactctgtaaggtatttaaagagatttattgtgagccaaatgagttaccatggcccacgatacagccctcaggagatactaagaacctattcccaaggtggtcagagcacagcctggttttgtaccttttagggagacatgagacatcaatcaaataaatgtaagatgtacattggtttgatctggaaacgcggggacaactggaagcaggggtgtccaggtcataggtagattcaaaaatttcctgattgacagttggttgagagagttgtacgattaaggggttgtgtggagaccaaggctttgtcatgtggagggatgcctccaggtagctttgaagagaatagattgtgaatgtttcccgtcaggctaagagtctaagttctgtctaattccagaagggaggcggggtgataaggcaagtcccaccccccaccgatcatggcctggactagtttttcaggttagctttggaatgcccttgccaagagtaggggctgttgagatggccaggggggcctagaattttaatgcttttacaaccagaaagtgattacgttgtttctgtggatgatagcccgtgtggtaattaatattttattagcagattaatttgaaagtcaatgtgttttcaagtatgttaattattaagttatcagcaaacagaaagcttactttgaaaccagcctgagaatcaagaggcctatcaaaacaatggacttgggagaactgattcacgtgttcactgccgcgagtttcaggcattatgagaagtctgtgtgctgatacattaagtgactcgagaacttaaatcctgatggactcctacttaacagtgacacttttttctttttttttttaaatggttgtgtttagcttgtctcttgtgttgtgcagcttttgtcttccagccgctgagcactttagctttgtgttcacatggcctcattctccgaacctcccctctttgtgactcctccatcctgtccaccttgatcgcgtgtcttctccacccctgtgggttttatcccgaggactgctctctgctgtgcgtggagggatgatcagtggacactggctttattgactcattttacacctagctcccagtttctaaaatcatgattgtcttggtttccctgtgaaactgggagtcaggccttgggcgcagtgctgggtgtctgtgacagggcaggagggagaggtgagaaccggagggggtggggagagaggtgagaactggatcggggggagaggagaacaggagtgggggggagaggtgagaaccggagcaatgagttcatcaaggggaaggaacacctccctgaattcctgtgtctgttttaggttaaagacgaatggccaggtgggtggatgtctcacccggtgtggctggaccgtgctgtgctgaaccctgagcaggggccccagcagtggcctcctgccaggccggggccatggggctccggggctgggcttcctcctctggggtgggttgtgagggcttgtgcatggtgcaagagtctgcacagctgctgtgtgaccctgaggggcatgtgggtagctggtctgtactccttacctggaagaacctgagctcatctgggccagagcctttggggaggtaggaaggcagagacctggaattcctgctttctccagacaccaagaaagcccagtgttgcatctgctctgaggtgctgtcagcagccatatatagttgttgattttaacatgagggaaggtgccgattaacccaggtctgtggggagctttgaggagtccaggccctgggcttttaaatatgttccttcctcaacaaaaacaacaaaagacccctgtggctgatgccgactgtgtgtggggtaggacacaccgagcttgtgtggggcttcccccggcgttcccccggcgttccccaccgcccccatggacaccagctgttccaggccgaggcttgtcctggttagaccctcgtcgtggggtctgtggtcccggatcgagggcccaagcacttctctcattattaaagtgattcacctgagatgtacagctgcctccaaagggtctcatgagcatatgagatacagccagtgctgctgccccaagctcataattctagtggaaaggagaaattttacttttaatgtgcttgtgtgactcagatgcaaatattcaactcccgttaaacttgcaagaccttgaaaacctctgagattccttggaaaccactccttggccccacgacctaactcacctgtggagggggtggggtggtctgccgggggaggggttgggctgtcggtgggggaggggtcgggtggtccgtggtgtctggggtcctgctgtgttctccaagtctccttctatttcatcattagccccagctcttcagtgggagagcagattcactgacattgccattattttgttcctgtgttgcctctgttaacttaaaataatcaatatttaccagaaataattgatggcgagatgggaattattggtgattccctgacataggcggcctgtatagataagcatgttacagtgtctgatttccgagatgttggtccacaccttctcagaaacacactttcaggcttagattcctgtgcaggagaagctgcctttccccgagacgcgatggtgggcccccgcactggcatggcagggtggttgtgtgactgggctgggctggacgtgctcctgtccccctgcgctgggcgcccgcctccaccccccgtatctacatcgagggtgcctgcctttgttcccccagctcgtggtgatacaactgcaccttcctttacgcatttctgaatagagatgattaggtctgggggtcgaatctcaatccgtgagatgcatccaggtaaattattcacacacatgactcgagtcctcccatcctggttcagggtcaggaagcgggaggtgggtttggagacagctgtgtggcctcaggaaggttctctcagaacctgtttctttctctagcaaagtaaggattcctacctcactgggcttgacgcatgctcagtactcagatgctgtctagtctttatcatagttagtatttggggaacagcgtggctggtaagacaatgcgttatctttccaatttatagaatgtcatatgaggcaagcgtgaaaccaggacactaccctaatctgaagatgctgttgcttactcttcttaagcattttattataattctgtcatgtgtccgccctgtcatgtgacggcaccctgtgaggttgccagggagcatccctcctgcctccagccctccagggtttcgccctctggggtttcccccttccccgcccccttccccgcctgcccctgccccctccccctgcctgcctgcctgcccctgccccctcccccttcctgcctgcctgcctgccttcctgccccctccccctgcctgcctgcctgcccctgcccccgccccctccccgcccatcctccccctcccccttcccacccatcctctcccccttcccctcccctgccctgcccatcccctcccccgcccccacccccacccccacccccacccccacatgtgtatgtgcctgtgcactcaccaccctgtattgggtcatatgttgcattttacagattgttgtttttcacttggtattgtgagcttgtaacgactttgtgaagaaaagggggtcctggcagcctttggctttgagaaacgtgatgtcgtgggaacagatgagacagcccaggtgaggccagcagaggccatcatggcctgggagcctgtctgcatccactgtctgttgctgtgtgacaagtgactccaaaacctagtggcttaaggcaacacacacgtatgactgtacagcttctacaggttgcaaatttagggcagctctgctgagtggttctggccctgtccccctgagtcacggtgaagattctgtccagggctgtggctatctgtaggttcagctgggctggaggttctgctccaggatgctgtgctgacgtgtctgctggcggaggcctggtcctccacaccggtccctctgtggggctgccaggcacatccctgcccagggctgctcctttctgcagagacataggagtgctggtcttacgcccagtgtcaaggtggccggtctcctggccgtgtcccgtgggccacactgaccagctttgagctctgcaggagggagcacacagccgtgtgggaccatcgagggctggctcctgggccatctgagaagccctggctgttgtcttaaagctgaggaaaatggcagaatctggctgtgagctggagagagagaggagagagtgcatgtaggtttgatgggctgtgaaggtcaggacagggctacgaaggactcaggtgcacagatcccttccagggtcggggctcacagcatgttcctctctgtgactcaaggcacacacttgtttagggtggttttctgtctttcgcttgatgcatcaagaaaaaacgttgttttcaatgtggtaggtgttgggggtgagtctggggctgttgattccagcagaatatcctgaaatggaagtgtggacaggatgcagggccaggccccagtgggcagggtggcaacattgtggagggaaaggggtttgtttcatgtgtctatagcagatggtgacacgttggagtgactgggtctgtgagggaggagctgtgttcagtctaaggctgttgagtttgctgaggaacctccaaaatgtcctggtagagtcaggtggccgctgccagggcgtgtggatccccctcttgggaaggtgtgggtggctgcgtgatgacactctgaggtccgagtgtcagagatggtggtgtgcgcagcggggcccaggacaagcctgggatccggctgtgggaggggtgggtgggtgccgtcctgggatccggctgtgggagggggtgggtgggtgccgtcctgggatccggctgtgggaggggtgggtgccgtcctgggatccggctgtgggaggggtgggtgggtgccgtcctgggatccggctgtgggaggggtgggtgggtgctgtcctgggatccggctgtgggaggggtgggtgccgtcctcggatccggctgtggaagggggtgggtggttgctgtccggggatccggctatggaagggggggtgggtgggtgctgtcctgggatccgattgtgggagaggtgggtgctgtgagggagtctgctgcgactggactgtaacaggatttccttgagaatttgaggtgtgttgggggcagggtcaggagcaaaggcttgtttcccctactcagcggctgctgctgcagggccgggcaacagtggaggtcatgcaggaagggtgttcgctgaagaccgtgttctgtgacttgaagatgggtgttcctcccgtgggggtggaacggagactggacgccgtgtggcttgagagtggcatcctgcgtgaccttgcgtgtagtgggcttacagcagagctagtccttcctctatagattcttttcatagtttgcctgcctttagattctctgattaacgcatctgaggtgggtcccaggagtctgccacctgccaggccaggaggttcccctcacgtggctggtccccagataccctgagagacacggctcaacaggatcacctgagtttcctaaatatgagtcacctgccttctcttctgtttgctttcatgcctcccccagggtgggccagtcctgtcagccacagagatacccgcatgctggggttccaaggagattgggggtgtgcctggtcacccagggagattcggcgactgaggatgctctgtcatagtagccagcgtgtccttactctttcaccgttaatgaagttcggttattaggttttccgacgcacgatgttgtccttatgaaaaattggtgatgaaggaagcaaacgtgtgggaaaatgatcctgcccttaaaactgaaaaacaataaaacagcaaagagcccagaagagcccgtgaacctcctcatggggcagtgaggagagacctcagtaatggcttgggaaaaaaaaaaaataatactgaagaaaacataaactaaattttgggtctcatatgggtaaagagattgtggtttacattttataggcatgcatttttacacttatttttctttgttggaattagaattagttgtgataaacatgattttttttaaatgaaaaaattacttggggtcagtatatgaagtctaatccctttgtgatatttctgtactgtgagactccatatacaaaagtgaagcccagactctgtctctgacgaaccagagagaagtggtcatctcctgcaggccagtctggcctccaagtgtctgtctatcctctgtctcgggcacacctgcatcactggtgcttcctgccaggctgtgactctgtgcccaggtttcaggagcacctggaagttttcctgatgccttttgatgaaggactcactccccactgccaggcaactcggtgattgctccccaggctgtatttctcacatggggtgcagaatctgtgcgcggtgtcctggccctggagccagttctaggactccacggcagccttgcctctgcccctcatctgggaacagggcagtggggaggagaagggaaccggggtcttgccccttctgtgtctcaagaacacgggaacacatggtcccacttcctcgcaccattcacagcccaaggttttgtgaagtatttaagttattttataacttataaccacccttgacagtgatgtattttatataagcagcacatagaaagtggtaatttaataccttatcaagcaagatctaaacaataaggatcagatatcactgtagaaaaggttactttctccaggaaacatttatccactgcagatggaaatgaatcactgcttcctccttggctgcttctgatgagcctgtgaaattctgtcctgttcaccactcttacagttacaagcatatactttttctcctatgatgtatatttcctgcctgttcgccactgttagttacaagctataccttttctcctgtgatgtatatttcttgcttgttcaccactcttagttacaagctgtaccttttctcctaagatgtatatttcctgcctgttcgccactgttagttacaagctataccttttctcctatgatgtatatttcttgcctgttcgccactcttacagttacaagctgtacgttttttcctatgaggtatatttcttgcctgttcgccactcttacagttacaagcgtatacgttttttctatgaggtatcatttcttgcctgttcaccactgttacagttacaagcgtataccttttttctatgaggtatatttcttgcctgttcactgttagttacaagcgtatacgttttttcctatgaggtatatttcttgcctgttcgccactcttacagttacaagcggtataccttttctcctatgaggtatatttcttgcctgtttgccgctgttacagttacaagctataccttttctcctatgatgtatatttcttgcttgttcgccactcttaaagttacaagctatataccttttcttctatgatgtatgtttcttgaaggcatggactaaatcctaattccacagtattcaatgcacatactcaagagatacttgtttgaatgattgggttaatggaaaatagaagtggtgacttaactttcagttcattatgccaaacttcaagtgtttacacgcaaaattttatggtcctttggataaactgggcttctgtgcagggtggttagagattgtgggagtgcagcaaatggctctgtggctctaggctcacgaagggcttgagggacttagtggcggcacctgtgttgaaaactcaattctgcaaatccttcttgagtgaccaggcgccacacacgcagccctgcttcccagctgatttctgcagaggctttttctgaatgccccaggtgaacatgaattcagccagcactgctgggcttgcacagcaagccaggtgcagggacgagggagaagaggggcaggacccagctcttcctgggccccagtgcccatgtggggatgctgcctggcctggctcttcttagggaggtcaggaaaacagtggcatggagggtctgttggcacgagcctcttggtgaaacatggatcccaggtctgtgtgggaggcaaaatagaaatttatgtggatatcctcagtaaaataggaaatactggcttcttccctagggtggctgatcccctccctcatctgctgagcaaaggctcggccttctgggcctccacaatgagcttttcccaagctctgtccactccgtggagatggcgggagccagggcagacatggggtgttcgtcacttttttttgagatggagtcttgctctggcgcccaggctggagtgcagtgacatgattttggctcagtgcaagctccgcctccccggttcacactgttctcctgcctcagcctcccgagtagctggaattacaggtgccaccaccacacctggctaattttttgtatttttactagagacggggtttcaccgtgttagccaggatggtctagatctcctgacctcgtgatccgcccgcctcggcctcccaaagtgctgggattacaggcgtgaaccactgcacccggccaggtgtttgtcactttttgaaagctacatttgaggaatgaaatagactgaacagaattacttatttttgaatatttaatacttagtctatgagaacacttaaatatagttaatgtattcgaataataaggaagaaatttccctctctgtttccaaagcaaaagtataaacaaccttttacttggcagggacttcactctgtttctaaaaagccagcaagcaccgttcctgaaatagaccgatctgttcctctgcatagaccctattaacattttagctacatctctgctgtatcttgatatgatagattatagaaaatgtcttgctactggaacttcacgatgctttccttttaaacatcaggtagaaagtatggatagtaaatctcagattagttgccattcttggtcttggtagagctgccatcgacagcctccgtcagttacaacagagtgtgtctctccagcaacccagcttagattgcagactgagtctggctcacccaggattcagtgcaacgtcttccgaagctgtagccaccactctcagaagagacttgagaagccctccctttgatgcctgcatgtggctgttctcagatcacaacagctatagcagcgtctcagaggatgctggcaggggtgtcctgggtgtgacaccacggcaggggcctgcagcatctgaacgaaatgggccgtgacattgagcggcctaggggagtccacagccgcatttcaaaggtgcagtggcccgaggttgaaccccagagcctggctctgaggagcctggagttgacctgtcacaactccattgagagagctggctgaattctgtacctgtgtgggcaagatggctgtgtttgctcttggacccttcccaagccagggctagggagattgtctgcacagctagtgggagcttgactgttcacactcggggctgagtccctcacctttctctgagcccagggaagatggacatgctgctgtgacacagccagcctggcaggagggaaggcacttgtgggtttgtgcaccgaggcctccttcctcttgagccaggaagggcttttgggatcctgcttccagctgctttcccttgctaggttattggcctcgggggccaggagaagccgagtgcagacctgcagcctggaccccttccacagcctccgtggcacctgtggtaagcgggacgtggcctttggaactccaagccctaccctggcatgcctgccccttggggtgtctcaggcacctgctgtatgccaggctccatggcggggtgggcggcagccagggctgtggggaggagggggcatggtacgtggacgatgttgagaagcatcagggaggcgcttgaggcagtgtcagcagagccgagacctgcaaggaggggactggctgtgggtgttggagctcagaggctgcctctaccagagccacagtgtctagtgagggcagagggaggaccgaggcccggggaagccgtgtgcatggtttgcatcaggtatgtaccagagccacagtgtccagtgagggcagagggggaaatcgaggcccggggaagccgtgtgcacagttcgcatcaggtatgtaccagagccacagtgtccagtgagggcagaggggagaccgaggcccggggaagccatgtgcacggttcgcatcgggtgtgcaggcctgactggctgtgctgaccttctcagtcccggccaggcctggggtcccagagggaatggagcatccctcttcttgcttccctgttgcttcctggtcaagggatgcttgtttattgcaactctggcaattattctgaatattaagaggagtttcacaaaatcgtagggggagaggggctagggattcatttttttttctccacctgattttacaggaggcttctgccatcccttagtgtgaaggcagagtgcagacgctctgcggttatttgtccaggaggagaagagcttctgggaggtcacagatctgattgttgtaatagcactgacatttttaaatgggagaatgttgatatctatagtaaacagagtaaaacttcagtagcttcaatataaagatgccgagatgatcttagagccactttgtccatagatccttctgcggtgtggaactgcagcgtctctctaccagcctctgtggtcagtggccacctgtgggtaattgaatgcttgaagtgcaaatgagaaactgatacttctaattttatttaattttagacaaatttaaatagctacatgggccgggcactgtggctcatacctgtattcccagcagtttgggaggtcaaggcgggtggatcacgtgaggtcaggagttcgagaccagcctggccaacatggtgaaatcctgtctctactaaaagtacaaaaattagctgggcatggtgacaggcacctgtaatcccagctactcaggatgccaaggcaggagaattacttgaacccgagaggcagagattgcagcaagctgagattgtgatactgcactccagcctgggcgacagagggagactgtcttaagagaaaaaaaaaaaaaaaaaagctacacgtcccttgttgcttctgtaggacaccgcatggttccagaaggtagaccttgtgttggggactctgcattgtcaggctggagacacagtctcccttcctagcagtgtgggcccctgggctgcccttctaccagaagggatggtggtgtctctagaggtatctgtggactcagatctatgtgaattagtgactagtgttactcacagatacttaattttatgggtaaataaatacctggacttgctgcgagctttcagggcaagaatcgggagtagggagtgaaaagtgacgagggcacccatggcttgtcccgctgcctccagcacctggtcggggggggccctccgctctgaagcccccggcacctggtcgggggcacccctcccctctgaagccaccagaccctcctggcctgtggtgctgcttctccaaatgccgcccttggctgtttcccaggagtcactggcgcccaagcaggctgtatgggtcacttctgcgtggttttggggtgttggtgaagctcattggtctcgtcttccttctcatgtgccacatctcacctgttggcttgtggatgggcccgagtccgtgtgtggacgcgttgtatcttctcaggctgtacttggtgcttaggtgacaaggacgtcttagagcaatggactgtctgctccaaagggtgctgtgtgttaattgagacatagcttacttgtggggtttaaatttcctgggtgttggaggcaattggggaaaaaaggtctaaaaaggcccctggggatgagggaagcaataatgaaaaagtaactttatcgcacttagcagttgattgaatttgaacgtgaattttgcattttggggactcttaaagctactatttgtagggattccttgatgagctgcttgttttctgtcaagtagaaagtaaagtggatcggttttgcctttaattctgactaactagaatctacttggctttttcccccattcacgttagggtgggggattggactagaagagctgtaggatctttatttctgatcttaaatgaattttttctttactcactttttttttttttttttttttttttttgtgagctgctattttttcctgcaatgcactgttctttggtttgggaaatgtgctatatttgtaccgtgctttaaacatacacaatggttctaaataactacttttctttaaagttagatgtaacatcttaattaaaatgtcatccataaatcaggcacagtctgtgaggttgtgcgagcgtgaaagctccacagtctgaggcctggagacccctcttgtcgcttccctccagccatgtctcctcccccggccacatcacctctggccacatctcctccccccaccacaccatgtcacccccataacccttgccacgtcacctctggccacatcacctccctcccggccacatcacctctgtcctcgctgcctgcctgcctgcctgcctgcctccctccctccctcctggccacatcacctctggcctcactgcctgcctgcctgcctccctccctccctccctccctccatcccggtggcctccgcggctcctgctgactgccctcccgaggggctgttcgatgctcttttcccgtcttctgctcctgagtgggtctcggggctggatgtttcacaggatgcaagtttcttcccttccagccgtaggtctctgggcgacaactccagagagggcaccaagctctccttacccacctgggggccctgagccctgaccaccagggctttcctgtgggggggggggtggggcagactcgtgtgaattggactgaaaaggtgcttccaggaatccttgttttaggtgcactggggcagaggtggggacaggggaccaccacaccacctggtttgctcagaatttggtcctgatcacagccaatgaggcaacacaagcacctcctaaatgaagcattgcagactgcttttacatgtgacagttgtgatggctgaaaaaggcttcacacaatgagtgggtttgagctgcatttgaaggcagaacaggtccctgcaggtggaaatgagagataagggtgacccaagccatcagcagctgcgggtggggtggtgtgggctccccagggatggtgggcatggatgaaatgcaggagagggcaggggtgcgatggaacagcagggcagcgttaaaatccccctgcagagaggggacgtgactgagattttatcacatgtataaactgagagatgatttgaggatgatttctgggagcctgtgggaaaagcacgtggtcatcatcagttctctggatctctgaaaagtcatgcctctgcctatcttgtgagctattgtgaagatcaaatcggataatcttcagcaagccttgtaaatgctaaagctcatgacagagactgttccagcccctttttctccaccctcccttcctcctggataatgtgaaccctgctgggtacctcactgtctgcctgctttcctcctctgtaacatgaggcctgagtatttgctgggtacttcgctgtcaaccttccttccttctcagtgatgtgagccctgagtatttgctgggtacctcactgcctgcctcacagctggctgtggccctgttacacacacttggctggcacataagcagaagtgctcgctgggcctgggagggctttctgatgtgtgggtgcatgcttctccctgtaggctggagctgcaggagccctcctggatcagaggaccaaggctgtggcctcgcgatgggggctgggggagctccctgggtttattgtgtgggtgagagcaaacttcagtcccgctgcagcaccgggattccgggttccctctggaatgttctgaatgagaaacaggaagtatgcagaggtgcgtcttccgaggatttgatggttatcttagctcagaggcaccaagtgctctcccatgaacctgcagaaccgcttcttccactaatggccttctttatctaaagaatgacttacaaactctgccacttaagagataggtatttgcaggtgtggcctgaaaaatgaacaaattgattctttcatctcaaggaaaataccttacgttattcccaatgatagccattggagctttccagtgaatattaaaatatacaaatcttgtgtctgccactttctcatgtgatcagtggtgatattgatgtgatttttttttttgacataatgaaatgtggaagctgctcataactctgaaccagtgttttctaaccagttacaaaatcgtgtgctggtaaaagagccactcaagtgcaggacagaccagtccgcttaaaaggaattggggcagaaaggcccgtcgaccagggtccagactctgcgttgcagacagcctgcatggaagtgccgcttgtgacatttggcagcagagaatacctaaaactatgtgaaagcacagtgaaaaatacttcttcctaactgtatatagcatgggatcagacatttttcataaacttcaaccagagttctgcagcccactgaacgcagatggaggcatgagaaccctgctgtccgaggtgcagagaggcgttaggtgttctcacagcagcacaaactgttgccacactgctgcttattttggaaaatggttttttctttaagactgtgctgtttattaacatgtaatgactttattattttaaaataaatttgttactttttttttttttttttaagagtcttgctctgtcacccaggctggagtgtagtggcgtgacctcggctcacttcaacctctgcttcccgggttcaagtgattctcctgcctcagcctcccaggtagctgggactacaggcacccaccaccaagcccggataatttttattattttagtagagatggggtttcaccatgttggtcaggccggtctggaactcctgacttcaagtgacccatctgccttggcctcccaaagtgctgggtgggattacaggcataagcccaccatgcccggcctcatgagaaagctttttgtgatctttaataaactgtaaagggttcctgagacccaaaagtttgaaaaccaccggcttaaaccgacaacaaattgtccatgattcttcagtgtaccttctaatctgttgatggagaaaggttgtaaggggttgctttacttttttcctttcgcaacttagtggtgctgggacaactggatatccacatggaaaaggatggactgcaccctccctcaccctacacaaaaaaatagctcaaaatggatccagtgtaagagtcgatactgtgagacccattttgtcagtctgctgggtaccgtaacagacaccgcagactgtgaggcttaaacagcatcttatttcctttgttctggaggctggaagcctggggtcaaggtgcaggcagggttcgatcctccgggtcctcaccccattctgtgtagacggcgtcttctctgtgtcctcatgggtttctcttatgtgtgtgcagcactgaggactctgtgtgtctaaattctctattataagaacaccagtcatggctgggcgtggtggctcacacctgtaatcccagcattttgggaggccgaggtgggtggatcacctgaggtcaggagttacagatcagcagtgaaacctcatctctactaaaactacaaaaattacctgggcgttgtggcaggtgcctgtagtcccagctgcccaggaggctgaggcaggagaattgcttgaacctgggaggcggaggttgcagtgagctgaggtcatgccactacactccagcctggacagagagagtgaaactcaaaaaaaaaaaaaaaaaaaaaaagggaaaacaccagtcatgttggatcagggcctactcttaagatcttatgggacctaaattgtcacgttaaaggccctgtgacattttgagtttctaggggttgtggctttaacatgggaatcttgcggggacacagttcagctcattacacccttaggggagaatccaggtgaaactgttacgttgaattaagcaatggttccttagatgagatgtctaaagcataacaagcaactgaaggggaaaagacagtatcaaaattaaaaatgttcatttcagaggttactattaaagtaaaaagacacaacccacagaacaagacacattatcccaataagggcctgatatcaagaatatctttaaaaacttactcagcaatgaaaagaaaatccaatttaaaaatggacaaaggatttgaatagacattctccaaagaaagatacataaatgccttaaaaagcacatgagatatttaacagaattagtcatcttagaaatgaaaatgaaaaccaccgtgagataccacttcacaaccactgggatgggtaaaaccccagtactggacggtgacatgttggtgaagatgggaaaattggaatctgtatatattgctagtgggaggggaaggaaaatggtacagttgctttggaaaagtctggcagttcctcagaaaagttaagcataaaatcactgtacgacccagcaatttcactcccaggcatatgcccaagaaaactgaaaacgtttttacaaaaaaatcttatgcaagaatcttcatagcagcattattcgtaacagtgagtagaaacagcccagatgtctgtcaacagatgagtggataaagaaaatttgcacacaatggagtatcactcagccgtaaaaaggaacaaaagaacatgtgctccaatgagccttgaatgtgaaagatgccagcaccaaaggtcacaccaaaggtcaagcactgtgcaattccactcaccttgaacgggaaagatgccggcaccaaaggtcacaccaaaggtcacgcactgtgcgattccactcaccttgaatgtgaaagatggcagtaccaaaggtcatgctaaaggtcacgcactgtacgataccagtcaccttgaacgtgaaagatgctggcaccaaaggtcacgtcaaaggtcacgcactatgtgcccactcacgacaggcgtccagagtgggcaaatccagagaaacagaagtcggctggcgattgccaggggctggcggaaggaagcagcaggtgctgactcttaatggattcaaggtttcttttgcgggtggtgaaaaagtcccagaattaaatactagtggtgattgttgtgcagctttgagaatatgctaaaaagactgaattgtaccctttaatatgggggattttatggtttgtaaatgcttttcaatgtaaaaagaaactaaagaacttatttggtgttgatatttagaatgcgaaagagactgtatccaaaacatgttactatgtaactcatgtccccagagagttaaacttcattttctgaggatcttaaaggatgtgtttgagcctaggagacacaacgatccatactatatgttacagcctatcttactgatttctatctcacgtaacaaccgtattcagggaaaacggacatgtaaacgtgagctgaatgctctgcagaagcactttcctcttacccagatggtctttagtggtgcagtaagagatgtggtcacggcaacgtcagtttaatttccatggcaacaggaatttggcacatctgatgagttagatctccctgcacagctcctaacagggttacccatttctgtgtggtgtctgtgtacgttctcgctactgaaatcagtgatggcacctgcacagacacttgcccggaaatgcgcacaaagctggtgaaggcagaggacaggcgagtgggaagcatggttcagcccttgcaaaggagacggttattcctaacgcagaagattcaggaacacgatccttgcgaagactggtgatgtccatggatctcactgctgtccagttgtatctgtgcagcgagttaccaaagctgccagagccgcatgtgttggtatcggtgtcatcatcatcactcaatgtttctgacttttggtattggtgtcatcgtcatcactcaatgtttgacttttcctggtgctgaggatgactgcatgtggcagaagcaaagtgctgggcttagaaaagaactagaatctgatgatctgtggtatatagagaggcagggtcagaaccccccactccccaatcccgtaagaactgggatctgatgatctgtggtatagagaaggggggagggtcagaaccccccactccccaatctgataagaactgggatctggtgacctgtggtatagagagggacaaggtcagaaccccccactccccaatccgataagaactgggatctgatgacctgtggtatagagagggacagggtcagaaccccccacttcccaatctgataagaactgggatctgatgatctgtggtatagagaggggcagggttagaaccctccattccccaatccgattgttgaagaaatagttggcttgggagggtttttactctgaaggttgaagctgtgcatttctggagcctgggctgtcggccgtagtggctggggaatgctggggctgtggtcgtctggccgctggcagtcctgctggtgggtcctgcctctttgacaccgttcctttctgaagcttgttttccccagtgttggaagtagcagcactggaggaatggccttcttcctacagcaaagctctgccaggagaggaggagaagacatagagcatctgttgagggacatgacgttctgggcactgcaccatgctttctgcttctcagcagtgcctcctggttgatgttaccgtcacctggcatcgcccaggaggtaactcgcagaggcaggcagggagcagaaggagctcaggagggagtgagccgtcacagggtgggggaggttcaggagccagcaggcaagtgggatgtggcctcaaggtgttgctgggttggtgaggggtcttctgggacttttctgagagtgcagtcagttgtaggggtgggtgccggctcccgcagatagaagagccaagtgtgcaggagaccaacgtgtgcactgggagtccccaggggcgtgtcctggcacgcggcccagaggcccctgacaaggctcagtgcaccaggcacacagcggattgttggtgcttgacccgacgagaaggtgaggaagtgaggtgaggggggccgagagacaggtgcagggatgcactagacagggtgcagtcaggtggagggtcatgctgtggggtctaggagagacaggtgtggtcaggtgaagggtcacgctgtggggtccaggagagatgggtgtggtcagtgtggagggtcatgctgtgggatccaggagagatgggggtggtcaggtggagggtcactcttggggttccaggagagacgggtgtggtcgggtggagggtcacgctgtggggtccaggagagatgggtgtggtcatgtggagggtcacgctgtgggatccaggagagatgggggtgttcaggtggagggtcacactgtggggtcgaggagagatgggtgtggtcagtgtggagggtcatgctgtgggatccaggagagatatgggggtggagggtcactcgggggggtccaggagagacgggtgtggtcgggtggagggtcacgatgtggggtgcaggagagatgggtgtggtcaggtggaaggtcaagctgtggtgtctgggaaatgtgtttttgcttttggctgagcagctggacctgagcatgtctgtgctttgacatttaacctgtgcactgtcctcggcagggtgtgtgtgtctgtgacagaggacacctcagccagagtggatgtcggcggtggtggccggactcagggtccatgaatgttgcgtggtagaacgtgtttggtacattctcagctcctgcccaggtgcctcccaagcatcgggtgttgtggctccccagcatcgggtgttgtggctccccagcatcgggtgttgtggctccccagcatcgggtgttgtggctccccagcatcgggtgttgtggctccccagcatcgggtgttgtggctccccagcatcgggtgttgtggctccccacatccttccccatctgcgtgtagcacgaccaccaccttcctaccatgtgtttgtcctatcacggctgctgtgtctaatgcatgctttgctttccagctactttactataatcaaaacccttgaaagactttacctgtgtttcagagatgacagggtattagtctttcatgattgctctgaggatttccaaaagcaaatgcaccttacaggatgcaagaaatggcagacagtaattagagattacttttctcagttagtctttttattgtggtaaaattacatagcactgtgaccatttttaagtgtacgatttggtggcattaagtgcgttcacactgtcatgccacgatcaccgccatattcttggtctccccaagcttgaaacttggtctaccaaacactagctttcctcctaccccagctctggtaagcactacagattgcttatagaataggctttttcagtgagagaaggggcaaggagaagaggactcaagactgtcttgagatttgaggaagtgttttaggttttgctctctggttcccagtgtaaaggaactattgaagatgtgggaaggtggaagctctgtgtgatctcaggaagtgctgggccgggcagctttccccctgtgacgggggcacttgccctcaaacacacctgagataattgtgtgaggatggtgctgcgttgtgacagctctgaacttggtctccttgaaagtttccaagtacataagctttggcggttaccgtctagtgtctgcgggagacctagaatttgaacattgttgactttaaaacacgcacatcatttttataacactctacctgttctcataaataggaaatatgctgtgtcctttttattttgctttaatattctgtgttgcagtagcagtagttgcagtggatgctgcttctgattcatggttattgccaaacacaagtttctagaaaccatgtgaaaagtgaaggggaaagtggctttctgcaaatggcttttttgatcatcttgtttttttctggaatatctgtggtgtcaaacattttcatatttaggggtttgtaatgtgttttatactggttagcgttgaaatcccatgtttttgcatattgtaggtctgctttatcctgttattctatgatatagctgtttttgaaaactgttatttcactttaaaaaccaaagcagcttacagtatgagtgtgattcctttaagaatttaattgtaaaattgatttgtgttcaataaacttactggaatgactagttagatcagtggacaaaaagataagaacatgtcaagtctctggaccaggaacgacttccaaataatacacgtgacacacagtaatttcttaacaaaagattagatttagtacataactttttaaaacctctatattttctattatagccattccacagtgcccatgggggtgggttgcaggactgcctatggataccaaggtctgtgggcactcaggtccctggaataaaatggcatagtgtttgcatatgacatatgcacatcctcctgtagactttcagtcatgtcaagattgctcataacacctataccatgtacttgccatgtgaatagttgttaaactatattgtttaatgaataataaagtctgaatgcttagtacaaacacattaaaaaaatattcttgatctatagttggttgaatccacaggcctggaaccccaggatagagtacaaactctagaagcaaaataaatatttaagaatcgaatacagcaaagattaaaggattaatatgagcactctatgaaaggtttgcttaattgatgagaaatgccataggaattcagtaaacccacagaatgatgtgaacagacaactcgcaactgaggtcatatagcagattcacaaaacgcacggaatgacgtgaacagacaactgagctcgtagaacagattcacaaaactcatggaatgacgtgaacagacaactcgcaactgaggtcatacagcagattcacagaacacacggaatgacatgaacagacaactcacaactgaggttcatatagcagattcatgaacacagaaaaagttcttagtagtcatgtacatttaaattatgtgctgctttttgctagtgagcacatttttcaaagtcatattacccagtgcttacaatttttttgatataatttagaattgtgatagtattaataggtacagttatcttttgttaaaaagaaacgttttcaataagaaccttagaatgtttatatcccttcctgggtaatttgaggttcttagacttatttgtgaggttcttaagtttggctagagaacaacaacaaaaacccaaaacactgaaacccagaggctgacaacattgacttagatctgagagcacaggcaggccccatcatttccacgttgagaccctgaaccatccctctctcaccctagcccctgtacggtccggactggaagagtccaggattgtggcacctgtttatgatgaaaatcttcaggagactgggcacaatggctcatgcctcatgcctatagttctagggctttggaaggccaaggctgaaggataccttgaggccaggagtttgagaccaggctaggcaaccagatagcaagatcccatctctacaaaaaagaactagccgagtgtggtggtgcacacctgtagtcctagctacttgggagtgggaggtggaaggatctctgaagcccagagttttaggctggtgtgagctatcattgtgccactgcatgccagcctgggtgacagagcaagaccctgtcccaaagaaaactcctcgggaagcatttgttatccacagaggatacagagtctagaaacaaaaagcttaaaaatttaaaatacattcacagccaggcacggtggctcgtggctgttatcccagcacttttgggaggccgaggcagcagatcgcttgaggccaggagttcaagaccagattggccaacatggagaaaccctgtctctaccaaaaatacaaaaaatagccaggcatggtggcgcgtgcctgtaatccaggctgcttgggaggctgaggcaggagaatcgcctgaacttgggaggtggaggctgcagtgagccgagatcgccactgcactccagcctgcactacagagcgagactcggtctcgggggaaaaaaaaaaattcgcagacgaaagataactgctcgatatttagggagaccccaagagctttgcttattgccagagcaatgggtttgcaccacctagagttgacttaccagcctgtgtctcgtgtcttccctcatccctctcctgttgtcatgttaatgggggaaacacaagcctggctgaaacatgggtgatacccgtgtcctgggtgccctgggcacaagtgtgcgggggagggggacggggggcaggatgctgggtgccctggggacaaatgtgtggggggcagatgctggagccaggtcgtagttacttgtgttgtctgagcttccttgggcattagagggctacttgtgggaagaaaagaggcgaattgaaaggaaccggagtctgcgccagggtgatccttattagttaacgatgggtattttagaaacagttttaaataagaatcctttcagtggagagagtgcacttgctctgtttgagtcatttaccccgaaatcacagagattctggtccaggtcaggtctggggagctgtgcagggctctagatcccactgcctccttcatacggccttgcctctgtgtggtgaggttgtcacaggggccaagatcccacgccctccttcatacggccttgcctctgggtggtcaggttgtcaaactcactccaccctcacttcttcccccacagagggaatcagacttcacctgggacctgggtgagtcccttcaggctgcctgacagggtgcagtgaggagagcctggggtgagatgcaggacacagccagcctcatgactgatgcccaccttcttttgttcatcttctatgactacaaaatgggtggtggtgtcacggcagggatgataagttctgggaaaaacagaataaagaactggcgtgtgttaactttgagatactcaagtagaacacagaactggggggtcaagaagatggtttcagatgactgccttttccctttggatttcccacacactcttctgttcacgtggaagctgtttgctggaaagaaggtttaatcagttaaaaccgagtcatagcttaggcttccaaaaacagcactcactgtctttgtcttagcacctctcaggatggccccccctccacagagcactgggagtcagtcccatgaacgaattctgaatcacattcactgtctgtccggctcctggtattaaattgtgtcctcccaaacttatgtcccagtcctagcccccaggactgtggtgtccctgttgggagcaggtctttgcagatagatacaacgctggcccccctgggactgtgatgtccctatggggaacagggtctttgcagatagatacaactctagcccccgggactgtgacgtccctatggggaacagggtctttgcagatagatacaactctagcccccgggactgtgatgtccctatggggaacagggtctttgcagatagataccatgctctcaggagatatcctggatatagggtgggtcctacgtcccaatggctggtgtccttggagaggaaagggaaatttgagacacagagaaaagggctgtgtgaaggcagaggcagagatgggcgtgatgtggtttcaagctgagggacgcctgagcgcacatgctggaggaggtagcaaggatcccacttggagcctgcggtgggagctcggccctgcccacaccttgattgtggacttctggctcccagactgggagagaatcaatttatattgttgaagctgcccaatctgggacatttgttatggaaacccaggggagctgacgtaccatccatctgaaaatactctttgcacccgaagtgtgcctcaggatggaagcttacgggagcaatgggagagaaatgttgaaaatgtggcatttgcatacatataagtatgtgtatatgtttataataattattttgacctaattctcagagtacactgcaagagcaaatgtgacccaaggtgtcgtatttcctggagttaacaccaataattctttgaaccaaacctataggctccctttacatatttgacataaaagatttgagtgcaggtgtatgactgccatagcccacatacagtttttatgatcagactgtaacattgcatcttgagaaaagatggtaatataaatggacaaataaagaacttgaggtcagcagtgacgagtgtgggatcacactgaatctcgtgtgtttcgctgtgtcactgcagagtgtaaatgggaaccatttttagcttaaggtaaaataggtaacaggaaacactacagaatgggtacaaaggcatgcccctcattaccaaagattacagccaagtgtctgcctcctggggaaggatctgttctgtggggagtactagacgtggatgatttccagatgtgtgaagggaaatgccccccgagaagcgtggctttggccggagcatgtcagatgagagttagcacagcatggagtttccacagcgcccctctcgcctgctgcttgtctcctctccccacccctggccctgactcttaccaagggaggaaagttcagctccagctcagcccacgcctagggctgtgggtctctagggcaggtgccaccttctcctgaacaggctgcggtagaggagggtctggctgtacttgagatgtgagagatgctctgatccagcatcctgcaaacccgggtgctgaaggttccttctgtaccatcctgcagggagagaggggtcagttcctgcctcccctcaacccaggctgacttcttgtctgttgtgtacaccgagctcttaagagtacctattgttaaaaataatcatccaggccgggcgcggtggctcacgcctgtaatcccagcactttgggaggccgaggcgggtggatcatgaggtcaggagatcgagaccatcctggctaacaaggtgaaaccccgtctctactaaaaatacaaaaaattagccgggcgcggtggcaggcgcctgtagtcccagctactcgggaggctgaggcaggagaatggcgtgaacccgggaagcggagcttgcagtgagccgagattgcgccactgcagtccgcagtccggcctgggcgacagagcgagactccgtctcaaaaaaaaaaaaaaaataataatcatccagcagacaaacactgtaagatgacagcctgggagggtagatggggctggaaggtagtttcctgaataacagggttcagtttcctgtgttggcgtcatttgacccaaggcccccagataattgaaatattgtcaatcagcaaaacaccgatgttgtatctttttttaaaggaatgtgcgctaacttctttctaacagggacctgacaaaaagagaaggatttcttcactataagatgaaggtcggggctggttggcatttgccatctgtgactagcagggacccaggctgcttccctcctgccgcccaactcctgaccatctggctcctgcctctgtccccaccagcaggaagaggagtgggaaggcgccttttcccctttaaggggatgaagtgagagttgcacctccccgtttcgcacgtccccggggtgattctccagcatgggtgggagttgtgtttggaggcctgagccctgtgaagctagggttgctgttacctgagcagcagaagcatggactctgggaagtggggtcagggggcggcctctgctgcatccgcaggaggggctcctcgtcccagttgaccatcgtcactgcagaagggggcgtgggcttcatggtccattgataaatagaacgttcctctttttttttttttaaagcatgtcaaaccctaattccttcagcctttactaaagtggcattttataattccatgtgatttcattattatacctgcaggagagaatgcttcctgtaaaccagaagtgtctctgagacagttctcagcccatttagaaagttcattttcccacggttcaagacggcctcaggagggttgaggacacatctgtgacacggcctcaggagggttgagtaggtgcccgtcactaagcagatacgcatttatctccgtgtgcagggggtgactttgagttctgttctctgtccatgagaaatttccctgtggactagttgtgagggaggtacgtggcttttttttttttttggtaggtatctctgttaggaagagcatggggaggcaggtttgcctaagctgttccctaccttttccctttagcttagtaattttggggtcctgagatgttttcccttcacactcctgaacacactggcactctaaactgttgtaggaggccatctaacctatttagaagaataaactatttggaaggatttgagcacctttgtccttgagagaaacaagcctttgtttagtttgccccgaggctgttatggtgcccgggctgtgcggccttgagaaagctgtgtccccctgagcacctgcctgtggaatctggtggctgtgaagttaatccggcagctagatgttctggaaagcagattgcctcgtaaagtgttggtggtgatgattctaacacgggaatttcaatgtgttttccacccttctttctttctctcctcataccggagatgctgctgcatttgaccttaggcttcgtcgagggagggtcagttctgacactttcttagatactgaccttgaatggacagaattgagattcaggaaaaccctcgagctgtgagagtgtgctgggatctatgtaagtggggtttatgtgggaaactcagtaatagtttaagaaatatcaattccaggctgggcatagtggctcacacctgtaatcccagcacctaaagaccctgatgctacaaaaaattaagtaggagtggtggtgtgcacgtgcggtcccagctactcgggaggctgaggctggaggatcacccaagcctgggaggttgaggctgcagttgaaccgtgatagcacctctgtacttgtggtgcactgtgcctgagcgacagaacaaggacccccgccaccacacacccatactctctcacacacccatactctctcacacacccatactctctctcacacccatactctctctcacacccatactctctctcacacccatactctctcacacccatactctctctcacacccatactctctctcacacccatactctctctcacacccatactctctctcacacccatactctctctcacacccatactctctctcacacccatactctctctctcacccatactctctcacacccatactctctcacacacccacacaaaataccaattctaaatggacagaaacgaggtcttctcagtggaaaaacatgctgttttggttgctctaaggtagatgttgactcatttgccagcaagaaaatgcagcggccagttttgctgggaccacctgttaaggctaccctgggcctcatggtttgagaagggtctgtccaggggagagagggagtggcttaagggccttagaagccagttctggttcagcatgactgcgggggtggaggtgggggcagggctttccgggacatgagtgggtaactggatgggcttccaggatgagcccctgtgactttggtgggtttacatccatgcaatacaaatccacaggctcttactctagaagcttctgccggggctgatggactggcctggggacagagggtgctttctggtttaggagggagcactcagtcacttctaggatttatggcactaaaggggactcgtcatacttggaacagcagccatctgcattctagacttggttctgggcgaagtattttggagccggttggtaccctgtgttctctgtttatctataaaacaaagttagagttataactagttaaaacttattttaaaaattttgccacagaatatggtagttgtgctggagctggaagctgccgcgtgctggagttgcaagcgttgcctgcattggctgctcctcccagcgtgtctgtgttcttgacacgggcacccgtcgaggcagctgtttgtccgtgttcctctgaggttccacagacttcatggtcccgcggcagagcgtatgatatctgcttgcatcctgatttccccacaccccaggacaggccaagaattccttacacacaactgtagagggccctatggtgtgggtttgccggtgacaccgcctttcccgagctcggcctttacctccagagttggctttagggcgatagacgcttccgtcagactggggggccctgaacctttggtgttaggaattcggtgaacggcacgtatgatacctcgattctttgcatttgtagcaatagttgttaacaacatgaccatgagatgtacagaggaaggaaaaaggttttattttcagagtaacagtctactttgggaaatgtggtctcgggggaactgtaagcacacgcccctcaggaggggaggagaccgcggcatttaaacacacgggagtttgttcgctgtgtgtgttcatcaggttcgtggaatgtctgaacgtttacagggaaagtggggtttgttcgctgtgtgtgctcatcgggattgtggaatgtctgaatgtttacggggaaagtcacagcacacacgcagtgagttaacctgtaacatctgtgttcaccttggggcgagcgtaacatttgaaatgaggtggactcagcgcgtcacgaccaaagatgagctgttgggcgcagacgtttatgtgcagcctctgtcaacagccgagactggctcagggtctgcagcttttggcgggaaaggatgctcacgacgcccttctgtccagtcggggctgcctgcagggtcccagggtggggtgtctggtcggccggcatcgggagtctgccaaggtcccgtgggcagcgttcctctaaaccaggctgctgtctgactgtggaggagacttcatgctggttaacaaactgtacaggagttagtgccgtggggctttggggccaaccttcctccctgtgatgccgcttgcatttctctctgggcctcattgtagccacagagagtccatctcgtctgacagcagggggtgccatgttgacatagtaatttattgtattaatcaaccttttcattactatgttagtaacagtctttttttttttttttttttttaagagatagggtcttgctgtattgcccaggctaatcttgaactcctggcctcaagcaaccctcccacctcagcctcccaaagtgctgggcttacaggcttgagccactgcaccagcctacagccatgtttttaaaagtcagcagtttaaaaaccctactcctctcaccccctcaagcaggctggttggccttgtacaaactggggtgtcacgaccttggccccccttttatttttccctttctttggcctcaagttctgataagaacagcagttacaaaatgggcattaggtgattcttccattaataaagccagaattctcatcagttagagatgtttgtccccaggagtccagaaagctgttttgaatcaagcccatagcaaataaggaacaaaacccttggtcctctgcttaatatctgggaaatgtgttagttgctgacaccctttgatctgtgctcacgtgctgcatctcctcacgggaagcaaagtcgccctgtggaataaagcccggctcacggtggcatgtccgggatgctccgggctgtcagtcacttagacggcggcaggcgtggagactcggcatcgtgtgcagagctcgggcaaccggagtgcatccaccttagagaccacacagccggtcggcaaggtggacgtccaggcagatggcctgatgggcccgccacgtggtggcgaattaggaatttgttagcaaagaaatgaaacttgcctgttggtcccagcttctttgggaggctgaggcaggaggattgcttgagccagaaagtcaaggccgcgatgagccatgatcgcaatactgcactccggcctgggtgacagagtgagactccacctaaaaaaataaaagcaagctaaacctttccatagcaggaggggagaatttatcaaagtaactgcaacaaaaatcttagatgatgtaatttcagtggctaagtgagctatccagcccatgtggctggctcacaaagatgcaacggagccaggtgctgctgcagctgccctcccaccctgatcgtttgtggatgttttctgttttacggtgtttaggatctgtctcctgtcttttctgttttcccatatctcccttttggatacatagctcactactttatggctaagcaacagtaaaataggttgtctattttgagaactaacttttgtgtcttttaaggacggaaaacgaagcaggtgacaggagcatggcaacgtggtgaatagatttagttgaatatttaaatacttggcaccactctgatcccttcttcctctctcaagcttaattacagccgctgccttctaggacagagcactttcagctctgtgagtaggaattaaacattttctaaatcagaagttttagttaagcagtattttacgtgaatacccagtccataagtgctcactgtactggtgtgtggtatagaggaagaccgggtctatggtgcagtgtcccagttcccatctatgagatgggggccatgagatggcctagaagaatgttcagattgtgggattgaacggatctgccccactcctgggagcctcgagtctaactcgacttgggcaggttctagggagatgccggcagcgccgtcctcacaggtcactgggaggggttctggcaccatccccgtcaggtgtctcatgatcagctcagcttgcccatctcagaagctgctggtagtgttctcgttcctgttgtttcttgcgtgttatttaggttctgttcatgtggggacctaggaagttccacagtgagaggagagctgctgagtcgccttcctgcctggacgccagccccacggaggatggtaactgcttgaggttggcttctgcccccggcctcacctgtggaagcactgatgcagtggtactttgcaagctcctggggcacactgcaccgttgtatggatccacaggatactgtggtatccaagcacgtgctcccggaggagaggaccctacaggtgctgatgctgggagtcggcagagagtccagcgagtgagactcactgtgacgtgcacagctgccatctgcacagcgcctcctgagtccaagatggttgtgtgataagtgcacaaagcgcatctccagcaaaaagccactaagtgtccacatccgggatatccaccactatggctttttggtgttaataagatgaatgtgagtagcaagtggtctgcgttctgggggagcagcgggcggtctgcgttctgggggagcagtgggcggtctgcgttctgggggagctgcgggcggtctgcgttctgggtgggcagcgggcggtctgctttctgggggagctgtgggcggtctgcattctgggtgggcagcaggcagtctatgttctgggtgtgcgtgacggtgccactgcgtttttgtttttatgtcttggtgaaaggcatgaatggctcctgactagggtaggtaaggatgctgtgaccagggactctgcagtattgtagcttgaggaaccaaggaggttttctctctcgcaaacccttcaggggggatgttccaggctggtgactgctccatgaggtattcagggatccaggttccttccagacacctgccctacattcccaaggacacgactgtccttgctgtggttggggctgggtgattgccatgctggcgggggaggcttagggtgagagtggccatcatttacctaatctacataattacgtggagctgggagtaaagtgtagccgtggcctggaggatggacgatggatgttggtgaacaactggctgcactcaccgcagctggcccagggacgggaaggatggctgattatgccattcagcggtacctggttctttcacatttgactttcttatggattttctgttgtacagaggagagagcctgtggttctaggccaaccatctcactcatctcataacatcttgtatcccttagccaacatttatgtcaagttttagaagtcctacaaactggcaagcatttctcaatctggtgtaaccactggattttatatctgtgtctgcatctgtatttacatctctggttatttgacactctgtagtacatttgtaatcggttccatttggtggaagttactttcaacaaactcttgctgctacttgaattttcaaggttgcaagtagaaatgagggaataaacaccacatctttttgctctaattttaaaatttgttgttccccaaatcacaccataagtacaaatattaaaaattacaaaagcagcggctgaagtcaaggttaaggcatttctgggtgattttagctaatcagcaatatttgctgaggtgtgtggagcagaacaacatgccaagaagcccagaagcggggagggtcgggaggccaggccatgacttcagaggtgctgttttgtgagggagaggagctagatgcagagatgataaacagctgcagatgcacccactgccgcacttcgcacggtacggggcctttgtgagctgagttatgaaccgggtgaaggctgtgcaggcgtcggagaatccaggccagatgcgatgggtggaggctgggtagaggtgaggagccagacagcctcactgaatgtgtggtggctcactgcagacagctgtcccccaggacggctgcccttaccctgtccgcctccacctactgaggcctataggtgtcgcaagtgtgtggtttctaaacagacttggatgagttgcttgctgcctgatgcacctggacaggcggagggctggttatccatgatggcaccagggactctgccggggactggcaggacagagcctcagagcacggcaccagttccctgggagaagatggtgctggcgggacggaggaaagaagaggcacacagtgctgaggcatgaatgccagtttgctcttagacatgacacaaatgccttccggaagtttccacataggcgcagttaaagccaccagtgtggacgagtccttagatcaggagacccagaacatatgtgtatttgagatccttcacgtgctgccatctcttcaaagaggaccacaaggtcgtctctagtaatgtaaaactaacataaaagaattttttattaaatgccacggatttttttttttttttttggtggggtagggctggtgtgtgacagaaaaacagcggatacggtgacacagctggtgggtgttggttctgggccccagctgtgcagctgtatgaatagaaattagtctctacagtggtatgaacctaaacacctggattacatgttttcatgtatttaacataaataaatgcacacatttatatgctaaacacacatttttctaaattttatgtaataaaattcacaccttcaagtatttagcatagaaacagctgtgcagcatctccctgcccacagccacttggacgttcagagtggaaaccacgcggctgtgggctttgtgagtggtgagccgtgcacaggtgtgctgcatttgctgtgtctgctgatgtgagccccggtcggtcctgtttcaggtggacgctttcctttgtaattcccttctctcattctaagttcagtaaacttgggaccgatggtgagtgtaggcacagaggagcgcagcatcggcaattaaggaaaatccacgccaggcgttgcagaaggaggtggtgtgcgggggttccactgcctgtgtgagccatgactggtgagggcctctgggcagcagctcacctgggctacttggaaatgcagattcctgggcacagacctgctgggacaaaacctgagaggccctgggttgactaccctccagggattccatccaggcttggccatcatgtctcttggcaggtcactcaggcccggctgtctcattgagatgcctggccatcgcagggttagctgagtcacctgcacagctggtgtgggtgtgctgatgggtgtacggggctggcctgtcttcctttctccacctacgaagcattcaaaggcctgttatcctaccctgttctctccctgtcctcagtgggcaagcaggaggttcattttcacttgcagatgaggaaaattctgaagtcttgtaaagcagccaagatcatattcagaatcttctttgttccaatcagctcgaatttttacagttagaaagacttttcctcaaacactttgtatttgttctgtatgagaagtgccgtagactttgctgttgttttactaattagtatctgtactgtgttctgctgtccatcacaaatgtatgtattttcattctgagatacgctgagtctcagcctttgcaatccagagggatttcatgtgtgttcataaaagcttctatcagaaaccacattccgaatagctgtggacatacaacctgcttgtgacttggaaattgctgaagtcaaattctatctcggtttgaggcgttaggagctttagaaattttgaaattataaaatgaaaatgtgataaaattaagtacatttaaacaaaagagatatgctgtgggttttaagggctgtgatgcatttaagaatgcttttctgtattttagatttggttgtctttaaggatgtcatgttccatccaaactacaaatacatgagataatttaaatgtaagttgaacccttcagaatatcctggatttggtcttgatcttctgaccttgaaaatgtgattcttttttttttttttttgaaattgtgattgtcttaaactgtgtgtctagaccatctcctctgaattgctttggaaacatctgcacgggcatcttcctgttcttgagtatagagaggtggacatcattacgctttaaaatagcgaaagtcctgtagagcagtttttcttaatcagtgatggtatttaaaaatgaactccctaatgcttaaactaatgagctattattgttggaagtattcaaggtagcaagttatagaatctctcagtgaaagtgatttgaaataagaaattgcgagagtgcaatgcattctttgtttttaaaataaaacgctaatacttagagaatgttttgtttgcaagaatgtaagatgttatgtctttgtatagaatttaaggatagtaatttgcttctgagatctttgagatttgaaatctcaactatggtttatcgtccatgttttatacatttgcacatatacacatatatatgtaaggtatataaaagtagaggaaaataagcatgtatatatttacatgtatatacacttctataatgtgtatacttccagtcacatataggtctgagtgactgattttacttgatgaccatgaaggtaattaaataattttcctgctgttagccttgctttttgcatctgagcagggaccctgtgaagtgtgcctcccgcgttccaggcctcacacagtctgtaccagggtttggaagcaggggtttttctgcagccacttcaagaagcaggtggttgccaggattgcctggagctccaggctgcctccagttccagcctccctggggtagaagctgccccactaggggccttgacatggacgttagggcctggagccagggactccttcctgaaggggtgctccagtcacggctgggcgtgagaactgagggcgggaggtggaaccagcctcgggccattgcacggcctcctgggagtgcttatgggaagccccagccaccctttgctgaccccacagccagcatcaaactctgagatccccttggcccacccctcaggttcctaaaatgctttgggtttcctgggctgcgaatttttaggtctaggctaaaaggtcctgggacagagtcacagggttctttatgtgtaaaagcgacaagtgtgctggtaactcagagcagtccctgcatcctcgctccagggtcctttgcgtcaggtggaaacgggcgtgttggtcacacagagtccctgcatcttcactccagggtcctttgcatccagtagaaacgagtgtgtgggtgacacagagtccctgcatcgtcactccagggtcctttgcatccggtagaaacgagtgtgcgggtcacacagagtccctgcatcctcactccagggtcctttgtgtcatgtggaaacgagcgtgtgggtcatgcagagtccctgcatcctcactccagggtcctttgctcaggtagaaacgagtgtgtgggtgacacagagtccctgcatcctcactccagggtcctttgcatccagtagaaacgagtgtgtgggtgacacagagcccctgcatcttcactccagggtcctttgcatccggtagaaacgagtgtgtgggtgacacagagtccctgcatcgtcactccagggtcctttgcatccggtagaaacgagtgtgtgggtcacacagagtccctgcatcctcactccagggtcctttgctcaggtggaaacgagtgtgtgggtcatacacagtccctgcatccttactccagggtcctttgcatcaggtggaaacgagcttgtgggtcagagtccctgcatcttcactccagggtcatttgtgtaaggtagaaacgagtgtgtgggtgacacagagtccctgcatcctcactccagggtcctttgcatcaggtggaaatgagcgcgtgggtcacgtagagtccctgcatcctcactcctcaggtagaaatgagtgtatgtgtcacacagagtccgtgcatcctcactccagcgtccttagtgtcaggtagaaatgaacgtgttggtcacacacagttccctcactccagggtcctttgctcaggtagaaacgagcgtgttggtcatgcagagtccctgtatcctcactccagggtcctttgcgtcaggtagaaacgagcttgtgggccacgcagacggggagaacgtatctacaaaaggctcatctgataaaggctgttatccaaaccatgcaaggaactctcaaaacccaataataagaaaatgaaccacctgatgaaaaaatggaccaaagaccttggacagataccccaacaaagaagagacacagatggcaaatccacatgtggaaagatggtccgtgtcttatgtcgtagggcgaggcgccactgcgcacccagcagcctggccaaaactggaactgcgacaccgccgcgtgctggtgggcgtgtggggcatcaggaccctcacttgtggctgggaaaagtggggcagctgctgtggaaggcggtttcccatggaactaagcactccgaccacaggagcaaccacagtcctggacatttactcaggagctgaagtttacttccatgcggaaatctgcacacagatgttgacagcagcttttataactgccaaaacttgaaagcaaccaagatgcccttcagtaggtgaatggataaactgtggtacatcagaaactgggatattattcaacactaaaaagaactggaccactaatccatgaaaagacatggaaggatcttaaatgcatgttgctaagtgagagtccaatctgggaaggctgcctgctgtctgagtccaacgacaggacagcctggaaaaggcacaactgcagagacagtaaaaccgtcagcagctgccaggggttggggaggggaggggtgaatgggaggagcataggggctgtttagggtggggaagcaactccgtgtggggctgtcatgggggatccatgctgttccacgtctgtgaaacccacagagtgagcagcagcaggctgagacctcgtgtgagctatggactctgggtggtggtgctgtgttgatgcgggtctgtcatttgtacagacatgctggtccggtgggggtgggggaatgatggaggctgtgcatgtgctggggaaggagatacgtgaggactctgtgctttcctcccgattttgctatgaaccgaaaaccgctttttaaaaagtctattgaaaaggcaaacaaaaaatagtgctggccagatagaatctgtgtgagggtgtctcctgtgttctacattcaggatttccccattagaatacacaaatctaaattattcaaaagttaaacctttgcattaagtaactcactacaaagttaattacagtatcagtgagcttgagcactgccaggatagccaggatcctatatctggaccggcttctccccttacaggtgcagtgatgctcatggtctcaccccagtgagcagcagggctgggaccacacgtcaggctttggggggcagagaggaagcgagacttgtaagcatgtgcctgggggcaggcagggatgagcatgtggccagggatgattttttgacgagttttccttatcattgaggccttctcttagacttggggagtcgggagtccccactcaggcacctcagaatccacaggctgctcgtaatcctcacattccagatgcctcaggggaggtgttcagttgttgggtgctgttcctttgtttgctgcttggtgggatttgcctgcagcatttctggttgtttttaagagctgatgcttgatctgcttaaaatcacatatggatattgatttacctgtaaaagttaaaaatggaatttgagttcaaagatttgtgaaaatgctcgtttgtttactaatgtatacattacatttgtggaaatatccaaaagtccaggatttatattaaatacttctcttgatttttgtaatacctacttgtcatatttccatttgattaatagatgtcagagggcttaaattttgagtgcctgaattcactgaatttaaaacttaacgtcaaatgtaattaaactgaatgtagccaacagtgtatgactttaaaagtattgattaaaacatatataaaaacacatatccatgaacatgcagatggaggcaacatattaaaccatggaagtagaattagtgttctttttctgagaagacaaattgttaaaaagcccaaggggtcttagaattttttggtttccaacttatttgccctaaagtgaaactttggcagcagatggttgacagcagcagaagacgagatcctgggccagtgcaggctctgggagcagcgggggagtgcggaaggagctgcaggcagagcagggagctgctcagacaggtcaggacggccccagggcacgtggctcagtgagtgagaaagggttcatgtttcctggagagccctgtctctgcccacggaaaacccaaactccttccaactgggatgtgcatctcatgtaaaagttgttactcccagaaagccagtggatatagaattttttttgtatgcagaaattactttaaatttatttctaactttatccttttcttcccccatcttaaattaatgtctagtaactttctgcaggtaacgcacacgtcttcggaaagtgctgtatttcagttgctgtcggctctgatgtgactttgtggcgtctgatgttctggttctgaggttctgcccagagcgcggccctccctgctgagcgctgcttgttgaaggcccgtgtggaaactttgcctgtaagcatgtcgaccccagccgccttggttctcggaaacctttgggcctgctgagacttcacacgaccttctaaacttccttgcatgacctgttcattttagtgttacccattaattcagatgttttccagaatgtaagtaaactgctgaatgcagggtgggggcctccgttggctctggggagaaccatcgctgttactccgagtggagcttcctgcccgccatggtgtgctccaagacggagaagggttctttgggagaagcagccatcaaaggcccacgtctcagtggctgggtggctgtgggtgtgcagccttgtggccatactggcccctccccctcaatggcaacaagtagaggagcaggggggaggcctgggatctgtctccacgtcacagctgtgcttcaagactgcgtcgtccgtttgtaactagacatgcagagaaagtgttagcgatgagcaggagacggtttctgtccctaatgagctcaggtgcgcccttgagagggtcaggtttctgtgcggttgatcctgactcagcctggctgtggcagtgtaggtgactgctgggccccttggcaaggctgcacccactgtgcatctgaaacggccctcttcccaggctcgtggtgccagctggggggacccaggcctgtgcacgtcctgatttcccaccaggatggaggtcccatgtatgtgtgggggaggggaggtgggggtcctgccttattgccatatccaataccacgcggggtcagcactcaggaaacgtgctgcgtgggtcagcgattgaatgagttcagaaacctcgaaaactcagcagtgcaggctttgggcatgacccatccagcccccgggggtctttctctgaatttccttccatggcatccacctcatcccaggggctcccctgtccccttacagctgttggcagcttcacagcttcctctgccttccctcctgggccctggtgtggccggggcagctagtggctgtgcagaccctgcagccaggagatcgttggtgccagcggcttaggcctgggttacctgagccaaggactccagtgcacagctgggctcacccctaatggctggatcggaagcccttgggctgcaggtgggggttggatgttgaaggacaatctgcaaagcagaaggggaaatgggtgtgctggatggacagctggaggagtctgtgcagagcctgggacccagtgcagatgcagagctggcatggggagtttgacacggccaccatggaagtgggcaaagttacaggcttcagactgacgtcgaggggctggtctaaaatgatcctccttttcctttaatcctagtaactgctggaggtgggatctgtggtggcggtgaggagagacagggattttaattaaacctctttctggaagaggggagtagccatctctgtaggacggtgagcattgtcgtctcaggcagctaaggctgctgtaacaaaacaccattgactggcctctaaacaacaggaatttgtttctcacagttctggagggtggaaggtggcatgagggtgcagcatgggtgggttctggtgtgggccccttcctggttggcacacgccttctctctggccctgacacagtgggagggcaagagagttgctgggcccctttctgaggcacaaaccccattcatggggctccagcttcgggaactcatcacctcccaaagacctcctgacactgtcacgttgggggtgaggatttcaacctgtgcgtttctgggggaaagcctgtgtggacactgagcaaggtcagagctgcaagtgcgtacacatcagggccaggggagctgccagcggtgcaagagcagggtttcagcatcaatcggagctgctttcctggcagttgtactcataagctatcctggcaacgccgcttttcacgaaggagtcagtcaggcagcaggggcagcaggtggtgttgccagaagcttggaactgacgggtcagcagagaagaggcagaggccatgaccttggggtggtcagcagcactgggtgtccgccctccaggcctcatgcctgtgactgtgcagagaccgagctgaccaggacttgctggccagtgtggctgtcaggctggtgatatcggggtgtgctttccatgtgatgttccctcaaccccacgcccaccccaccaaactgcctagcagaaatcatgctgcctttccttgatgaaacgttgagtttcctgtggaggtgtaggaatagcatgatttggctcaagtcaaaatactttgtggtgaaactgcacagaagaggatcctaggcttccatttgacgtttagacaatgcctgagggttacaggaccctcttgttaaaaagcaccagatgagaaaggctactggttgttaataaagagaccttttatattatcacagagagggtggcttgagataaattcagtgtaacatacttgtgtttgtaagccgtcaatcaaagggaccatctttctgctggtgacacgtttctggtattgattttgttctgaaaaaggatgaatggcattcggtagaatcattccaaaattcacttggaaggcgtccatatggtgccttcttttcttctgacattctgggtatcatgaggaattattcttgccttcaccgccagcaggaggcttttcccaaacacctgctcctcttcggcgttgtgggtgtgaaggggtcagagtgaccctgtcttcatggagctttcagacaccaggacagtgtggggcggagcgtcgggcttgggtgggccagaggctttccccagaaaacagctgctgactcaggactgccctcgactcccctcccttgttccttcacctaatgtctgaattagggctgtgttctaccatagtgggggtgtcatgttaactggaagtgtgcttttgttctgggcagtaagtaaattcatggtacatttgccaaggacagcaaggtttgatttgatgaatccagtggagaaatggagaagggaaaaggagaaggggcttggctggatggggatgtgtatgatgggagcggagaggggcggccatgcaggctggtgggatggaggggccaagtccgtgtttccatggagtctgtcaacgtttgactgtgccactagacctgaacctctgtgctctacttttaaaaacccccacagtgaggaagcccctgatgggcctgagttggtacttcctgtggccattgctgggaagtgccgcggatgcctctcctggctgatgatggccccgggcctggaaactgggttcatcctgagctctgcgaggggcttgggttccatgcacagcaggcacctgcgcatccccctcccccatccccctgtcccccctcccaccctaccccctgtcccccccccaccctaccccgtcccccccaaccccctgtccccccccaccctaccccctgtccccccccaccccctccccctttcccctcccttccccccctttcccctcccttccccccctttcccctcccttccccccctttcccctcccttcccccctttcccctcccttccccccctttcccctcccttccccccctttcccctcccttccccccctttcccctcccttccccccctttcccctcccttcccccctttcccctcccttccccccctttcccctcccttccccccctttcccctcccttcccccctttcccctcccttccccccctttcccctcccttccccccctttcccctcccttccccccctttcccctcccttcccccccatcccctcccttcccccccatcccctcccttcccccccatcccctccttcccctccccatcccccccctcctctcccccgcctcccatactgcccggttgtccctaatggaagagaatcaatgatgccacttcactgatctccagggaaagcaggtcaacaacaggttataaacgtgggaacattttggaaaagctgtcatctgcttgtcagctccatctttcctgcccggaagatgtagggagaacctgccttcagcccaccctcatcccataacaggatggaggacaaaggtacagagacccaagtcatgccagtggcttcaggaaaccccctcgtttcctctcgtcgtggaagtggaaaccatcccactggactagatcttcctggggaagccccttcaccccgaaagcaaggaatctggtttgagcacagacatattcttagtgccatcactttctgcagctaaactctccgtgtgtggcctgttaatcttgctagttcagtgttattgggtcccaggagtttctgtgggttgatggcaggtgtttaccatagtgtttagagacgagaatagaattttatctattgtgtgaaaatcaggtgataaccattgccgtgtgattgcttgggttgggtgggggcggtgctcatagctttttctgaaggctttcttatttttatttttatttttttgagagacagtctcactctgttgcccaggctggagtgcagtgatgcgatcttggctcaccgcaacctctgcctcccgggttcaggcagttcttcctgcctcagcctcttgagtagcgggattattagtgtatgccaccacgcttggctaattacaaaaatttttagtagagacagggttttgccatattggccaggctggtcttgaactccttacctcaagtgattggcccactttggcctcccaaagtgctgggattaaaggtgtgagccactgcacccggcccgatcctgacatcttttaaatctgccttcatgaaccaaaagccagtctatgtttgaaaatcagcttggaagagcctaggaggagagggatgtacttcagctaggtaaataactatgcatatgttaaaaatataggccacaatctacctcaaatgttaactcttctgctttgtattttatatccatttatggttattctttcagtattaagatttttaaagattcttttgacaattatggacaagttactattaaaactcagctgcatttgtaacactttaaagaaccaattggatgacatttttttccctgaggcattttggatagttatgtaattaacgtttataattcttaatagtgataacactaagtgttaaaattatggaacaatttgtttttctgaaaattactatctgcctgctcaccaggtgggagctgatgagaacgtggacgtaaaaattgtttttagcttgtataaaagaagttaaaaaaagcttgttttttgctactactgaagttgcttagctacagaaatgaggttattgcaggcacctagaattttacccccttcacttccacagtgggaataaatcctccaagcacaggaatccgacattctgatattgagactcctaggcataaagccccccatggaaggggggtggtgattacgtgaatgttggcgttgatacgggcatcctccaagccggacgcagggagcagggacgtgcagaaagaccaggtccctcaggagccatgaggaaatacggtgttggcagcagtggtgagggtcggtgtcaggggccaggaggaggtggcgaagggagcatgtgcctcaaggcagccctggaacccgcggtccttggagtgaggtctggtctgcagggggacacggacggccatgcggtgaggcccacagacagcctggacttggctgcctcagaaccctctggtgaacattgcgaacggccctgcagggttgcagtgtaaattcctcggacaaagaagacgcctggaactgttcccggcacgaagccagcaccctgtgaatggtggccgttgctgttgtgactgagtgccgtcgaactgggggcatttgttctgctcagttcacttaattgggccaggagtggggttgccatgccttcaacaagcttgacgtattgaacgagaactgagtcgataatgcactgtgtaaatacgctctcctggctagagtgagcaaagcccaaggaaggggggtggttcttcagtattagcaggtgtttgtggtggggccagctgtgcggctggcagggcgaatgcaccaggaagcctctgtccccccgaggtggccagcattcctgttacacatgctataggcagaaggtgggcactgctggggaacttgctcatgttcctgttctctgattggaaattcaaggtttctgagcatcctacatctgaatttgtacattgccaagactgtacacatttcagcactgttttttctgctttttggatctatacaacctggcatttggccgtggcttccaggacaggctggatggtgagtgaagtcctttcctcactgtcgatgtttgcagatgtctttttgtataaactttgtatttcttgagaggttcgattaggtttttacttaatgagacttttaaaattgccatgcacatgattctaccagttacaatcgtgagctaacgtgagtttttggttttactttgatgaatgtttaaacatgtgcaggctggacatggggtgggggtggaggtcatttatctacttttcatttccttcttggttatacttagtgactttcaggtaaggtgtggaaggcgtggtacagggtgaattgcaggctgcagtgtggcgcagtggaccgcggtgtggcacggtggacaagaagcatgggctgcggtgtgctgtggtggacgagagccacgggccgtggtgtggcgcggtggaggagaggcgcgggccgcagtgtgctgtggtggatgagaggtgcgggctgcagcatgcagtggatgagagtaaaggggagacttccgtccttgagggaaacacgcgacaaacaattttaaaaactgatcatctggcttacatggtccaacaaattcagtttgcaaagtttgacttctaagttattgtagtaacttttcccctaagtcattaatttagtagcttatgtttatttcttttgtctaaagcgagtcataaattctaacatgaacgactaaacatgtaataatttaggcatacagcacctgaagggaaaactgccagtatgctaaaatattggatacagatgcttaaaaaatataatgtagcactcttaaaatgcatgtgcttttagcatgaaacttggtgagtagttttgagctatatttgtaggaatgtgtatcttgaatactttagggccccactgcagatgtgtgcgtgagatgtataaatactgaatgttcttctcccttcccttaaatgaaaaacattagctcccttttttttttttttttttttttcctgaagtggggtctcgctgttgtcacccaggctggagtggagtacagtggcgcaatctcggctcactgcaacttccacctcccaggctgaagtgattctcctccctcagcctccctagtagctgggattacaggcacccaccatcatgcctggctaatttttgtgtttttattagagatggggttttgccatattggccaggctggtctcaaactcctgacctcaggtgatctgcccaccccgaccttccaaagtgctgggattccaggcgtgagccactgcccggccagctcctttctataatgatgtatacagttgtttttgctttttgttttttgagatggggtctcactctgtcgcccaggctggagtgcagcaacgcaaatcttggctgactgcagccttcacctcctgggtgatcacctctcaggtgatcctcccacctcagcaccctgagtagctgggactagatacatatcaccacgcccagctaattttttatttttatttttattttttatttttagtagagacagggttttgccatgtttcccaggctggtcttgagctcctgggctcaagcaatctgcctgcctcagcctcccaaactgctgggattacaggtgtgagcaccacatctggcccatttttttcccttccaggattagaagtcaactttaaaaaacgcttcaaccttgcaaatttaattttccataataatatgcctctaggataaaaacaagacagaaacaaagaagtataggtggactgcagttaaaaattgtcaacacgacattgcttaggaaggttgacatttacaaagagcaggaggcccgttcatgcctttgtaagaaggcactgggaacggccgtctgtgggcgaccctaacgtgtgcggtgtcctgagaggtgattgtggtgctcacgcttttaccgagggcctcccgggagtaccagaggctcttctcccgcagtcggccagccaggcagcagcagctggagaaggaacagacagtaaaggacagatatacacggtgttatcgtgtcacacaggttaaagccaggctcactttgttcttacagttttgaaaaactaataatgaagtccttaaatatgtattgcatttcaggatttttaagcggttgtgggtgtgtctgtgtctctctctagctcctgttcggtgctccctgtgaagagagctcggagccgccacccttcattgttgaggtgacagggcctggagaggtgtgaaccccgtggaggggtgactgacttgtggggggaggctgggtcagtgtcgggatccacctcccaccacgttcctctagggaagccacagttctaagtctttatgggtaaaatgaacctggaagacgtgttattttttaagaagtaaatgctatgttcttttttcctcatacttctccgtgtttaagcagcattgaaggataaggcactagtagcaccttggtttggaaacaatcttgttggttattttacgttgaatctgatattaaggttgcctggtaacagaagttttcctttaacgacatggaactctgttgaatctgttgccccattggctgagccgcctgaaatcagtgctgtggcagctgaagaggccgcttccccttggaggaagccgctggattggcaggacacaccgcccttgattgaggcgagtttgcaggaactccacgctggcacctgctgctctctcctgccccctgctggctggccaagcagcatcgcgacagtgtgttcagcgtgaatgttcactggggcaggccaaggcttttgttccagaaacaccgacttcagaaacggctgtgtgtattgagcatggcaagaaagacttacgtgtgtcttaaacctcttgaacaaagcacgtcgatgtttcaactgcatctcgaaggctaatagactttgctgtggtcaatattcaggagaaaataggttttaatgagataaagacatgagtggcaagtgacatgtttgtgcccccgtatgactaagtgatgtcctggctgtcccacaccaccagctctgagcagccagcatgcagatattgggtcaatttagatatccctgatctttacggaggtttgatcaggcagctcaagagcagataaacacaaatgctgactggaaaccccggcacacggaggcgctggaaacagcaggctgctgttaacgtcacagtgagatgcagtcagctgctctctcaggggtgtcagcttcttttgcttctagatttccgtctgtgctgcaatagagttttgttcagcttatccccattgctctgctgtcttcgctgttaaaatctcagccagcacttggctctgaccctgcagtaatttcactgtgcggctgcccaggcctgcctggcacggctgtaaagcaggcgagagctttccggaaggtggtcacgagaaccccaggcgggaaagagcgttgctggtccacatacggcagtgcacctgcagctgagcatgtacgtgcacgttcaggctaaatataggtgcaggagagaagaaaactgcctatgattagtcacttaaaatgccgaatacccagcccctgagaccctaggacacagagcaggggtcttggagacggcaaggtgtgttgaagtctggttttatcatttagtttctccaagcagcattttcctcatctctaaactggggctaacaactgccccacatagatttgtgaatggaaccaatgagtgtaaagtggggtagcccccaggacctagaagggactcagtcagtttcagtggtcatgcgtgttgtacgggtcccccaggaaggcgattgctacagataactccctccgttcgatgtcactgaatgttaaagtgggaccttggcttctgatgtgtctggtttgctgcaggccgcgctgcaccccgtggttcctgagccctgggctgaagtagccctgctgcattgcctgtgccacttttgctgtgaaaggagaactcctgccctgggaagcttcctcttgctgcttagcctgatgagcaccacaggctgcagcgagacccatctgaagcgtgggttgggaggagactgcggcggccctgtcctctccaagctgctctccatgccgaagcgtgggctgggaggagactgcggcgccccgtcctctccaagctgctctccaggatgggagcgactttgtggggtttgtcggcccttctctgaggtgtcctgtgtctcatggatctgcttatgagcccccttagatgcctctctctcgtctggacgagcaccctccaaaacactgcctaccacccggatctcctggcgcagagtgaggtcacacctgcagcccttaccgcacagagtccctgagatattcggcaagaatgggaatgggctgtgtgtgagtttccgctgcggaagccggctctgctccgtagtctgtctttggggtgtgggatgttccgacctgctgtgtccatctggagctgcctcggggtgggagggggagcagcgcggatggatccagggaaggacctggttgaatcccagctgctcacatacttgttgctggtcttggacaagctccttagtgtctctgagcttcagtttgtctgtaggaggaggatgctgcagaagtctgaagatatcggtgcgtgcgggaatacctggcgcggttaggacgggttttccttcagtctcctctatgcccctccccgggtgaatcagtatccacgcgtgccaccagggaattacagtcagtctaaaaaaccaatcgacccctagttgtatggtcaagcatcgtgagtgtccttgccaggaaatgccactagatatcttgggcctgctcgtctgtccacagcagtccctggaacaggccggttcaggacatgggaggtgggagtcagtgttctagcgaggacaggctgaagttaaaaggctcatttactctgtgaaggggtgcccaggatgagacatccaagaggtgccaggtggctgaccctggaggtggacggtcgggtcagagtggccgccttccagcactgctgttggaacagccgtgttttcgagtgatgccttttttgggtcatgcagccctgatcagtagtacacaacttcccatctccagccagtctcgtctcgccatctcctgtatgtgcggtacagttgcctttaagtggcttcttctggacgctgcggttagggtggcagcaagcaaacatgggaggcttttttcttacgttgaccaaaatacgtggggccagctttgcatgatcccattcagcatcacacttgtccatcagccactcacccatccatccatcccagagagtcctggaccagaccattgagtggtctttgctgcgaagagcttagcggctcacaggaaatccggaaccagcacaatggtaacagtgcagcaggacctgtcatttatcaaggcagtatgctgggccggatgcggtatgaaattatccagttaggtaagcactgttagaattaacccccttttgcctaccaggaaatcgaggatgggggcattaacgctggggagcaagggagtaagggcacacatggaggggctgagggcctgggcactctgagcctgtggatctgcgcccaggctgcacgggcaccggagatgctgctctggagtgggtgaggggctctggggaaaagatggagcctgacatgggtaagatttggatattttcagaagagattttcagcctggaatgagggtgtaagtgactgaatcgcggtggtgagccagaaagcctggctgcacgagctcctctgtggcgtgagggaggaaggcgttgggggaaggtggctgagcagaggtgctgggtcatcaggagctgctctgtgcttggaaagggagggaagggcagcaccctgcactggaagagcacagagacgtggttgcagctcttcctgaccaggacaggcacaaatggtgctgatgatacaacgcatggactctgtcttcagaaaaagattgtggaaaagtcttctcctgtcttttaaaacttgggcccctcatttaaacttggtggcctcaggtgaatggtcaggaacagtttctgaggatgatgcagagattgtctgcagcctctgattgtgctcaggttttcacagatggggtgggacatgggcactgggctggaatgctctaaccttcgatcttcaatcgtcagtactgaaaggaatgtgcgggaacaaactcacctgtgcgcatatgtatcgttttcaaagacggacgagcttttgggaaatatctaaagatttcaagttttgaaggaagctgagatgacactggaaacatcaggaatcttggctgatgaccaggtccgtcaccgcgcacacagtccctaacctcgcacgcctctgattggacacagcgggtgaccgggtccctaacctcacacacctctgatagtgcacagcgagtgaccaagtccgtaacctcacgcctctgtgcatagcgggtgaccaggtccctaacctcaaaagcttctgattgggcacagctggtgactaggtctgtaacctcgcacagctctggttggacacagcgggtgaccaggtccctaaccttgaaagcttctgattgtgtgcagctggtgactaggtctgtaacctcatacgtctctgattggacacagcgggtgaccaggtccgtaacctcacgcctctgtgcacagcgggtgaccaggtccctaacctcaaaagcttctgattgggcacagctggtgaccaggtctgtaacgtcgcatggctctgactgcacagtgggtgaccaggtccctaacctcgcatacctctcatcgtgcacagcgggtgaccgggtctgtgacctcacacctcttatcgtgcacaatgggtgaccgggtccgtgacctcacacctcttatcgtgcacagtgggtgaccaggtccttgaccacacgcctctcgtcttgcacagtggttgaccgggtccatgccctcacacctctgatcatgcacagtgggtgaccaggtctgtgacctcacacctctgtgcacagtgtgtgaccatgtccataacctcacacctctgatcatgcacagctggcgggtgcaggacccacttcagtgaggggctcgtttcctgggtgtgaggtgggaacgttgcgtggctcgctaagcccctcctccgtgctttgggggctccaggctgtggccggcaaatagaatgttgtcccgggaggccactgtgtgttgggggataggaggcagctgcagactgcaggagtgcccagccccttggtgcagggtggtgtaggcatgcgtgttgctgggagtgccttctgcatgtgagtactggggattctattctggtacgttggcgtatcattcagcgtccccatcacatttgagatgaactgtgctctgtgagtggccctgccctgggtcatgaccacacgctggacttgagctgtgggagccacatggacagttgaaagcctcagaccccagggctacacacactgagatttcccaactgcctctccccaggccttgggctgatcccccttgctgctgctgtcccaacccctgacatggcacagcttccctctcagaagatgtcatgcagcttgtctgctcttcataaatcttatgcacatttggatgccttagcttcatgcagaagtcctgcaagcaggagaaaatggagccttgactctgggctggtggtctccaggcatctctctccagctgcatcccagcaagtcaaggttatttaaatgtgtcttccgaagggtaacgagcatgggaagcatgtcaatgccatgcagtgtgaggtggttctgggaataacagtacctagcagcacataccagcactcccttgtgctgccaaatgtgacatcgtgtagatgtcacaacctccttttgtcacctgcgttcctaatcccctggatttctcagcttctttacttctccaggagaaaacctgccccattgtcctgttacctctgaaagggagtttttacagcaggagatgatgctgtagctgtcagtgtaggcacatgcagcatcctactgttgtcaggtgcgcccagaggaaatatggctgggcaggtggtccccatctcctgtggtgtcaggggcacccacaggaagcacagctgggcaggcagctctgtctccctggtgtcaggtgcacccagaggaaatatagctgggcaggtggtccccatctcctgtggcgtcaggggcacccacaggaagcacagctgggcaggtggctccatctccctggtgtcaggtgcccacagagggaatatagctgggcaggtggtccccatctcctgtggggtcaggggcacccacaggaagcaccgctgggcaggcagctccatctccctggtgtcaggtgcacacaggaatcacagctgggcaggttgtttattgccaggaagtacagctggggatcagtcgagagcctcaggcagggggttaatagattggaaaggttgagaaccttggcttgatcactaacacacaaattgtggcagtagaaggtggagatgcccctgtccgttcctcaaatgttttgctttctcctgtttcctgaagagcgtcttgttgcctcctaagatagctcctgcgtgtatatctgtatatccttgtagagggactagagacactgctgggaagttagtgactctgtgttgatgaggtgccggttattagtctgttgccttaaaacatcagcaattggaattgctcctcggaacatgactggacccgttgccgttttctgtacagttttcttttggggagatgcacacggttccgggaagggtgctgggctgcagtaatatgggtgtggacacaggtcccatcagaatagtatcccttggagggcagggtggggatcccgcgggttcacggcggttttgctgaatgaatgaatgaatgaatgaacgaacctagcactgagagtcacatgagctcatatggaaacagcttggagtgttgagaaatggagattgaagagctcacctcttctctgagtatgacggggtcagcaccgctggagctgagggtttgacatgcaatgaaagccgtgatgcagccatagtgcgatttggtttatatagctattgccttctgttatgaagctgaaaagaaccaggttagcggccacctgctactcaggccttatgctttcttaggaaacagtaagatgtactaaatttttagtgttaaagtgacagaacatgggaacacgggaagcgtctcatcttgtcacttgtgacttggacacggagcccgtgggtgcttctctccatggtcagacttggtcatggagccgtgggtgcttctctgcatggtcagacttggtcacggagccgtgggtgcttctctgcatggtcatcttgcagcttctgagtcccatcctcgctctcccggcctaaggtggctgtgctagggatcacacctgcaggtctgacggcaacattgtgtgctgggtttctctcccaggacttccaggtagttcgtgcctggaatagttccatggtagcagggtatcagcgggtggccagcctcggcacgcctgcatggatttgccgtctcgggggtgggagccccatggcagacggctgtttcccttgcgtgcctcttccagcgtggcctttattctccacagggcgttggaactgatttttgcacaacagtgatttgacagtgattgatacgctgtgggtctccagcccaaggagatggggataaatactctttattgctctttcatgctctggttaggaaggcagttaggttgaaggctgcagttaccacctgtgtgtgtcgtgagatgaagagagagtatttccatgaaatcctctcaggttacagaattagaccagttgtatctataacccagaagttgaaagcagttgactttaagtgtgatcaggaatctggaatttaatttctgagtaaaataattactgtggaaatgagtctttggacttggaattgaaatcaatggttgtaaatttagggtaagtcacagtaatgggtttagacaaaacgtctgatgtaggcggcagagattttcaggtgtatatagaaccgtgatgaaaaccataggggacaaaggaggattgtcctgtcctgaaagatgtaaaaatgcggttacaaatgcagacctcagtgtgcatatagaggccagcaaacgttaactcggtgtttggcacagcagaggggtaagagccgaaggaatattgctggatgttcttcaaatgactcttccctctcagggtggaagctgtggttagcacccactggttttgggtctgtcagtgacgactcctggatggtcaggtggtgctctcagagaaagaggctaggaacacttccatggttttccgccagctttaagatacatctttgtagcccttggttccatttgtttctcccttgtagttttattttgcttgttaaatttatgtatagtagcactgccactctcttttgtggtcagttcttttagtttccgagtgcttattatgtccatccacttcattgaagtgtctgttcgatctttgccagtttttaaattggaacgtttattgtcctgtttctttccctttcatgtaacttttagcttgtctgcatctacagaaagtcctggcaggatttatgttggaatcatgataagtccgcaggtcggtgtcctggcgggatttatgttggaatcgtggtaagtctgcaggtaggcatcctggcggaatttatgttggaattgtggtaagtccgcaggtcagtgtcctggcgggatttatgttggaatcgtggtaagtctgcaggtaggcgtcttggcggaatttatgttggaattgtggtaagtccgcaggttagtgttctggcggaatttatgctggaattgtaataagtctgcaggtcggtgtcctgccaggatttatgctggaattgtggtaagtccgcaggtcagtgtcctggcgggatttatgttggagttgtggtaagtctgttggtcaacgtggagagaattggtgtcttgactgtgttgccgcttctccttggactcgtggctcagttgaggtagctctttcctttctttcttcagtgttttgtggttttcttcatacacatcctctgtgtgctttgttaaatgtatacctaagtgttttttatacagctactgtaaatagtgttgtttttaacatttaggtcccaaatactaattgccaatacgtagagtacactttgactgtgtgctgtgacttggctgaactcaggtattggatctaggactgacttttgtagatcccttgggaatttttatacgtaggcttttggtgtgacttgagtttcctcctttctgttttcagtttctttgatttgtgctcattatgatgtctttttctggctttgagtttaacatagaagcttagattatggacctgagaccttacttttttcgaatatgagcctttcgtcctatgagcttacttcccatcattattttggctgcatttcatagattttaatttttgtttcagttcacttgaaaagtattttcctttgaacactcatggtggttttatttagttcacccaaatctcattttagcaaaagataaaaattcatgtaggtttagttcctgtgtgtgcctcataatatcttcacattctgtgcattgaccagtaaatgattgggcttatcagggagatggttgcatggtatattggtgttgtaaaaactatgatgtgggaatttgaatgtttttgagacagggtcactatcacccatgctggagtatagtggtggaatcatagctcagtgcaacctcgacctcccaggctcgagcaatcctcccacctcagcctactgagtaactgagactacaggtgcatgctgtcatacccaattaattaattttgttttttgtagaaatggagtttcactatgttacccaggctggtcttagactcctgggctcaagtgatcctcccacctcagcctcccaaagcactgggattacaggtgtgagccagcacacctggccaggaattgaagtgccacgaaggtgcagaggttttatgttttgtgttctgatattgccaaatacctggcacagtgcctggcctgtggtcggtgtgtaacgcatattcctgaatgaatggatattgcggtgcctatgtgttgaattcaatgtaatttcactcagttgtgtttctccgtgccagtccttttgcctgtctggactgctttgttctgcaagtcaccttgtaatacgatcatattcttcgatcggttttgcactttgattattgacctttttttcattttaaatgaagcctccccattctttctgatcagatattctcatcttccctctataattggggtaatatggtatcaacgcatgtgttttcataaacatattattataaaaatccttgaatacatatgtgcttacataaacaggtttgtttcataaaagttggtattgcaaagcagagatcttaacaagttctactcataatgtatcaatgagtataggactgcatacattctactttatttgccttctaaataaagtatattcttaattattgccacttaataaaggttgggcaagatcttctagaaaggatgtttccacaaactaaagtgtgtactatcaacattattatttaaatagctagtgaaaccatcaaaatcttaccacatttacatgttgcaccaggaatcatctctgctttcctccctgcaactcagtatttttgacacaatgtgaattagtgcacaggaagcctcagtgtttcctggagggttgcccgcagctcactggcctcagagaaagtcataatgtgtgtacaaacttctctggaataacttgagcttattacatataacttctggtaggtcatttgccccctccgctctccaaaagaaaacctcaggcctcttaaattaactacaagcctttttgggactgagccattattttacacagcaaggttgtcagaaaaaaaatagctttaaggatgatagaaagatcttagcattttctgaagcctgaaacctatggggggagacatcgcagtcattcctgtcctgatgggacctggcctgtcttgttttgttatccattgcttacccagatgaggtgatttgtttaagaaaatcattggagtcattgaattaagcatccctgtatttccagcttttaaaagattttaagttaaaatacaactttttaaatcttttatccagcgaacatttggtgatattgtgtctgtgtttcgtgtgcactttgttttgtgtaggatttctgttttatgtactctgtccattgcatggcacacaataggtattaaatatttgggggatgaatgaggaaataaagttcaggataatttctatggcatttggaaattctcgtgtaaaacctaggcacgtacagtgttcccaaacaagggccaagtgaaagctgcagtatttgtttgattaattactaaggagcagtcactttcccttcatgtatcctggacttgtggggtcacaggacctactgaaatagtactgtataacgtctgctggagcagccaagggctggtggctgcaggtctcaggaagagaacacagaagtagccatgggccctgctcctgagacaggccaggggttggctctgaacccacctttgccccagacgctgatgagcacagaggtggttgtcagggaagctggcacattgcctgcaggggtccctggcaggtacagatgtaggggagggcccagctgaacccacatctgctgtgaaggcttgcaggagtctgcgcttgctgagggggccctagttttattccctgggtctgaacttgctctcagtggccctgtctgccttcaaaatccacccgagcaagagctgggcttagggttggggccccttccccagtcccattgtggcagggtcaggttactggagataagtcctagtcagcacctaggctattaacaagttcgaggggctggcatatccatgcttgctctatgataaagtcaacaatttggcagatggtaactagacatttcagagttcctttaaaatggtgttagtaaagcccatgatacggtttggctctgtatccccacccaaatctcatctcgaattgtaatttccataacccccacatgccaagggcaaaacctggggaggtgattggatcctgggggtggattcccctatgctgtcctcgcgattgggagatctcacgagatctgtttttttggtaactgtgttcccttcctgcgacctgcagccaccagcccttggctgctctgtcagatattatatggtactatttcagtaggtcctgtcctccccctcgcacacctccctctcacctgccgccatgtaagataggcctttgcttccccttcgccttctgccatgatcataagtttcctgaggtctccccagccatgtgtaactgtgagtcaatcaaactgctttcctttataaattagagagtcttgggcagttctttatagcagcgtgaaaacagactgatgcagcccagcggtccacagagggggagcccagccgtccacacagggagaaggtgacagtgcaaatgctgctgtcagggctgcgctgccaacgagcagccagtcagcaccacatgtgggaaacctcagctgtgtagccattgaggggtcagggctgcaatgctgacaaggagtcagtcagcatcgcgtgtggtgaacctcagctgtgtgaccatcgtggggttcagccatactgttctcattgagcagcccattttcaaagtctgaaaaaggataacaaaataataggactgaagttttcatagtcagtgccttgcatgaaaactggtggttgagaattcctcaaggaaagcagaagttgttctccgagtcagcagtgctgtgcggtgcagagcagcgttggtgagaaatgccggcatgcagataagtaacaccatagaaaatccacattcacagctctcagaaagcttgttttatctataattagctggcaggactcaacaaatgcgcattgcctccttaattcgcccacacagcagtagcttttttcaggcctggggtgttactgggaaacggtgagtggggtcctggctcatcctgaggtgtgctggagctgagaggaggttttgtacttggggatggaggttggggcacgcttgagcccagagtcttgaggtgagctgacttcttcattgaaaaattatattctctgggaaggaatgggcagaaacttcaggtaaatgaaatggaagtcagtcatcccttgacagaggtgcatctctgacgagccccctaagagagagccccctgggcagcagggaggaagaagcatgactgcgctgtgttctacacgtcctggtggggtctgtcagcaggacccctgaggggaggcaagcatctccactggcgcctgcttctgtggcccggactgctgattgtgagtggaattagttcactcaggtgtggagattcaaggggctctgaggacttccttcagctgaggcatctcctgttagagcccagtcattccctgggtgtacagcgtgtccctgtcatctgcttccccaccctttgtgaagagacaaccaatgccaaacagcagcagcatcactgcagccggggaagccagctggatagcaagaggttgggaaaactcaagtactgtgtttatgaaacgcatgacagaggctggattcagtggctcatgcctgtaatcccagcactttgggaagtctaggtgggtggatcacttgaggagtttgaggccagcctgggcaacacagcaagaccccatctctacaaaaaatacactgttagccgggtgtggtggtgcctgcctgtggtcccagctacccagaaggctgaggtgggaggatcacttggccctggaaggtcaaggctgctgtgagctgtgactgcaccactgcactccagcacaggcaacagaggcagacctgtctcaagaaaaaatttttcatctcatgacatatgttttccctgtcccaacctattccaaaatagctaattttttttggcgcttgcattttgcatttcaactccaaatgtatgatgaatgttgcttcaagaaattcttcctctgcatcccatctgtatggcggaactagccaggtgccctaacattaccggacgcttctctgcatggtcttacgtgtgtcagaggagccctggctgcatgttcagcttctctggatccaagacattgctgtgtgtggcaggactgatcctcactacgtacggtttggattccttgtatgagcgtctggaagaagacaaggtcttgagctcgttgccgcagcaaacagttcgcaagtgaaggacgcctgcttctccctgtccagagctgccccattgctgatgaagacagactgtgaagttggtcaacagagaagcagccgacacagcagaatgaccaggaagtaatgaggggtgtgggaggggagagcctgtattccttcccctgcctgctgaatgttaaaaatttccaaggtgcagagttggccttccatattcgtgggttctatagccctggatgcagccaaactaaaagtgaaaatattcagaaagaaaagaatggcctaacctgttctgaacatgggtagactttttcattattccctaaacaatacagtacacccaccatttacatagcactcacgttgtttggggtattgtgagtaaggtagagattgattgattgattgatttcgaggtggagtcttgctctagtcgcccaggctggagtgcagtggcacgatctcagctcactgcaagctccatctcctgggttcatgccattcttctgcctcagcctctgaagtagctgggactacaggcacccgccaccacacctggctaactttttgtatttttactagagatggagtttcaccgcgttagccaggatggtcttgatctcctgacctcgtgatctgcccgcctcggccttccatagtgctgggattacgggtgtgagccaccgtgcctggcctgtggagattttaagtacagcagagggcaccgtgggttctgtgcactcagcactcacattgtttggagtattgcgagtaatgtagagatttaagtacatgggagggcaccatgggttctatgcactcagcactcacattgtttggggtattgcgagtaatgtagagattttaagtacacgggaggtcactgtgggttctgtgcactcagcactcatgttgtttggggtattgcgagtaatgtacagattttaagtacacaggagggcaccatgtgttgtgtgtactcagcactcacgttgtttggggtatttgggagtaatgtagagattttaagtacacgggagggcactgtgggttctgtgcactcagcactcacattgtttggggtattgcgagtaatgtacagattttaagtacacgggagggcaccgtgggttctgtgtagtcagcactcatgtttggggtattaagagtaatgtagggattttaagtacacgggagggcatgcattggttctgtgtactcagcactcatgttgtttggggtattaagagtaatgtagagattttaagtacacgggagggcatgcattggttctgtgtactcagcactcacgttgtttggggtattaagagtaatgtagagatttaagtacatgggagggcaccgtgggttctgtgcactcagcactcaacgttgtttggggtattgagagtaatgtagagattttaagtacacgggagggcaccgtgggttctgtgtactcagcactcaagttgtttggggtgttaagagtaatgtagagatgtaagtacacaggagggcaccgtgggttctatgcactcaacatttcttcaggtattgcgagtaatggagagattttaagtacacgggaaggcaccgtgggttctgtgtactcagcactcactttggggtattgcaagtaatgtagagattttaaggacacgggagggcaccatgggttctgtgtactcagcactcatgttctttggggtattgagagtaatgtagagatttaagtacatggggagggcactgtgggttctgtgtactcagcagtcacattggggtattgcgagtaagagagatttttaagtacacgggagggcacatgtgggttctatgtaaatgctgagccattttctatcagggacttgagcatcacagactttgggatcctgacccctggaacccacccccacggacaccaagggtgactgtacttcagcatgctttatttttttttttttgttcactgagagagtcgctagaagaaacagaattttttccacacaaaccaacattcaaaacctatagtttttagggaggaggaggggaaggatttcaggtttttttcctgccccttcaagctattaataacacattcctcaccttgtagttaatttgtatgtgtggtgagaatacagaagatccattctcttacccagtttcaggcagatgatgcattgttaactgaatttcaggcagatggtacattgttattaactgtagttaccacactgtacattcgatctccagaattgactcattttttcttgaagtgtgtgcccttgaccagcatctccctgtttccccttccccagtccctgctaacccctattccactctgtttctacaaattctacttttttaagatgccacatgtaagtgagatcatgcagtatttgtatttctgtgcctgttttatttcacttagcgtaatatcttccaggtttatccatgtttttgtaagtggcagaatttagttcgttaagttgaatagtatttgttttgtccatacaccatgatttctctgttcatccactgatggatgcgtaggtcaattccacatcgaagtgattgtcaatagtgctgcagtggatgtgagcatgcaggtatctctcccttacactggtttaaattcctttggatatttacccagacatgggattgctggatcatagagtcctgtttctagttttggaagatgctccatgctattttccacagcagctgttctgctttgcactcccaccaacagcgtgcaagggttccctttgctccacatctttgccaacactgcagaatttacgtttctgatccccttggttcccctgacatgggcacaggtggcgtgactgctcactacacctctctctgagctttcctttctcatgctgcatattgactggttgagcagcctcctcattacacctctctctgagctttgctttctcatgctgcatattgactggttgagcagcctcttggattgctttgactcttggtagctttgacttaaaaaggcaactgagcagaaagccgtagctactatgcagctgcttaaatgattctgcagagacttaaagtcagactctgggtgagggagtgtgtgcttctaaaataggaagataatgcttgatgtgttgtggaaagttgaggctctgttggccccggtgctgaggtcactgcgcgcctctgactctggtgtgaacacacagtgaccatggagctctgttgacagagatgtcctcctcctggggtttaggactctggactgcatgcgcttttgtgtttactgaggttagcccacttctttctgctgtcaaagtgattccatctttgatagccttagcagttctcttgtttctccaaaagcactttctgatgaagaagggggtcacatagtgtgtgttcatgaccatcccctgtggcccagcactcgggatagaccactctgccactcacctcggggtggtccagcgtgacttttcagatcctggaagtgacgtggattttgtttattccagttgtcctcctcccccttcagcagggctgtgatattctccctgctggggcatctgaagtgtctcctgtagttggaggtaggacggcggcactgggccaggcggttctgcacgatgactttgttgccaccagtctggcccttggccagatgccttgggcatctcggacttgctgagactgtcatctgtgaaacaaggatgatagtgcttgtggagtgtttaaatgacatagttgtctgtaaagttggcagtaagaccccgactttgtaggtggataatcggcctccatcctttctcctgtccacctgtcctcatgctcatgttccctcccaatccaaagaaaaaactctgagggggtctctccctctgtctgtcgggaagcggagggtggagcgtgagagacttgctctcaagccatgaggcccacggcggccatctgagaagagcccacagcaggcggcgggccatgctgggtattcttctacacgtcagcttctcgatgtccagctggaaataatggaagctgggcttcattgtccctaccttgccccttctcgctccccccaacaccaaaaaatgtaaatacaacatccactgaaaccaacttactgctgaggcctgagatctgcaaaattgagaatcaatgtcatgggaaagggaagtagctgtgtttaatacggcatagtcttctcagagctgtctttctacaggtcgggtttctttcctttttgtgtgaaggagggatttctaactcccaggacacactggagaaattatgcttgcctgaagagtttttagcaagttatgacagcggttttgtgtgaaactggcatgtttaaatcttcccactggccaggatgactgctggggcatctccggggacctcgtgcagagcccccagtcttgccagggactggaagggagggggtgtttcgaggctgcagtaggacaggagtctcctcaaactcacaaagcctctgctccgcgcggcacactgcacacgtgctttgaattttaaaaaattccatcggcattcatatttctaagcccttcagggactgttaatactacattattctcttttaacatcagaagcttattttcaagaccactgcggtggtgtgaacttctgttgatctttcacctgttcttttgatccatgtgttacaaatagaatggattccaaacatgctgtttcctttaatcccctttctaactggagttcttaacgtaccaaagagaagagctacaggggacaatacaaatttaaaaccaaaaaggtaaaactctaagtgaccttgtccacctgcctggcccgagtaagatcttactgcaacagcatgtctaaaatgtgtttctttcctgctcctaccgttaattaaatatttgtgtgcgtgtgtgtgttgtttgagacagggtcttgctctgtcgcccagagtgcggggcgctaggcactaaataacaataaataatgttttttattaagcaaaaagctcaggtgaatgtatgaatcctagtgcaggctttatgtttaccctggcaccttatttaaaagatctttatggaatttaagctgccgatgcttgcactggaaatgtggcaggggcttgtgagaatgagggggtgatgggcacagcaggtgcaggtggagccatggcagagcacgggtggccaaggcggcagggccaggttgggaaggacttggaggccctgtggggagtttggtcacagcccaaacagcagggagaagcctccaacgcagtttggggagagaggctcaccacgtttgcattcttgcagcgacccttctgtctgctgtctggggtatgcctggggcaaggagcctcagccccagagctggagtgtctccgacacgggggcccgcggcgtctggggtccctagatggtggttgacatcagagcagagcaacaactgggttctcaggggtcaggattttgagattcctcttagcccctgttttctggggtcgggattttgagattcctcttgcccctgttttctggggtcgggattttgagattcctcctagcccctgttttctggggtcaggattctgagcttcttcctagcccctggttttctgtggtccatcttctttgcctccctcccctgacggggcgatacctgtggccctgcagggtgcacagcaggtctgtgttcatgagtcctcccatcaacttggacgtctctcatgaattgaatgtgaaatagatactgaatgaatgcttgttgaactttttttaaagattttcttgtgtccttagtgctttgagaccttcacatcctgtgtgtttgatctctccatctgcggcagcaagtagataggtgctatctccaatattttatccatgagaaaaatgcgacccacactagttagctggcccatgggggaccctgctgtgctcagcttgctggggtgagaggacatcccaggtcctcctgcccctgtccccagtgcaggcgaggggtacacacaggagctgtcaccggtctgcagcgcctgctggagaacgaagaagcctatcggagatttaaaaacgaggctgcggccttgccttccggggcctcctggctccttataaagcaataggctcagagcagcagcaccagggctcctgacagccgtagaattcccaacatggaaacgattgctttgttatataaactattaattccagcattaaatagtctcctgacactgcacatggaaaccgccactgccgagtgggtctgtgtgcttggagctgagccacgctgtggaagcagctctgtggcccgtttctttcatcccctagggtcacgcggctcccaagtgtccgtgtcttgagcctgacgttcacagcactggctctgcactggttccagttgggccagattggctggtgcgtgcctgaggccgagaggaagccacaagggccgggtgtctgtctgttctgtcatcttaaccctgcgtttgccaggcagacctttccctgcttttgtaagattgggttttgccctgaaactctggattgcaacataagtgagaaaaagaattgttcccttcagggagggaaagaagcatcatccctcagtctcattcgaccttctgctggtgactttgcctcactggggttttcacttccaaagtaggacttgtgtgtaaatctctcctctttgtgattttaatttctgcttctgaaattttaattcttacggaaagtctctgagaataacataagtggcgtttttttaatgaagtagaaaatgtttctaaagagatcacttatttttctcactgaggttacaattactgcatttacttttctgtcataaagtgaaaaggaaattaaataaatgggtaccttgatgtggaagcaggaaaatatgctgtttggaattttacgtggaaagcgctctggcaggggctcctgtggttcacattctctgacagcagccttgagggtgtgccttagacccagcctcccggagggcctccccggagacgggagttgactttcgaaatagccttggatgacgttcccatcgcttccaggtttggggaaatatgaacaagcaggctgtgagcagtggatacgcctagcgggataacagacacgtgatggccccagcttagaaacgtggggaaggatgtgccctctttcggagcatttgcgcctttagtttacgtagctgcatgctgatgaccacatgccctgatggacgcaaggtgagagggagagaagagaggcaggaattaattgatcattcagcctgaaccaatgtgaaatggaggaagccccaggcaccgtcagagccaccgtgtccctggtgtgaaatggaggaaggctcgggcactgtcagagccaccgtgtccctggtgtgaaatggaggaaggaccaggcaccgtcagagccaccatgtccctggtgtgaaatggaggaagccccgggcactgtcagagccaccgtgtccctagtgtgaaggtggaggaagccccaggcaccgtcagagccaccgtgtccctggtgtgaaatggaggaaggctcgggcactgtcagagccaccgtgtccctggtgtgaaatggaggaaggaccaggcaccgtcagagccaccatgtccctggtgtgaaatggaggaagccccgggcactgtcagagccaccgtgtccctagtgtgaaggtggaggaagccccgggcaccgtcagagccaccgtgtccctagtgtgaagtggaggaagccccgggcaccgtcagagccaccgtgtccctagtgtgaagtggaggaagccccgggcaccgtcagagccaccgtgtccctagtgtgaagtggaggaagccccgggcaccgtcagagccaccgtgtccctagtgtgaaatggaggaagcaccaggctctgtcagagccactgtgtccctagtgtgaaatggaggaagcaccaggcactgtcagagccaccgtctccctagtgacagcgtggcattgattgaaggtcaggccttgggcccaacccaagaagctgttcagggaggatactgtgtagtcagccagctagcttctgcctgtcagtctctcacctcccaccacctgccatctgtccatcatctctgtcgtctgtctatatgcatcatctattatctacctgtcacctatgacctgattgtattcgcacgggaaacattggttcttcaaaataaaggacggcatgtaaaagtgctgctagaaggtttgctcatgtaaacctgcagcgagtctatcatgggaatctggtggacctctgtctaccagatgctgaggcagtccagagttaaaaataactggactttttccatgaaaacgtagcaggagtttgtgagccatgagctttggggcctgagtgagcctggtctcagggccgtggcatccagcgcttcggctttggggtagcatgcacatcaagccgtcgtcttctgcattttgggatagaatcatcgtaagtttcccctttgcccgccccccagtaactgaacaggtaaatgatcaccccgcgtctgcccaggtcttcagcgcactcccagccagtcacttacctgcaggtctctctgcgtcaggcacagacgtctgtgtgtgtggtacatgtggtacacgcaggagcaccctggcttcagtttgtaagacaactgggttggggcacagttctatgggacattgtctggttttaaggataactgtgcatgtgtgttacaaataaaccatgaacagtcatccacgacatcacgcaagctacagcgtgtgatttatgccgtgggtacccagaggcgtcatccatgcagggcaggggctgggagagggcaaagcaggaagtagagtcccgtttccttcggagaagggcacttcccaggcaggttatggagtcaggaggatgtacggggcgtgaacatgcgaggaaagcccaggaagccagggctgcggcctctgggcaccacaccagctttagagtggaagactctaggtgtggttttcatgggacatggttttggagctggacagagttttgtcttagatttgtggtcctgggtgaggaacgtgagtaccatttgtgcctcaaattctcatctgtaaaataagttcttataaggattaaacactttcatctttggggatgggccagcaaaccctcctgtgaagagctgcactgaactgtcttgccttgcagctcggcaaggagcaggccgtgagcacagagcgtgtctccagaagtggcctggaagctgggctcagcctcgagacttagttcccagaccctggtttgggggaaaatgcggggcatggaagttactcagtgctgccaccctttcccacctcctaggttttgagagatgatagtaacctaggatttattaaagtcttgtctggaaattttctttgctgattgactgggggctcgatttaaatcaagcacgtgcacatgtggctgcttctgtggttcagattttggacattgtttgtaaaacgggttaacaaggcatttccaaaagcaactgagcgtctccgtagtgggcagctgatggctgccggtgtggagtgcccggcaagctttaacatttctgcagaaattgtcctttgttgtcagtggccagctacctagttagcatcggctgggcacggtggctcacgcctgtaatctcagcactttgggaggctgaagtggcagatcatgaggtcaggagatggagatcatcctggctaacatggtgaaaccctgtctctactaaaaatacaaaaaattagccgggcgtggtggccagcgcctgtagtctcagctactcgggaggctgaggtaggagaatggtgtgaacccaggaggcggagcttgcagtgagctgagatcacgccactgcactccagcctgggcgacagagagagactgtctcaaaaaaaaaaaaaaaaaaaaaaaaaaaaaacactcattgatgggcggatgcgggttccgtgtcatttggttcttggctccgtgttgagacgtcagccttgtgttccgtgggggagacgagaacctgtatcatgagctgtgagttggtggaggcagccgtggaggcagaggcagcatccgagactgcccgcctttcactaggaaaagtgagttgaccagcttgtgtgtgtaccttgataacttttcattcatttgctatatttttgttaaagcttgaatttttcactcttcttggaattatggtttgatcagtcttagaaaacaatacaacagatccaaaaaaatgaacagcgaatgagtattctgtgtgtgctggagcttgtgaatgggaagggcctctgtgtgtcgatgaggtggctttgtcctgtgtgcttgcgctggctccaggaaaggcatggctgctgcgcgtccgtggctgtctgtgagctttaacatgtggattcttgcctcaccacaagcacctttctcttgtcttctggatttctgcaggtttcacaccttttgcttcttcccttagcctttgtcactcctttttcaaaaacactgtggcggcttcaagtccttgtgaccgacctgcttggttagaaaacatcttgttaatgaagaagatgccaataggtgctggtgtcggccatcccggccctggcagctgcaggatctgtcgttgactgagttaacgagagccccggccaccaggcttggcttcctgtgccagcgggtggggatgagatggcaggggtctaaccctggaccccatccggataaatacagaaggggccagaaacaggcgtgtgtttaacaaatgagttttagtgacttacatgctgtgggcttttgttcgagagcaggggaggaactgaagttgtttgatgtgcagtgcttgcttttaaaattctaacaatgaggcacacagaagatactgtgataactgtgtcttcttgggcaccgttgaatgataatgctctatccacggagaccatactgaacttcattttccttctcttgcaggtgacatcacacaaaaaggatatgaaaagaagaggtcaaagttaattggagcctaccttccgcagcctccgagtaggtaacccccatgagtagcatgagtcctctcatttcccgcattcactatgtgccagagaaacatctggaggcagacgctcccttgcttcccagtcggcaggaggaggcgtctggcgttcaccctccaggcattcagttcctttgagtgatcacacgtgctgtgtgaatatacaaggcacagaggatttttctataagtgtgcctaataggtgttttctctataagtagagatcggtattgggttggttactttaaaatgctataatcgtaaaaatatgagtgcattagtgatttcaacatatttggtttagagagctatttattactattgattctggtttaatccaaggcttctgttggtggcacaggccaaatctagacagtgctgtgataccccgcccaggacttggcaatcgtgaaagctggttgtgtgttgagatgtggttgcaaacatccatgatgattcttgagaagggcagtcggtttcccgccagcgtttctacgtgtgcagattggcagctttcctgcacttgagctgggttctgtaaatgtcaggaaaaagaatctcatattagatggggattctagcacctcagttcccagctggcaagctcaattcagcccaagagcgaccttgaaaatttggtaggcttgaggaatggcttaaagctaacacaagcagtttcttcctcaaacataaaggctagcaacataaattttaaaggtggaaattgaacttgcatagttcttaccattgaaagaagattttagaaggtttaaggatgcacatgtccacacctgcacaaaccccgattctgttcttcccgaggcccgtccgggtcctgttgactcagtaaggaaagtttcctgaggctcaggctgcaggaaacggtgtggagattctgctattggtagttttgttttcatttcgtgtttttcttgccttgatttttgagacagtgatgtaacagtgaacatgtttctgtggaccttgcttagcagaggcttaagtcagggatagacgccgaggaacccgagagaaggggagcagagggctgggctggaatgctggggcgagaggcttcagggcagtgctgggtagatcccctgatggcctgcgccccctccctcattctcttctcgcagagccatggggcgacagctgcccccgccctgtccctgtgagttcccctctgcaggtgccctcatgtgctgcagaaggtggggtctgactgtaggccacggacgctgttggttttaactttcttgccttgccaaacaaaagtgaaacagaagcggttcctcgcttgccaggacggttctccagcgcaccgtgcctcccgcggtggccctggccttagccgggcgcagagggcggtcgtgccctgtggtccccttggtggtctgtgtgctgtcctgcatggggtcggcagctctgctcagcgctgtaacaaatttaaaaaaaactaaagtttgaattaattagttttttttcaacttgttacagcagcgaatggagctgccgtggttcggtgtagactgcagcacagtgaaggagcgccgaggagaacattccgctctgcccacatcggggtgtgcgacgtccgagaagctgcggctcgggagcgggtggccagcaccgcagggaaccggcctctgttttactttcgtttcggtgagcgctgctttgctgagagccagccccacagcagggtacacattagaaaagggccacccgccgagtgccatcccgtacagacgtgtagggtgtggccttgggggcctgagggtcccattctccagtgagccaggtcgctccacaggcccagagctcgccagagaccaggtctgtccctgtgaatcagggcccagttctgcgtttcctattgaagtagaacgttgcttttacaattcccctttctcagttgggcaccacttagaaaacacttaagaagaatgcgtgacaaattataaaacttcttaaagccactggtattctacagactttcatcttatagccaaagacccaattaaaggatgagctgatgggtcttggcctctgagatctgctagaaggagtgattttgagatttccatctccaaagagcaaagtaagggtttttgaaatagaaaaagcagttaatcatagagtatgttcttagaggtaaggattctgttcaaaggtaagaattactttggcggacagtattttgaatacaggaatttcatgatgcaaaaagggagttcagtgcattttccaccagaatgaagaaaatcatatgcaggtggaagttttaggttcgtgttcagggttacacttcaaaatgtgttttaaaatcacatacaaggccgggggtggtggctcacgcctgtgatcccagcacttggggaggctgaggaaggggattgcttaggtccaggtgtttcagaccagcctgggcaacaaagggagtccccgtctctacaaaagaaaaaattaggcatgatggtgggtgcctgtgatcccagctatatgggaggctgaagcaggaggattgcttgaatccaagaagtcaaggctgcagtgagctatgattgtggcactgtgttccagcctgggggacagagcgagaccctgtctcaaaaaaaaaaaattggtaaaatgaagtcatagaggcaaactttattattacagttggccactggggtctcagaagaggacaccccgcctcgcctcctggcctccactgcgttcctcctctctgggccctctcaggagccctctctgggctgattccctcgcaccctctcaggagcaaggggcagagctgatgagaaggcgacagggctgggttttagccacgaggtccatttcagaatttatctgccggaaacgtgaggaaaacaggagaaggacggcccgggccgcctgattgaggcccagacaccagactcaggatggggggactccggacagcggtgctagggccccagcgaggctgtttccctgccgaccttcatttggagacgttgcttgtgacacgcaagtgtgcaccatgtgcagctgtcctgggaagcagcaaggaacgcagacgtttccaaagccgaggctgctttcttggttggccccatgggacgtgacttcctttgtgcaggatcttcgtggaaaacatctttctttcttgttcccctgtgctgctgcgcacttgcctgtaaggggtttgtgttctgattaacttccacccttttttcctaacatttacattcctattcctccagaaactattctaaaagtgtttctaggatgttgtttgggatgcagaattacgagctacaatgggggttctgttccctaggccagccaggcacgtcccagctgctcaggagggcagcgtctgtcggggcctccagtcgggattcagaagtgagcgttggtgctgagcacctgcctaaatctagttgaggaaaagactgtccggagccaggaagaaatgtgagttatacatgcagtgaaagaagggtcagagagggtgcctggaagatcatcttcagggagaagacgctgcttagggaagctgcccacttcgctctcacccttctgcggttcaaacccatccctcatcagtctctaagcccagtcaaagttgtaaacctaggaaataaaatccactgcctggcagcctcttcagagagatcttaataacagtgtcgacttggataacaaggcctcactgcttgtatgacacaggccgtggagatttagagagtaaaatttcagtgtggctataaatggtggaaccttctttgctcagatacagctcctctttctcacagcaacttcttatgtgtttgtctgtgaaatgtttcttggtattgagtgatttatgaagatctggtattcctctccaagcccagcttgcttttccttcaatagccggacagcttgatgcccaggtgcaagttacaaggactctgtaagggggtttgtctgtgcggcacagcctctctccatgaggtcacgtgagcggcctctccagggaagaggtatccgtggtcagtgtgagttaagccccacactttttccatcatggggtcgcgtgagcagcctctccaggaagaggcctcccatggtcagtgtgagttaagctctacactgtctgcaccggaggcctctggcctgcaggcttgcactgtgctgtccaactgttgagtcaaatcacaaatacggacttgtctcagttcctccctgctaccagggctcccgatggccacgccgctgtccctcccgacagccatgccgctgcatccacatgaggaactctgctcaggccgtgcacttggccgtgtccaggtggcatttaaagctcagtttggatgctctgtcctgagggatttctcccctgatccttcagtcagaccatccggattcccatctccatgtcgtcctgtctctgaaataccactgtcatagttgggtggtggttactaaacgctaagtctccaccccaacccccagcagcagtatgtaaatcacctgaggccccggctgcctgctcacggaaagtggacattgggcaggtatttgctgtatggatgtgtgggtgcggcacggaggggctgagtctgcctgtgggggtgggccggggcagccctcacttccccccgccccactgagtgaccgtccctaccgtggtacgaggatggatgtgcagtgtccctgagggcagacgccaccgtgtccgcatgatgctcagatccacgtgaagccctgaacaggcaccggagaccttccactgcctcaggtgtctatctgggctgcagttttatttttattcttgatttgggtaaatttaaatggcagatggtaacatgtaagggctaattaatgactgaaatgacagagggtaacatgtacctcagcaccatccaatcagtggaattttattatcttttcagaacttggctcccatcccagtgtttgatcctgtgactggatcacatgttctcatgagaacagctgctctggcctgagtgctgttgcttgcagtggctgccttgccctgtcgccacggagagggcttcctctgaggtcccgttgcagattctcccactgggctttgacagttgtgagggaggaggtccctgcagttggcatttgtgaattttgcactttggttacatacggaatgagaaagtttcttaagtacgtaaatgccattttgttctgtcgtctttagaagacgtggctggctggccctggcctgttcacctgggctggccgttggttgttctgattcctcgtgtcagcagaggctgtgctttcccggggcaggtgcgcagtgggtccgtattcttgttgtgccatgagagttacagtctggtgaccccaaggcagcgcttcctagacgtgctggggagggaccgcctcctcacctgggctggagggtcccggggacctgtcccgggcaggttgcctccacttagggtctcaggccatgtggcagctcacagggtaagggtgttttaaacttaaatcccagaggaggggaaacgtgggtgtccagatggcattgcctgtgacatagcgtgaatctttctagaccgcgttgctgtagtgacaggtgaatcacctgtgttccagatcagccgtgctcccgtcggcacttcacagggtaccacgcttagctgccggagacgtgttctgccacagggagctgtcagtttgatcccgtacgtttatttcctggtcttttcagcaacatttaatgaatcgcattcctcgtcttaggcgccagccgctatggagggagtgcagctgagcctacgccatgcggtgtgtctccagtggggagggtagcacccactttggaactgctcacgtgggttttgtgaaaaatccgaggtgtaagcaaagtgcagaaacgtgaaggcccggtcctgatggtgagattggcatctcatccaaggagcgtggactggagctcgggctggtagatgagaccgtcatccagtgagcatggaccagggctcaggctggcgggtgagactcatccagtgagcgtggactggggctcaggctggtggatgagtcttatccagtgagcatggaccggagctcaggctggtggatgagaccctcatccagtgagcatggaccggagctcaggctggtggatgagtcttatccagtgagcatggaccccggagctcaggctggtggatgagaccctcatccagtgagcatggaccggagctcaggctggtggatgagaccctcatccagtgagcatggaccggggctcaggctggcgggtgagactcatccagtgagtatggaccggggctcaggctggcgggtgagactcatccagtgagcgtggaccggagctcaggctggcggatgacactcatccagtgagcgtgaaccgggtctcaggctgccggatgagaaccctcatccagtgagcgtcgactggagctcaggctggcgggtgagactcatccagtgagcatggaccggggctcaggctggcgggtgagactcatccagtgagcatggaccggagctcaggctggcggatgacactcatccagtgagcgtgaaccggctctcaggctgccggatgagaaccctcatccagtgagcgtcgactggagctcaggctggcggatgagatgcagacgtcagactctcccgtccctggatcactgacaatttccagtgtatgagtccctaatcaagttaaaacattataataggaaaagggttgctaagcaaatatatactgatgtgtggcaaagatttgggctcatgaaagatggatagaaaggaggacagtgtggggacgggcgcattggctcatgcctataattccagcactttgggaggctgaggcggacaaatcatgaggtcaagagttcaagatcagcctggctaacatgttgaaaccccatctctactaaaaaatattaaaaattagccaggcatcgtgatgggtgcctgtaattccagctcctcgggacgctgaggtagaagaatcacttgaacctgggaggcagatgttgcagtgagtggagattgcgccattgctctccagcctggcaacagaacaagactccatcttaaaaaaaaaaaaaaaaaaaaaaaagcagtgtgagaattcatggggttagggcaggtgcttagaatggaatttcagtcttaccattgtatgatgttcccatcccagtgaatacaaggaaaattattaaatttcttaccagtgtttacaacagttgtcctgtttgctttctggcaaagtccttgattgcacttattttagaaagttttacgatgtgaacaagagcatgtaattgagacctggagagaatgggactggatttagaaactgctctgggacagacctgaaaatacagaaaaatccccggcagtttcactaagggcccagagcaggcttctcctgcaggacactcctgtggaggcctctgtggagcccagagcgcttgcccctgggtgctggggaaggagggcaggagagcctcttggccctcctctcctcctccctccctacccctctcttcctccccctatcttctctgggagctaaggtgagccatagagacgttgctatctgcacccccagcacgcccggacacgcgatgagtgagaataagatgggaatttggatgtatctgcacgcctggacacgcgatgagtgagaataagacgggaatttggatgtgtctacacccccagcacgcccggacacgagatgagtgagaataagacgggaacttggatgtgtctacacccctagcatgcccagacacgggatgagttgagaataagatgggaatttggatgtgtctgcagccccagcacgcccggacacgggatgagtgggaataagacaggaatttggatgtgtctacacccccagcatgcctggacactggatgagtgagaataagatgggaatttgggtgcatctgcacccccggcatgcccggacatgagatgagtgagaaaaagatgggaattggggtgtgtctgtacccccagcatgccctccccgtctgcccctcccctccccccctcccctcccctcccttcttctcccctcccctcccctcccttcttctcccctcccctcccttcttctcccctcccctcccctcccttcttctcccctcccctcccctcccttcccttcttctcccctcccctcccctcccttcccttcttctcccctcccctcccctctcctcccttcttctcccctcccttcttctcccctcccctcccctcccctcccttcttctcccctcccctcccctcttctcccctcccctcccttcttctcccctcccctcccttcttctcccctcccctcccctcccctcccttcttttcccctcccctcccttcccctctctccttttcccctcccctcccctcccctcccctcttttttcctcttctatcttctcttctactttctgttcccttccttctcttttctttccttcttttccttccttctttccctctcttttcctgtcttttctttccctctcttttccttttcttctctctcgttttcttctctctgcttccttcacttctccttttttctttctcccttctccttctctcttgttttccttctctttccttccttcccttctttctctctccttcttttcctttttcttctctctccttttctttctcgttctttctttccttctctttcttctctctcctttattctttccttttctccgctttcctcctatctattcaccacttcctgttcatctatttttcttctcttcctcccacccatccaccttcctcccacccatccaccttcctccctccccatctcccacctatgcaccttccacccatctaccttcctttcccccttcctcccctcatatctcccacccatccaccttcctccccacctcccacctcccacccatccaccttcctccccacctcccacctcccacccatccaccttcctccccctgcctccccccatccaccttcctccccatccaccttcctccccatccaccttcctccccatccaccttcctccccatccaccttcctcccctccctcccctccctccccctccctctcctctctcctatccatccaccttcctcccgtctcttccttcccttccttctctacctcctatccatccattcttttctccattcgttcctccattcttcctgtgtgtgtttccatccatttgtctattctttgctgactttgctaagcctgtttctttgaccttttccttcttcctgtgctggcctcactgccttcttttccttctgtgtaccttgtatctcctgctgtctgtgctcaagttttatttgtggtcttgctgtaattctagaggaaagtaaaaatgtcactgacgtttggatttaaatggaaatgttccagccctctgtgggagccctgagggttcagaattatttcccgagcccatcctgtggccagctccaccgagagcaaggtcacctcctgcctgcttctccaggatcccaacagatgcccctttcgggcgaccttgatagcttttccttgctccaagattcattcttggatctgaaattttagcagtttccgtgttttcttaattttcataatgggattccaaaaatgcttcttcctgttttcaaaacaagccagattttgttcttgtaacagagattgaggctctggacaccactgcaggtaccaggagaatgacagcctctgctctcaggagagggtgtggaggggcctgggagaggggcccccattgcaaatgaaaaggcagtcacgggagaatgttcagacaccgcacaagggtgacaccgggccgctcgcactcatggatcacttctgcacctgcatttccttgtcaagaaaacagcagaagtaatagtcctggcttggtgctttttgtgctgaggaatgagtgacgcatcaaatgcttaggccagggctgcagtgttagctactgctgcttctgtccagaggcaggaggctgagcctaggaaagttcacaaacttgcctaggatcccacagaatgacaggagccagacggattggggccacgaccgcaggcatgggatctcccgtccccggaggaccggatctgagctggtgcctcacgtggccaatgcatgatagctgagcaggtgctcctgggaggagaacctcatctccatctcggccgttttcttgcctcaagagaccttgctctttgttctccagactcttgagtgtgtgaaggcagccaccccatctccctggggatacctccttcccagggaccatgccggcctctctcccctgaccacgccttctgtcataaggcttctagtcttcctgtgatgctcctgagagctggttttcaatcacagttccccaaactgaacgtgactgtgaacgtgagccctcagcagcgcagagcggtatgctgcagtcatgcgtcttagtgattgttcatgtttgtgctacccagaggtatctgttccagcagccatgcttggtttccctgtgacggggacagtgggtatgcccctctgctgcccctgggccctgtgcggtcacaggctggaatccagttgagcgacgcctatttgtggcttttttcttccaggaacatatcgttaagccacttgcagcctcgtttggaatgacatcaaaggaaaatgaatgaaggaaacatgtacattcatactcgtttcttttgccgtcttattgcaacctgtagaagctagttcttctattttattcatttgttttcagacttttgttgcaaactttacatttccacttaggagatattcacgaggatggtatgcaaaagtagctttctgagatcagacatgtaaggtctgtgagaagccgagcagcagcctggaactccgtgcaccatcgtccatgggcaccaagaggaggttagggttggaggtaatcacaggaagcctgtttgagtggaccagataggtgtggtactgagattgaaggtgaaacattaaaaacgtcaggccactggatacgcttggcaacttggaagtgtgcctttatctgtttctcccaactgtgctgtcagtgactatataagtccacagcacaagagaagttagagaaatttgtggttcatcatttagcaaaatggagaaagccaagatgcagacacggcggacagccatgggtgctgtacacatggagcccagagaacggtgtccaggaagcaggcggccgcttttcctcctcctcccagccatgtgtgttatctggagaaattaaactgggaggctccagatttggggatgatactgacaacagaggctccaggttagagggtgaacatgcctgtgttggaaacaggagaggagagggctcttcgggcaaacgaaacagccccgttgaagccttccttggggagagatttggtggtgtgcccccgtgagaagaaaaacctgatttgcagcaaaaagattatcgagggagaaaagaaaggaatggatattacaacctggcttgcagctcctccagtgggaatgaataaaagattattgaaggagaagagaaaggaatgggtattacataaggattatagcatcagagtgaagtttaacttctcaccaataatggaaatgaaaggcaatgaataaaagtaattttcacccagaagtccgtatctaggcgaaagactcggtctcactggggtagaaagagaagcactttcggatgtgtggggcccccaagtgttccttctggttcttcctttctgaaacattcaaggtgctcctttagcacgggagtgtggagagacgagggggcattgaagagcatgagaacaagtgaccaacacagcagccacagccagcgggaagaaaggcgtggcccagtgacggtagcacgtttgggactggggcgggggctccaagaggacttccaggaaaattgaacagattctcaccaggttgtcagtgtttgatcgtgggcaggaaggtatgggaaagagtttttcagttctgctggagaattgtgaaaggattggcaataggtacattgtaagccaagatagtggaaaatagataaaatattaactccagaatcattgaaaagcgtaagatagaacggtatttgtagcacactgcggacgctgatgttgatgaccacagtggcgtaaggggtggtgtctaaaaaggacaattcaggaagtcatgtggtaagtccatgtttatgaatgtaagtgccaggtagctactgtttttcatgtgagacttgataatactctttgatttcctaaaatgcatctgtttgataaaaaggtaattgaagatcatttttaaaagatcagttgtagatgatgactggaagaggttggagcagcagacagttcagtcctcaggaactgatggtgatttggatgccctgaaagaaaagcacatgaaacttagcaaaatgacggtgtaggagccatgcttaacttagttctgaattcgccagcctgatacatgagacccacacacgcaccatcaaaagctgatgttcagaaaccaccagagtaaggaatatgaagtccacagactctacaactctcataagagcccatcatggaaaaccagggactaaatatttcttttgttaacttaaaacttttatttctggtttactttcaatcagatattactgatccatttctgaagaagcatctattagtgattggtgctcactcttagagcagttcttcatggaactgtggggacgacgtaggatgacgtccttcctgtggtatcagagccgttcacggagctgtggggacggcgtaggatgacgtcctttctgtggtatcagagccgttcacagaactgtggggatgacataggatgacgtccttcctgtggtatcagagccgttcacggagctgtgggggtgacgtcctttctgtgatatcagagccgttcacagaactgtggggatgacataggatgacgtcctttctgtggtatcagagccgttcacggaactgtggggatgacataggatgatgtcctttctgtggtatcagagctgttcatggaactgtggggtgatattgttcccgtggtgtcagagtagttcttcgtggaactgtgatgatgatgtccttcctttgggggcttagttttgtctagttgtgttccttgccaccctgttattgcctgaatgtaatcaatatgtgacaggtggattcacatcaatgttttgaccaataccattaaaccgtttttatctgaccgcattaatgttttttgttattcaccaagtaattgtgattcatagtcgaacataatctgttaaaacacttggcatccaatggagtaagtttccagagagtaatctggaatgagcaaagctggacgttcatggtatgtcctggttacctgaattatattgttaaattattatctaagatttattttaacaattactttaataacaaatatacttttaaattttcttaagagcttatacagctcattctgtatatttattacattaaaaggtcataacttgagtctatgtcttgggccctgttgctctaatcctgactcccaggaattcagttgccacctgtggctgagtttgtgtctctccctgcctgtcagtggacctttgtgctgtgaaagggaccgtggcggcgtctagccaggaggggtctccctggcggtgggagagcttcctcctcagtcctggccctcctgtctgtgggctctgaggcgccgccatgcccagtcccgtgggtagctctggctttgctgtggggatggagggcatgatttgttagagtctgctgactccgctgagtacagtcacacctcactctgctgtttttattgaaatccaggggtggaccaagctttgccgcaagaacgccgggctcctgtcactccttcctccgcctctcgctaccaccgccgacggtcttcagggtcacgagatgagcgctatcggtcaggtaagcacggggtggggtgatacaatacgtccatctgccacctgtgccaggacggtgcctgtgcccagccactgggcgaggcagaagtgcagtgggcgtggacctgcagcacgcgaggggcctccagctttctgcacggacacaccctctcgggagacgccagtgtccggtaaatagctcttcacgtggtttacaagcccatgttggctactattcagaattgcatattaattaaaaagattataatctcgtgccaaatttttcttttttaggtgtcactgttaaataactttttaatcgtggttgctagtatagttttttctttttcttaccatcagtgatttgttttctaggtctacttttctaaacagaaatgaaaaccatacattgttatgtgtttcctgtctttcatctgtgttttatgatgccgtctgcacagggttgtctggagactgagttgccagtgccacctgggcttggccagctgaaatttcattaatttagcaacagaaaacttaggctgtcgggcgtggtggtgggcacctgtagtcctagctactcatcaggctgaggcaggagaaatgcttgaacctgggaggcggaggttgcagtgagccgagatcacgccactgcactccagcctgggcaacagagcaaaactccatctcaaaaacaacaacaacaaaaactcaggctgtgattaatgtttgaattattctgagagagtttttccaacatgtaggttaaagttgcttctttaaaagaaaattacctgtgaattcttttgtagttcccagggcaccggtgagggtaggggcgatcgctggtgatggacccgattcgtgaatccctttgttttgcaaatgcccttcactggcatcctcacattgttctcacatggagctttcatgataagcaggtgaagtcgtgactgttgtcttctgtgtcagaagaaaaaagtgaggctaagggatgacggaactcacctggtgttcgaggaaagcctgtgagtctcggaactcacctggtggtcgaggaagcctgtgagtgtcagtcgtgctgtaatgaatctctctgtccatgcaggctcatgtgattagctgcttctgcatcctcagttgccgtctgcctggcctcctggctctgctcctctttctggagaggagattttatggcctcagagagtgtcacccatgcaaaagaggacacacctgagagcctgaatgaaaagctggtgccacctcctgggcgcccctgctgccttctccaaggaggctgtgacccaggaaaatgtgtgcggatggaatgaaggagaatttgttcccaaatccaccctctgttgtttcacacctgtcttaagccccgacacatattgagaccttctcttactcatgtgggtgtctcggaggcccctgtcgagttcaggagtgtggaggcacctgcgtactgtcagcctgtgaccaacgcttccctcactgtgtgtcagtgctgccatgcagacaccctgtctgtgaacacacaacacacccagacatgcacgcaggctgagttcacatggcttcagttctcacagaggccagtgggggtctatcttccattttatagatgaggaaactgaagttcagggaggctgtccaatggctgacgatcacacggggtcgctcctcgcaggaggatgcaagcccatctttggccggccatcttaccacacaggagatccgcgtcagtcgccactgcgtgtttcctacattctctctctctccacgatgctgcaggggtgttgataaaccctgtgtttaccttcggatcatgccatcttcacaatcccagctactccacgagataagcatggcgggttgtggttgtctcacggtcttctctcttgataaaagcctgagagaggtgggtgtagtaggagatggttatctcttggcttggggtgcgttttctgttcatccgtgcaccttacctcacctcttcaaaggcaggaaggtgtggaagagagaggcacatggcagagggggtggctgagagtggcaggatgggtggaggagaccgacacttcagctcagagtctgcaggctctgctctggaggggaagctagacccaacgtgagaagcacggttcatttctcctgtttttgtaaaattgtgaaatatggcgcctcttcacacacaatctctcccgttccccatcctgactcatgtctccatcgccattataaccacatgatactctgtctatctgcatgtctgtgtattcgttatttacctacctgtcaatcatccatccatttatcaacctctctgcatctgtctacatattcgccaatcatctacttacctatcaagcatccatttacgtccaccatccgtccatctatcaaacatttcatccatttaccccactactcagccattcttccaccatccacctccccacctctcactttcttccataagaatacgaggtccacacaggccaggatctctgttctgttcattcgtgtaggccaagcacctgaaatactgcctggcttctatattttgaaggaagatgagggagtgtgacacatttggggaacggcaagaagttaggtaggagcggctgggttatagcatcttgtgcatcacgctcgggaatttggacttgatcctgaagatgatgggatccactagaatattttaggtgaagggacagtgggggccagtcagggtttgaagatcactttagcagcagcatggagcatgggctgaaagtgggggagtccaaacaaccctgaatgcctgaaactgatgtgtacttaagagatatctgtcagggctgggtgctgtggctcatgcctgtagtcccagcactttgggaggccgaggcgggcagatcacttgagttcaggagttcaagaccagtgtggccaacatggcgaaaccccatctctatgaaaaatacaaaaattagccaggcatggtggtgcatgcctgtaatcccagctattccagaggctgaggtgggagaatctcttgaacccgggaggtggaggttgccgtgacctgagatcataccactgcactccagcctcggcgacagagtgagactgtgtctcaaaaaaaaaaaaaaaaaaatcagtaccagtgagatttgagaaatgctcaaaagataatagcaataggacctgaaggttgggttaatatggaggaacatgagaggaaatcagggtgaccttgatgtcctagttatgcacctgcacagaggatagtctccgattctgcacccagagtgactccgagatgtccagcttatgcacctgcacagataatggtctccaattctgctcccagggtgaatccgagatgtcctagttatgcacctgcacagatgatggtctccaattctgcacccagggtgacaccaaggtgtcagctcatgcacctgcacagatgatggtctccaattccacagctccttctctttagggaatcaagcttactgtgtataggttacaggtggtagaatttgccttactgtgtagaagatactatgaacgattaggaagacagtccttgaagtgtcatttatttgagatataatggaaagcactattactccatggatgccgttgtagtttttaaaagttgggtactcatctttttttgtttgtttttgagatggagtttcactcttgttgcccaggctggagtgcaatggtgtgatctctgtggtgtgacacaggtcacgccacaaactctgcctcgtgggttcaagcgattctcctgcctcggcctctcaagtagctgggattacaggcatgcgccaccatgccttgctaattttgtatttttagtagaaacagggtttctccatgttggtcaggctggtctagaactcccgacctcaagtgatccacctgccttggcctcccaacgtgctgggattacaggtgtgagccactgcacctggtctcatctttgttttaatcaataatgactgattggcatatggagcgcaccccatgacctttgcattgcctgtgaagtctcaggtggggttctcattttctgtagccaacacagagcaactcccctttatgtgtcatggcagccacccttcaggaaagcaggaggggcatggggtcattactgggtttccttattctttgctgtttcttgctgttacaggaatctagttgtgagttctctaaatttagatatactataatttacttagagtatatgctcacgtggttttaacaataaggtgtgagataagaggagcttatgttagtttattaccaatagacagatttcacaattttctgtctgcttttttctttctcctgaaccgaccgcgaagactggaatcattcacaaggaaagggctgtggcttctagggagacttggcagctcgaggtctgtgaccactcatcttgcagtagagctactgtggttgccccagggactgaattttttaatttatatatattttttattatactttaagttctggagtacatgtgcagaacatgcaggtttgttacatacgtatacatgtgccatggtgctttgctgcacccatcaacccatcacctacattaggtatttctcctaatgctatccctcctgtagtcctccagcacccaacaggccctagtgtgtgatgttcccctccctgtgtccatgtgttctcattgttcaactcccatttatgagtgagaacaagtggtgtttagttttctgttctggtgttagttgactgagaatgatggcttccagcttcatccatgtccctgcaaaggacatgaatttacccgttttttatggctgcatactattccatggtatatatatgccacattttcttttttttttttttttacacttaaataatttttattttatttattttttttttatactttaagttttagggtacatgtgcacattgtgcaggttagttacatatgtatacatatgccatgctggtgcgctgcacccactaactcgtcatctagcattaggtatatctcccaatgctatccctcccacctccccccaccccaccacagtccccagagtgtgatattccccttcctgtgtccatgtgatctcattgttcaattcccacctatgagtgagaatatgtggtgtttggtttttcgtttttgcgatagtttactgagaatgatggtgtccaatttcatccatgtccctacaaaggacatgaactcatcattttatggctgcatagtattccatggtgtatatgtgccacattttcttaatccagtctatcattgttggacatttgggttggttctaagtctttgctattgtgagtaatgccgcaataaacatacgtgtgcatgtgtctttatagcagcatgatttatagtcatttgggtatatacccagtaatgggatggctgggtcaaatggtatttctagttctagatccctgaggaatcgccacactgacttccacaatggttgaactagttgacagtcccaccaacagtgtaaaagtgttcctatttctccacatcctctccagcacctgttgtttcctgactttttaatgattgccattctaactggtgtgcgatgatatctcatagtggttttgatttgcatttctctgacggccagtgatgatgagcattttttcatgtgttttttggctgcataaatgtcttttgagaagtgtctgttcatgtcctttgcccactttttgatggggttgtttttttcttgtaaatttgtttgagttcattgtagattctggatattagccctttgtcagatgagtaggttgtgaaaattttctcccatgttataggttgcttgttcactctgatggtagtttcttttgctgtgcagaagctctttagtttaatcagatcccatttgtcaattttgtcttttgttgccattgcttttggtgttttggacatgaagtccttgcccacgcctatgtcctgaatggtaatgcctaggttttcttctagggtttttatggttttaggtctaacgtttaagtctttaatccatcttgaattgatttttgtataaggtgtaaggaagggatccagtttcagctttctacatatggctagccagttttcccagcaccatttattaaatagggaatcctttccccattgcttgtttttctcaggtttgtcaaagatcagatagttgtaggtatgtggcattatttctgcaggctctgttctgttccattgatctatatctctgttttggtaccagtaccatgctgttttggttactgtagctttgtagtaaagtttgaagtcaggtagtgtgatgcctccagctttgttcttttggcttaggattgacttggtgatgcgggctcttttttggttccatatgaactttaaagtagttttttccaattctgtgaagaaagtcattggtagcttgatggggatgtcattgaatctgtaaatcaccttgggcagtatggccattttcacgatattgattcttcctacccaagagcatggaatgttcttccatttgtttgtatcctcttttatttccttgagcagtggtttgtagttctccttgaagaggtccttcacatcccttgtaagttggattcctaggtattttattctctttgaagcaattgtgaatgggagttcactcatgatttggctctctgtttgtctgctgttggtgtataagaatgcttgtgatttttgtacattgattttgtatcctgagactttgctgaagttgcttatcagcttaaggagattttgggctgagacaatggggttttctagataaacaatcatgttgtctgcaaacagggacaatttgacttcctcttttcctaattgaataccctttgtttccttctcctgcctgattgccctggccagaacttccaacactatgttgaataggagtggtgagagagggcatccctgtgtcgtgccagttttcaaagggaatgcttccagtttatgcccattcagtatgatattggctgtgggtttgtcatagatagctcttattattttgaaatatgtcccatcaatacctaatttattgagagtttttagcatgaagggttgttgaattttgtcaaaggctttttctgcatctattgagataatcatgtggtttttgtctttggctctgtttatatgctggattacatttattgatttgagtatattgaaccagccttgcatcccagggatgaagcccacttgatcatggtggataagctttttgatgtgctgctggattcggtttgccagtattttattgaggatttttgcatcaatgttcatcaaggatattggtctaaaattctcttttttggttgtgtctctgcctggctttggtatcagaatgatgctggcctcataaaatgagttagggaggattccctctttttctattgattggaatagtttgagaaggaatggtaccagttcctccttgtacctctggtagaattcggctgtgaatccatctggtcctggactctttttggttggtaaactattgattattgccacaatttcagatcctgttattggtctattcagagattcaacttcttcctggtttagtcttgggagagagtatgtgtcgaggaatgtatccatttcttctagattttctagtttagccacattttctttatccagtctatcattgatgggcatttgggttggatccgagtttttgctattgtgaacagtgctgcaataaacatacgtttgtatgtgtctttatagtatcatgatttataatcctttgggtgtatacccagtaatgggattgcttgatcaaatggtatttctggttctagatccttgaggaatcaccacactcttccacaatggttgaactaatttacacttccctcagtggtgtttcttcacatcctctccagcatctgttgttgcctgactttttaatgataaccattctaactggcgtggaatggtatctcattgtggttttgatttgcatttttctaatgaccagtgatgatgagcttttttttttttctaagtttgttggccacataaatgtcttcttttgagaagtgtctgttcataacctttgtccacttcttgatggggttgttttttcttgtaaatttgtttaagttctttgtagatgctggatattagccctttgtcagatggatggattgcaaaaattttctcccattctgtaggttgcctgttcactctgatggtagtttattttgctgtgcagaagcactttagtttaattagatgccatttgtcaattttggcttttgttgctattgcttttggtgttttagtattgaagtctttggccatgtctatgtactgaatggttttgcctaggttttcttgtagagtttttatggttttacgtcttacgtttaagtttttaaaccaatttgagttaatttttgtataaggtgtacagaaggggtccagtttcagttttctgcttatggctagcctgtttccccaacaccatttattaaatagggaataatttccccattgcttgctttttgtcaggtttgtcaaagatcagatggttgtagatgtgtggtgttcttttctgaggcctctgttctgttcccttggtctatatctctattttggtaccagtaccatgctgttttggttactgtagccttgtctatagtttgaagtcaggtagtgtgatgcctccagctttgttctttttgcttaggattgtcttggctatgtgggctctgttttttggttccatatgaaatttaaagtagttttttccaattctgtgaagaaagtcaatggtagctcgatggggatagcattgaatttataaattactttgggcaatatggccattttcatgatattcttcctatccatgagcatggaatgattttccatttgtttgtgtcttctcttctttccttgagcagtggtttatagttctccttgaagaggtccttcacatcccttgtaagttgtattcctaggtattttattctctttgtagcaattgtgaatgggagttcatgatttggccccctgttggtctattattggggtataagaatgcttgtgatttttgcacattgattttgtatcctgagactttgctgaagttgcttatcagcttaaggagattttgggctgagatgatggggttttctaaataacaatcatgtcatctgtaaacagaaacaatttgactttctctcttcctatttgaataccctttctttctttctcttgcctgattgtggctagaacttccaatactatgttgagagagggcatccttgtcttgtgccagttttcaaagtaatgcttccagtttttgcccattcagtatgatattggctgttggtttgtcataaatagctcttattattttgagatgtgttccatcaatatctagtttattgagagtttttagcatgaagggatgctgaattttatcaaaggccttttctgcatctattgggataatcatgtggtttttgtcattagttctgttgatgtgatggattacatttattgatttgcatatattgaaccagccttgcatcccagggatgaagcctatttgatcatggtggatcggctttctgctggattcagtttgccagcattttattgaggattttcacattgatgttcatcagggatatcggcctgacattttctttttttgttgtgtgtctgccaggttttggtatcaggatgatggtggcctcataaaatgagttagggaggagcccctcttttctattgttttggaatagtttcagaaggaatgctaccagctcctctttgtacctctggtaagagttggctgtgaattcgtctggtcctggactttttttggttggtaggctattaattcctgcctcaatttcagaacttgttattggtctattcagggattcagcttctacctggtttagtcttgagagggtgtatgtgtcctggaatttatccatttcttctagattttctagtttatttgcatagagatgtttacagtattctctggtagtttgtatttctgtgggatcagtggtgatatcccctttatcatttcttattgtgtctatttgattcttctctcttttcttctttgtctggctagtggtctatctattttgttgatcttttccaaaaaccagctcctggattcattgatttttttgaagagtttttcgtgtctctgtctccttcatttctgctctgatcttagttatttcttgtcttctgctagcttttgaatttgtttgctctttcttctctagttcttttaattatgatgttagggtatcgattttagatctttcctgctttttcttgtgggcatttagtgctataaatttccctctacacacctctttatctgtgtcccagagattctggtacattgtcttttgttctcattggtttcaaagaacttatttatttctgccttaatttcattatttacccagtagtcattcaggagcaggttgttcagtttccatgtatttgtgcagttttgagtgagtttcttaactgtgagttctaatttgattgcactgtagtctgagagactgtttgttatgatttccatccttttgcatttgttgagtgttttacttccaattatgtggtcagttttagaataggtgcaatttggtgctgagaagaaggtatatcctattgatttggggtggagagttttgtagatgtctattaggtccgcttggcccagagctgagttcaagtcctgaatatccttgttaattttctgtctcaatctgtctaatactgacgttggggtgttaaagcctcccactgttactgtgtgggagtctaagtctcttggtaggtatctaagaacttgctttatgaatctgggtgctcctgtattgggtatgtatatatttaggatagttggcccttcttgttgtattgatccctttgccattgtgtaatgcccttctttgtcttttttgatctttgttggtttaaagtatgttttatcagagaccaggattgcaactcatgctttttttgctttgtaaatattcctccatcctttattttgagcctatgtgtgtctttgcacatgagataggtctcctgaatacagcacaccaacgggtcttgactctatccagtttgccagtctgtgtcttttaatgggggcatttagcccatttacatttaaggttaatattgttatgtgtgaattcgatcctgtcattatgatgctagctggttattttgcccattagttgatgcagtttcttcacagtgtcagtggtctttacaatttgttatgtttttgcagtggctggtaccagtttttcgtctccatatttagtgcttccttcaggagctcttgtaaggcagacctggtggtgacagaatctctcagcatctgcttgtctgtaaatgattatatttctccttcacttacaaagcttagtttggctggataggaaattctgggttgaaaattctttaagaatgttgaatattggcccccactctcttctggcatgtcgggtttctgcagagagatccgctgttagtctgatgagcttccctttgtgggtaaccctacctttctctctggctgcccttaacattttttccttcattttaatcttggtgaatctgacaattatgtgtcttggggttgcttttctcaaggagtatcttcgtgatattctctgtatttctcaatttgaatgtgggcctgtcttggttggttggggaagttctcctggataatatcctgaagagtgttttccaacttgttccattctccccatcaatgactgaattttagcagcccagaaataattttgttattgcttacataattgacctagttaataattaatctactcagccatttaacctctactggatgtattttctcatttcatttctaaacccatgaccttactttgtaatgaattcttatgaaagctcttcatcatagtacatatcttctctttataaatagctttcttttggaacttgagcttgatttgggaagtaagtgaatgagctggcatttattgagcacctagaatgtattggagtcgattttaagcacttcattacctttacttgataaactctcagttagagcttagattctagctttagttatcacctttttttccccaaccaacaactctggaaaagaaaacctggagacttgtgttgtgcccattccacccaagactgggagaggaagatcctagagctcatgtgcagcatgccgttccctgatgtgactgtgagaggaagatcctagagcccacgtgcagcacgcgatcccttgatgtgactgtgggaggaagatactagagctcatgtgcagcacgcggttccctgatgtggctgtgggaagatactagagctcacgtgcagcaggtggttccctgatgtgactgtgggaaggtcctagagctcacgtgcagcaggtggttggttccctgatgtgactgggaaggtcctagagctcacgtgcagcaggtggttccctgatgtgactgtgagaggaagatcctagagcctacgtgcagcacgcagttccctgatgtggctgtgggaaggtcctagagctcacgtgcagcaggtggttccctgatgtgactgggaggaagatcccagagcccacgtgcagcacgccgttccctgatgtgattgtgggaagatcctagagcccacgtgcagcacgccgttccctgatgtgactgggaggaagaccctagagcccagatgaaggacactgttccctgatgtggctgtggaagatcctagagcccacgtgcagcatgtggttccctgatgtgactgagaggaagatactagaacccatgtgcagcaggccattctgtgatgtgggtggagctactgctgtgtcttttgatgaactaagaacttccatgtgtgagcatgcatggcttgggctgccctctcagggatcagcatctgacttcagccttgcccctcctttgcagtagaatgtcccggtcccgtgtcctctgggacagcaagcttccaacagagcccagggaccctcaggggttcgagaccctcccagggatgtctgcagtgttgtgctttccagaatgacacggccatgtctcctgttgactctttgtctcctgagtgcacagtgggtttttccaaggctggctgtctgtttgggggtgggggagggttctgagagccagtggattctgtgactgtgacatcttgttttttaaaaagttttgatttactttctaatgccacaaatatcaaaatattagccccactggcaaaagctttttaaggttttcaacagtctttaaagtgctctttgggtcaaagagtttgagaactattgttagatttttaaagcttttttttttttttttttgaaaaagttgagaggtaaactggaaacttgtgcttctgaacccatccttgaggcggattttatgctgaggatagtttagtgtcagttttggaaatagacttgtgttctagtattctttcagcaaatgtgcaggtgattctgggttccgagcactctgctgtgccctgccggtgagtcaggaatgtagagggcatcctccttgccgtcacggggtgccgagcactctgccatgtgctgccggtgaggcaggaatgtagaggatatcctccttgctgtcatgggttccgagcactctgccatgcgctgctggtgaggcaggaatgtagaggacatcctccttgctgtcacggggttccgagcactctgctgtgtgctgccagtgaggcaggaatgtagaggacatcctccttgccgtcacgggttctgagcactccgtcacacgctgccggtgacgcaggaatgtagagggcatccttgccgtcacaggttccaagcactctgtcacgcgctgccggtgaggcaggaatgtagagggcatcctccttgctgtcacggggtcatctgccatcatgggggtcaccgtataagttcctcctctatgccgaagtttaattttctagactgagaaggtttatctttcctgagtcagtctggatttactgattttgatgaggttcctgtcctgtgacctgtgttctctctgaacaactcaattttctcattgattccaatacacatagtgttacttccttatttacatcagaatgatgctaggagagaaggcggcctacagtgcggccaagtaggactgtgtagccactgtgatgtccccagaggaggtgacaggctctgtctggtgggagctgccctgtccagtatgagggcagtagccttgtggggccttttacatttaaatgtgttaagatgatatataaaatcatcctcctgcttcatcactgcactttcgggcgggtggctgggcggctctcatgctggatggtgtgggtgggactgttgccagacctgcagacagtccccatcacgtgctgctctggggccgcagctgtgggaggagaggccacaggcacagctgaggacgcagcataaagatgtcccacactacagaaagtgacttttggccaggtgcagtggctcacgcctgtaatgccagcactttgggaggccgaggtggaggagagcttgaagacaggagttcgagaccagcctgggtgacaaagtcagagcccatctctacaaacgatgaaagactagccgggtgtggtggccacacacctgtggtcccagctacccagggggctgaggtggaaggatcacttcaacctaggagctggaggctgcagtgagctgttgtcacatcactgcaccccactctgggtgacagagtgagaccctgcctctaaaaagaaaaaaaagaatttaatcttgctatctgtgcctcgtcatttctaaagagggaattttggacatatcaatgtagcagaaatatataggatagattggtttcattggattgggttcctgactgaaggcagaaacaggttagggggctgttgtatttcaggtgaaaaatgatgaatcaaaatttgtgagatgctgtggaaatggtacttgaatttatagactaaaatctttatattaagtcagaagacatcttggaaactgaagaaataagcatttatcttaacatgttagaaaaaattaagtccacagaagggagaagtgagacaataataaaaagaataaaataaaataggagatgcatagacttgtagcttccagtccagcacctaaggagcttggaagtcatcacgcttgtcctcttgagcaaaaagctgtacaaaccgaaaataagcaactcctcctagatctgtcaaagaattgagattataacctcaaaccattgtgccgtaattggaggtggatatgtgagcagagagatggaaaatctaggaatcaaaaggcaatgctagaaataaacactgtaagagaaatgaagtatgtttttgctgggcccatcaatagcctggacatggcaggtcagagaatccagtccacatgaagaaaagacttagagaaggaatgagtgaggataaaataaaatcttcttgccttcactctgtcttgaccattttgcacaactctccacacctctgcttttgtgtgcagtttaccaaagaacgaaacggtggaacaaaaatcgtcgtggaagggaacacagatggccctatgtagtggagacaaaagggagggaacacagatggccctgtgtagtggagacaaacggtggccgtggacaggtggaattccatgcagcctgtctcgtctggcctcttgcacagttttggcttctcccaggcttggctttcttctctgtcctctttccagacttgggtcacactaaccaggaggagcatcttaagctcttgcacttgcagagtgttttaatcaccaggaggcagctccgctgtgagtgctttgattcagtcactcatttactcctcacagtctcccctcaggcagggactcactgcagagtgttttcatctcatttactcctcacagcctcccctcaggcagggactcactgcagagtgttctcatctcatttactcctcacggcctcccctcaggcagggactcactgcagagtgttttcatctcatttactcctcatggcctcccctcaggcagggactcactgcagagtgttttcatctcatttactcctcacggcctcccctcaggcagggactcactgcagagtgttttcatctcatttactcctcacagtctcccctcaggcagggactcactgcagagtgttttcatctcatttactcctcacggcctcccctcaggcagggactcactgcagagtgttttcatctcatttattcctcacagtctcccctcaggcagggactcactgcagagtgttttcatctcatttattcctcacagtctcccctcaggcagggactcactgcagagtgttttcatctcatttgctcctcacggcctcccctcaggcagggactcactgcagagtgttttcatctcatttactcctcacggcctcccctcaggcagggactcactgcagagtgttttcatctcatttactcctcacggcctcccctcaggcagggactcactgcagagtgttttcatctcatttactcctcacggcctcccctcaggcagggactcactgcagagtgttttcatctcatttattcctcacggtctcccctcaggcagggactcactgcagagtgttttcatctcatttattcctcacggtctcccctcaggcagggactcactgcagagtgttttcatctcatttgctcctcacggcctcccctcaggcagggactcactgcagagtgttttcatctcatttgctcctcacggcctcccctcaggcagggactcactgcagagtgttttcatctcatttgctcctcacggtctcccctcaggcagggactcactgcagagtgttttcatctcatttactcctcacggtctcccctcaggcagggactcactgcagagtgttttcatctcatttactcctcacggtctcccctcaggcagggactcactgcagtgttttcatctcatttattcctcacggtctcccctcaggcagggactcactgcagagtgttttcatctcatttactcctcatgggccactcctcaggcagggactcactgttcctgatttgcacccagggaaatgggggtgcaaataggttaagcaacttgcccaaggtcacagaggagctggggtttgaaccggtgcggcctggctcccgaacctacgtcttcctgctctgctgctgtgaagccacgtatctaccttggaggaacattctcttctgttgactcatggttgtctttgccattggacagcagccccaggctgtgtgtgtgctcactgtgtaatgctgtgagcttggtgcaaatggcaggagctctaggaaatggattgtgatttatgacttcaaaagatggaagtgaagggtatgggtttttctaaagatttaaagctgtggatatacatagtaatctagaatactagtaacagcaataatgacttcaagcataaagggcgcatttgtatactacctctttctctgagggttccaggggtgctcatgtttttatcccccgaatatctcattgcaataatgacatcgagcatagagggtgcgtttgtatactacctctttctctgaggggtgctgatgtttttatccctgagtatctcattgcaataatgacatcaagcatagatggtgcatttgtatactacctctttctctgaggggttcgaagggtgctgatgtttttatccccgaatatctcattgcaataatgacatcaagcatagatggtgcatttgtatactacctctttctctgaggggtttgataggtgctgatgcttttatccctgaatatctcattgcaataatgacatcaagcatacagggtgcatttgtatactacctctttctctgaggggtttgaggggtgctgacatttttatcccctttttagtactttatccctttttagtatttttagtattttatccctttttagtactttaagaaacgctgttaaatgtattttagttaaccaatttatctaacactataaatgtaagtagtaccaacaaactcttcactagcaatagtgatttattcaatgctgcatgaagctgatcctgaataagcccttctcttaatagatgggtgcttctgggttcttagagtgaaaggcctaaagggaatgaactgttagcagccacagcagaaaaaacgagaaagatctgcctcttttggagtcaccaaatgcacctctatcaatttattgcctctcagctccaaattcaccctttattgccttcttcagaaaccatggatctgagtcctgcaaattctgttgagttgtgtttgtgaagtgtgacagaggcatgtgaggacagtggtttcacttcttagtctcagggctgtgcacagaggctctagcaggtcctgctgctgctggggtctctggcctctgtgttgcatggcagccagcagctcacccccagctccgacagctttgtaggagcttctccagcaatatccctccctgcctgagatggctgcaggcagcgtggtctccttggagcccctgtgctgtgtttgccctgacagccctgagtccagctgtacctgttacattccctcattcctttctcattcagtatttatgcatctgcttcttttctctttgctttgataacacgttaatgctgctttaggatcccaaactagaatcatcttccatttacgtgaaattttaagccgtcacttcctagcctctccctaagtggaagtatccttgaccactttcagtgctcttcctcaaagatacttaaaaatactagacaatcactgccctctgtcctgactgctgagcctccagattattttctcctatcgttttaagcatttgtatttcaggcatttgctggagtctttgacactgtatgtccagcatgaccagcaaatcttgttactctcgtgatgtttgcacacatgtctgttgactccgctgcaatcctgcctggtaccttcacccgagagatttctgtttctcattgtttccattccacggcctctcatctggtgtctcattcatgtggccgggtaaaactgtattcagggcatttgtaattaaggctttggaggacgcttgatcagatgctgtaatggatttctgatgctgcacagctgctagatttcatttatcagctcattttatgaaaaggatattgtgttttcaagggaatatttgttttgtagcaacctgtttacccatgttatattttcctaaaagttcttcatcttatgagctcttctcacagtgatctgggttttatgcagagctctgtaaacgtctttgttctcagctcataccctttccagcactgtgtgttaatccaacactgcccccttcctcgcactggggcctcagactggccaggcctcccggtgatccgctggcgttggctctcaagggagatgggtccatcctgccccgtgccctgtggtcaagtctatccctcttctctcgcctcacctgtgggatttgggccactggccagtggacatgcggccttttaagctggatgtcataagagacctcctcagtagcggtgtgtggtgttttctctgcaggagggcaccagcagagccacccggctgtgctgaggacccaggaggagcagcgagaggaaccagggggccatcgtggcttggttgcttcgcttccctctaggtgtcacgttgtgaaaggtctttcgacaaagcgctgtccatttaatcgctattgtagatgttagtggccggatgctcctttctggcttggatattttgagttggactgggattattaaacacagcaacaacttagcacatggaggtagattctgactcactttagtcactcataattacactgcgtgcttcagaagctgctcttcacccctgggcaggttgtcctttttccacgtgtttgccgtgttttgatgatggggttagtgcgcgctctaagggtctgcactgagaagaccccttagcgctatcccgttatcattatttgccttaacattgttccatgtagagtctgacggaatcttcagggtgctgtttatggatgttttgaagtgtcactgtgccactgatttccggttaaagcagaatgtagacatctttttgcaattgtttttagtgactccactggtttgtgttgctgtcttctgctgtgcagtccacagtctgacatctttgtggtccccatgcttccctcctgctcgtgttacccgatcctgtgggtcagctgtgaggaaaccactctctgtcctcgtctggagtcgccccgagctgggtgtgctggtctccttgtgtcgccctgagctgggtgtgctggtctccttgtgggcagaagtattcttctgttactgttttctcagttttttgaccaaatgtagcagacttgtgtatggtgcaaacatttcttaaaatgtcttttgcctttatggaaaaaaacccgcatttcttcaagatgtacctttcctgtgtctccatccttccccacatgattgctttgtgttagagggtggtgtgtgtgctctatggcctcattccatcaagcactatatgtaacctctgatggcaaaagtggttacactcaaggcagaaaacttcgcaaatgttgaagagaatgaacaaaaaacaatacgttgtcatcttgtcatcctgaaatggctactgttaatattttgatgtagttctttcaattctttttaagtaaaattgcttctaacacaagcactttaattacattgattaaattatagtcaggaaataaggagaaagtaaaaagaatatccagtttggggcaaaaagaaagaccacatagaaagaggctgtaaaactccctacaacttgaagaaaagctgggttgcggtggttgtggttttgtttttactgcgagagaccacatgattattctgggcactgaagggcgataggataataccctgtgagtgttttggtggccgagtaaatcccagtcccacgtcctctttccaagtagacaaagtgttgaggtttgaggtggtggtttggtaactttttgaaaatctgtttgtaggactgcactgcagagattaggttaacctgacttagaatcgaatgatctgttcaggctgtgggagctttctataccaggtgtacgtacgcctgttccggatgtggtgtagaaggaacagggctgggagggtttgttgcttcaccagtcaccgcccacaggcaggggctggggagcacagcccggtgctgcagagatgggctttgagactccctccctggccctgaggaactcacaggctgaatttagacgatgccgttattgaggcatagacagtatattttatacccacacatatggacatatacatacatgtacgcacatacagacctgtacatgtctgtgtgtgtgtaagtgacagaaccaacctggcttttgtgctatttccttcgtctttttagttgcctcagttgaaacaagatgtgttccttgttggaggtgagtggtttcattgttccagaccagtcatggaaatgcctgcaattatcagtgtttctgttttctcttgggaagctcttctgggaaggaagtgtactttccaaggctgttggttggcctgtcgtcaccctgggggtcttggtgtgggtcacagacccaggtgctgtggctgctcatgcgtggagctctgtctctcttgctgctgctagtagacagctgatcaccaacaaagtgtgtgtcccagtggcctttcagaagaattctctgcatcatttttatacagtcttttttattttcaatgtcaacattgtgtgttgcagccaagtgatatgttctgcagaagcaggaagtgtggcccaagagagaaataagggaattgatccataactgataccagcttttatacagttgagccattgtaattgatacgtaaacatcttaaatctgtagaagtgagtcaaggtgccagatcctgacaagtgccaaatgtctacgtgggacctctcttgtgtcgggtccacatcacaagaagaaaagtcattcaaatgcaacacgggaccattgtaatttatacataaacatgttaaatctgtggaagtgagccacggtgccagaccctgacaaatgccgaatgtctacgtgggacctctcttgtgtcgggtccacatcacaaggagaaaagtcattcaaatgcaacatggagtggacgtgaagctttcagaaacgtccgtgaatcagagcgactgttttcccatttgctggattccccattcgagatggtgagattcctgttccaaggctccctcaatttcccagcacccatttcactccttcctggagataacaatctcacaatgatatcttgttctcagattttcttttttttttttttttgttgttgttgactgaaacatctttatttggcacatgactgtagttgtgtgtgtgtatgtgtttttattaatagtttattaatattttcttcatggaattaggtaactgaatgtgtttacttcttttttttttttttttaattatactttaagttttagggtacatgtgcacattgtgcaggttagttacatatgtatacatgtgccatgctggtgcgctgcacccaccaacgtgtcatctatcattaggtatatctcccactgctatccctcccccctcccccgaccccaccacagtccccagagtgtgatattccccttcctgtagaaaaatcacatatttcacaagaataggctgccttactcactccttagcctggagtaagccacataccacttttctctttaagatactcacttttcaggactcttgataaattatttaagagtaggaaagtaccgtgactttggccacaagcagtattatgtataatatgcaagtgtgtgccttgatagccgcagtcactaaaaacaaattttctcagaagagaaaattgtaagcatttctttacttgatcgttaattttgtttgcctaaataacatcttgcctttgtatggggaggtggagaagtcgacttttgttacacaagatgagcttgaaagtcccttaagtggtaaaggatgccgctgagtatcgacgggggtgagtgggtcttgctgccccactgtatgtgatcctgagtattgacaggggtgagtgggtcctgctgccccagtgtatatgatcctgagtatcaacagggatgagtgggtcctgctgccgcactgtgtgtgatcctgagtatcgacgggagtgagcaggtcctgctgccccactgtgtgtgatcctgagtatagatgaggatgagtgggtccttctgccccactgtgtgtgatcctgagtatcgacgggagtgagcaggtcctgctgccccactgtgtgtgatcctgagtatagatgaggatgagtgggtccttctgccccactgtgtgtgatcctgagtatcgacgggagtgagcaggtcctgctgccccactgtgtgtgatcctgagtatagatgaggatgagtgggtcctgctgccccactgtgtgtgatcctgagtatcgacaggggtgagtgggtcctgctgccccactgtgtgtgatcatgagtattgatgggagtgagcgggtcctgctgccccactgtgtgtgatcctgaatatcgacaggggtgagtgggtcctgcttgccccactgtgtgtgatcctgagtatcgacgggagtgagtgggtcctgcttgccccactgtgtgtgatcctgagtatcaacgggagtgagcgggtcctgctgccccactgtgtgtgatcctgagtatcaacgggagtgagcgggtcctgctgccccactgtgtgtgatcctgagtatagacggggatgagtgggtcctgctgccccactgtgagtgatcctgattatcgacaggggtgagtgggtcctgctgccccactgcgtgtgatcctgagtatcgacgggagtgagtgggtcctgctgccccactgtgtgtgatcctgaatatcaatggggtgagtgggtcctgctgacccactgtgtgtgatcctgagtatagacagggatgagtgggtcctgctgccccactgtgtgtgatcctgattattgacgggaatgagtgggtcctgctgccgcactgtgtgtgatcctgagtatcgacgggagtgagcgggtcctgctgccccactgtgtgtgatcctgagtatagatggggatgagtgggtcctgctgccccactgtgtgtgatcctgagtatagacggggatgagtgggtcctgctgccctactgtgtgtgatcctgagcatcagtgggagtgagcgggtcctgctgccccactgtgtgtgatcctgaatatcaacgggggtgattgggtcctgctgccccactgtgtgtgatcctgagtatagacagggatgagtgggtcctgctgccccactgtgtgtgatcctgattattaatgggaatgagtgggtcctgctgccgcactgtgtgtgatcctgagtatcgacgggagtgagcgggtcctgctgccccactgtgtgtgatcctgagtatagacggggatgagtgggtcctgctgccctactgtgtgtgatcctgagcatcagtgggagtgagcgggtcctgctgccccactgtgtgtgatcctgaatatcaatgggggtgattgggtcctgctgccccactgtgtgtgatcctgagtatagacagggatgagtgggtcctgctgccccactgtgtgtgatcctgattatcgacgggtgagtgggtcctgctgccccactgcatgtgatcctgagtattgatgggagtgagcgggtcctgctgccccactgtgtgtgatcctgagtatcgatgggagtgagcgggtcctgctgccccactgtgtgtgatcctgagtatagatggggatgagtgggtcctgctgccccactgtgtgtgatcctgagtatcgacaggggtgagtgggtcctgctgccccactgtgtgtgatcctgaatatcgacaggggtgagtgggtcctgctgccccactgtgtgtgatcctgaatatcgacgggggtgattgggtcctactgccccactgtgtgtgatcctgagtatagatggggatgagtgggtcctgctgctccactgtgtgtgatcctgagtatcgacaggggtgagtgggtcctgctgccccactgtgtgtgacaagccctttgtttctggcctgggaatgtcccagctctgtcagcatgttgggctggtgctggctcccttgttagtttgcatgcgagacaaaaatctcacacttttcactcttcttgacatatagatgccgaagctttttacaaattattactacatcaaacccaaaatatgtaaaagggatatgaatatcacaaccagttgagtttgttctcttgatgtggtgtagttttgcctggcacacttggctcatcattcaaaaatcaatgtaattcactacattgacaaaaaataaaggagaaaacccattttatcatctcagaagatgctgaaaaacatctgttgaaatttaatagtcgttatacgaatttcctgtcacatcaggaacagaagggatctttctctgtttgataagggcccttcctgaaaaatgagagctgatgcccctcctccatggtggcagccggggcgctctgcccacagttgggtgtcaggggatcatggccattctccgtggttcaggtctgcatggcactcactggggccctcgtcaatgaagtgagtcaggagaactaaaaggcacagacttggaaggcatgagacacttgatttaccgaagacacagggccttatttagaaaattttaggaaatctagaagcaaccagaaatggtgtgaattttgcaagcatgcaagatacactcttcacaacagatgtatacagatgcccagtggaccatgggactcttcacaacagaggtatacagatgcccagtggaccatgagactcttcacaacagttgtataccgatgtccagtggaagatagactcttcgcaacagatgtatatagatgcccagtggaccgtgagactcttcatgacaggtgtatacagatgcccagtggactgtgagacttttcacaacagatgtatacagatgcccagtgcaagatagactctttgcaacagatgtatatagatgcctagtgaacggtgagactcttcacaacagatgtatacagttgcccagtggaccatgagactctttgcaacagacgtatacagatgcccagtgggcctgtgagactcttcacaacagatgtatacagatgtccagtgcaagatagactcttcacgactgatgtatacagatgcccagtggaccgtgagactcttcacaacagatgtatacagacgcccagtgggcctgtgagacttcacaacagatgtatacagatggccagtgcaagatagactcttctcaatagatgtatacagatggccagtgcaagatagactcttcacagcagatgtatacagatgcccagtggaccgtgagactcttcacaacagatgtatagagatgcccagtggtcctgtgagactcttcacaacaggtgtatacagatgctcagtggactgtgagactcttcacaacagatgtatacagatgtccagtgcaagatggactcttcacaacagatgtatacagatgcccagtgcaagatagactcttcgcaacagttgtatacagatgcccagtagaccatgagactcttcacaacagatgtatacagatgcccagtggactgtgagactcttcgcaacagatgtatacagatgcccagtgcaagatagactcttcacaacagttgtatacagatgtccagtgggcctgtgagactcttcacaacagatatatacagatgtccagtgcaagatatactctttgcaaccaatatatacagatgcccagtgggcctgtgagactcttcacaacagatgtatacagatgtccagtgcaagacagactcttcacaacagatgtatacagatgtccagtgcaagatagactcttcacaacagttgtatacagatgccccatgggccatgagactcttcacaacagttgtatacagatgcccagtgcaagatagactcttcacaacagatgtatacagatgcccagtggtcccatgaaaggcgctcaccaggggtcatttggtaagtacaacttaaacccatgaggttccacttcacaagagtggaggaggaggatggtagcaggtgctagtgaagatatgacaggctggatctcagactgatggagacttaaaacggcacggccactttagcaaacagtgtggcagtttctttaaaatgtgtacatttaccatatggcccagcaggtatgctgtagatgttcaccaaggagagatgaaaatgtgtgtccgtgtaaaagaatgcacattatctccagagtaaattctcatagccaaaaactggaaacaacgtaaatctctctcagctggagaaacatgagcaaattatgatatattcatacattgtcctagttcccatcaggaaaaatgtacaaaatactgaaaccaaaataggcaacggcgatgagttccaggagccttgaattgagcagagagtgaacaccatgctgtggagtccatgtgacggtggagaatctacacgagtgtcaggtgacggaatagcgccaaggaacactcctcatgaatgaacagtggctgtctctggagtgaacaccatgctgtgggctccatgtgacggtggagaatctacacaagtctcgggtgacggaagagcaccaagaaacactcctcatgaatgaacagtggctgtctcttgagtgaacaccatggcgtgggctccatgtgatgatggagaatctacatgagtctcggatgatggaagagcgccaaggaacactcctcatgaatgaacagtggctgtctcttgagtgaacactatgccgtgggctccatgtgacggtggagaatctacacgagtctcgggtgacggaacagtgccaaggaacactcctcatgaatgaacggtggctgtctcttgagggaacaccatggcgtggagtccatgcaatggtagagaatctacacgagtctcgggtgatggaagagcgccaaggaacactcctcatgaatgaacagtggctgtctcttgagggaacaccatggcgtggagtccatgtgacgatggggaatctacacgagtctcaggtgacggaagagcaccagtgaacacgcctcatgaatgaacagtggctgtctcacgagggccaggattgaccgggaggggatgtgtgggaactttgaggcaaaagatttgatcagggtaataggtagatttccacttatcaaagtgcaccaagtgtacttaagatctgaacatttcactgtgtatactttgtactcccgcccttccaaaagaaaacaatgaaaaaataattgtaaatgaacactgaactctatttgatagatttttcacagtggtactagatagcaattctgaaagcatttctgtatctccaggcttaagcaaataagcttaataaattagtgaatatattgagggtaacaggagccaggtttcttttttggcaagagaggtagaaataagaaaaggccaaagcctggaatggatcatgtgggattgggttgcagcaggaggtaccagtatgagctggtggctcccgacagatgtagacagggacagaagtgcctgtggatgggtgtgggtgtacatgtgtgtacacacatgttgtgtgttctgcttgctggcagtgcccagcagcagagacccccagtgacagcacacccggttcctagtcttagcttccaaacaccatacttcactagcaggagccctggtccaagggctggggaatccggtgtcaaatctggaaccaattgagcaccaaaacaaaccattataattatgaattatgacccaccaagccagactccatgagttcatattgacagaagtaaatgagtgatgaaagataaaatgagtaaatatttttaagtgaatgtagaagatctaatgatttagaaggaatggcaggaaatcatcagtggatgctaaaactagtagtgaaggatcgatgaaaaacagaatatgtacatagtgtcacagtctctcctcccaaatcttaattgcaatgtgagtagtagcatctttgctttggaggaacttaagcaccaccttcactgagttgccgacattaacattgccacacaggacagacttctgcggtatccctgctaaaatgcatactcttgagtctagtccggaagataccaaaataaaggacaagctgtaaaataactaacctgtattcttgaaaatttccaatttcaagaaacaaaaaagctgagaaacttggattcacgaagggtaaaaatcacttgacaaataaatgcaattcatgatcctggattggatcataaaataggaagacaaagtaagaaaattatggagacagttgacaccatttgaatgtgaactttgtatatgacagctaaatttcctgatcttgaggaaaatgtatgtgagagaatattcttgtgtttaggaaatacattgaaacatttaggtatagaggaatatagtatctgaaatttattttcatttgacttagaaaattcatgggggagcggggagagcagtggtgtaagataggagcagttggtgagcctggtaaaagttatatgggaattctctacactggtcttgcagattttctgtgtatctgaaattatatccaaaaagtttaaaatggagaatatgcaaaacaaaaagtgatttgtgggaagtgagtggactgtgtcacctcactgatgagcccttcagtttttggccatgagcccaagtcagtcacatattgatttttgacctgggaattagaaagagtggccagaaaaccaggctctttatctagttagagagagaagtacgcacaaaggctgaccaagaccaagcagtgtgatgagctgattgtgggcgtgatgcggcgggtctgggtcctgtctcaggtggcagctcgcggggtttaagcaggaaagacatgtctgattccctttcagtgggatcattctcacagcttcagagaagactgcctcgtcctggggaccctttcccccaacccgtcttcactcacactggccattttggttggtggtgattttattctgctaacaccgttctcactcacagtttagggcctttgagtgggtttttgcctgtgtctcgaagattcttgtcttgaagcctgttattctgattttgtgttgagagggttcttccctggcttcacagtttggagttgccacagcgtctgtctctgctttaattctctaccccgtctgtcacctgtcttgtccattaggaattggcctgcgtgagatgctgtgacactgtctgccttatcaccactgcgttcccagcccttagggacttacagaggaggcacttggtgaatgtgtggaattaatgtaatggattcatagccacaaagcgtgttaatggttgtattagtccattttcacattgctgataaagacatacccaagactgggaataaaaaggtttaattggccttgcagttccgcatggctggggaggcctcagaatcatggtgggaggcaaaaggcactttttacatgtcagcagcaagagaaaacgaggtagaagcaaaagcggaaacctctaataaaccatcagatctcatgaaacttactcactatcacgataatagcacgggaaagatgggccccaatgattcaattacctcttcctgggtccctcccacaacacatgggaattctgggagatataattcaagttgagatttgggtggggacacagccaacccatgtcaatagccaacacagtcctggcctgtggctggtgctcagctgagctgtgaccgtggctgtgagttggggtgcgaggcatgcacagcctctcagcagtacagtgaaaggatttggaggctcgaacgtgtgacctacaaagagatctccaaagatcaaggtccattcaccctaaaaagacaaatctcagtgcagtttacagccagtgtttgcttatggatatggattctgtggtaataaaataaatgattaaaagtctgtgaatgaattttaatgtctttactggaattgtaaacactgattttctttcctcgcccacccatctgttggtgagtttcagaaggtggatgaactgtgctgcagggacagagaggagggtgcagcttggcctctgggacctcagctgagcactgagtgactgagctctctccgtttcagacgtccacacggaagctgtccaggcggctctggccaaacacaaagagcggaagatggcagtgcctatgccttccaaacgcaggtccctggtcgtgcagacctcgatggacgcctacacccctccaggtaagggacacgctccccgacacggcctcctgaatgtgccgggcacctcagaattgacctagcccagcaatcaggggtttttgctttcaaaataatgaagcagtaatgcagattttgtgaaccagaagtccaaaaacagtgttgtatgagttaaacgtggaaggaaaagtaacattattatgtatctgtataaaaacacatttttaacttttcatcaagactcatacatatgatacataccagtaaaatctcaaacaattttattcatttaattctttgtaggggaaagggaagagtttgtacccctctgggtggaattggacttttcttctgattaggctggtgcatacatgttctcaaatcttcatataaatgtgctatattgttgtattgttttagaacaagcaaattggacaatttaggcagttacccaaatcacgggtcataaactttgcctgcaagttgccagatagtattttagttcctgcaggccataaggtctgtcacaaccactcaactctgcccttggagtgtgaaagcagccataggtgatagcaagtgggtatggctgtgtaccaataaaactttataagaacagcggaccagatttggtgcacagatgtgccaaccccgatctgaattactgaaggtaatagcccatttatatttgtgttatgtaatactgcttttatttaatcttgaattttacataactacccaaattctctattttctctgcccaaataattataaactacatctcatgatcttcccacccaagtaaagcagaaagtgtagttatccagatacttgttagaaacatggattgaacctacgttgtttggtgtttagtttctgtgattttgattccaacattattcatgtgacagttgcaagcttgtcttctcaaaggacctaaatcaccttacatcccactttgaagctacacaccactttgacaccatttttttctccactacaagagaaacttaaggtacaatatgaatagttgaaaatgtacaattttttgggagtatttttacttttgaagtttagcttggtcttggcaagcagtgagacagaaggacatgcatcagatcagagctgagatcaagcatatgcccacattattccaagtagctcctgagtattcacctttatacctttactaatgaaggtactgagattgataggacagaacttaaagagtgcataatttggggtttttgttgttttttgtttgttttgagacagggtcttgctctatcgccacggtcagaattcagtgtcatgattgcagctcttggctcactgcagccgtgaccacctgggctcaggcggtcctcccacttcagcctctcaagcacctgggaccacaggtgcatgccaccacacccagctaatttttaagtttttgtggagacagggtgttcctatgttgttgttgtttttcatttacacatgcgtgatcttcgtctaaagaacacagtgccagcgggcaagagagtgaacgccgtgctagcaaatgccagtgggcaagggagtgaacgccgtgctagcaaggttgttggcaagggagtgaacgccgtgctagcaaatgctagcgggcaagggagtgaacgccgtgctagcaaggttgttggcaagggagctctttctgccaacgtgctcccttgggctcctccttttctttattttaatattaagcaacagcacgtaattaggggctaggcacggtagctcatgcctgtaactcctgcactttgggagtccagggcaggcgtatggcttgagcccaagagttcaagaccagcccggaaaacatggcaaaatgtaccaaaatgccttttgtacattttgtctccaccaaaagtacaaaaaattagctgggcctggtggtgtacacctgtagtcccagctacttgggaggctgaggtggaaaaatcacttgagcctgggaggcagaggttgccgtgagctgagatggcaccactgcactccagcctgggaaacacagcaagaccccatctcaattagaaaaaaataacgataataaatagagactctttaaaaatgattaggccaggcatggtggctcatgcctccagcctcagcactttgggaagccaaggcaggcagattgcttgagtcctggagtttgagaccagcctgggcaacattccaaaaccctgtctccaccaaaaatacagaaatcagccaggcatggtggtgtgtgcgcatagtcccagctgctcgggaggctgaggtgggaggatcacttgggcccaaggaggctgaggctgcagtgagccatggtcatgccactgcactgcagcctgggcaacagaggaagaccctatctcaaaaaaaaaaaatgcttaatcctgtttgtttagtttatggttataatttgccaaaacttatggtaaaaaaatgttatttgtatgtgttctttgtgtaactaacaaaatggacttaaaaggataacccacttgaaatattttaaaccgaattcttggcactaaccggttatttaaggcaacacacatttttcttgaccactttttataagagaaacgatgagtttgaaatggaagaagcagtgtggttatttgcttgcttatttctcatattgaatccaaccactgagagatgttactgggtcatgtgtgatgaataacctcattgtacagatgtctttgcaaaatgcaaaagaatatttgaaatgttatttttgtgaaatatttggatttgactagcatttttatataaaccataaaaaaccttctgtaaattttcatcaggagtccttgtgatatcacatggggtagttttgtacaatcataaatatcaatatcataaaaattttttactcccagctattttgtgcttagcagtagtctgcatgtttattaccctgcttacttgaacaaaatcttagctgcattttcttacctatttttcttggttgttggtaacagtggttagatcttatctcagtttcattgctcttcagagaatattcttaaagtttatcttctatgaaatgactggctgctgaccaggatcatagtttctggagaaactctcattagcattgtcacaatgctaatattccatgggtgaaactttcccttaattttcaaatgtaaagatacaagaataatttgccaaaacttctgcttctagccatgatgagataacagggacccaaatcacacctctgccataaacaactgtaaaactgcacaaaacgaatgagatggctgttttaagtctgtgactacagctgtgccagccagaacttgagggcaggagaatgaatgagacgcacagacagtacatttgccctctgcctggagaacacctgcagaccgtggctcagagagctcaggtgtgagtggagcatggccaccctaccacgtccaggaggcggagatcagagagagctcaggtgtgggcggagcatatcaccctaccacattcaggaggcggagctcagagctcaggtgtgggtggagcatggccaccctaccatgtccaggaggtggagctcagagctcaggtgtgggtggagcatatcaccctaccatgtccaggaggcggagctcagagagacctcaggtgtgggtggagcatatcatcctaccacatccaggaggtggagcttggagagagctcaggtgtgggtggagcatatcaccctaccatgtccaggaggcggagctcagagctcaggtgtggacggagcatatcaccctaccatgtccaggaggtggagctcagagagagctcaggtgtgggcggagcatatcaccctaccatgtccaggaggcggagctcggagagagctcaggtgtgggtggagcatggccaccctaccacatccaggaggcggagctcggagagagctcaggtgtgggtggagcatatcaccctaccacgtccaggaggcggagctcagagagagctcaggtgtgggcggagcatatcaccctaccatgtccaggaggtggagctcagagagagctcaggtgtgggtggagcatatcaccctaccatgtccaggaggcggagctcagagagagctcaggtgtgggcggagcatatcaccctaccatgtccaggaagcagagctcagagagatctcaggtgtgggtggagcatggccaccctaccatgtccaggaggcggagcttggagagagctcaggtgtgggcagagtatatcaccctaccacgtccaggaggtggagctgagagagagctcaggtgtgggtggagcatatcaccctaccacgtctaggaggtggagctcagagctcaggtgtgggtggagcatggccaccctactacgtccaggaggcggagctcggagagagctctggtgtgggcggagcatgccaccctgccaagtccaggaggcggagatcggagtgggtgcaggactggagctctccacccatccacaccagcagcaaatcaatccaagcctgcccatggtcacgatgacccagcagtgcctgcgctgcctgctaaaacaagagctggaaagcttccgaagaagcttatgggatcctgagcgtgctcaacacgttacccacaatgtgcaatattaagcaaacaatcactgcatacacagagaaaccggaggtagaatctgtggtcaagaaaaaggcagtaaaatgtggacacacatgcaagatgatctctgtcactcaccacacgtggtggctgagtacatgaagtgcgcccggtctgaactgaattcgctgtgtgaaagacaccagttaatataaaaaatagaaaatattttctttgtatttcttattgaaagtatagtatgagcattttgagttaaaagtatattaataaaattaattgtacctgtttatatatttatatatatatatgaggctacaaagtaggtttaaagttctatataggattctcataattctgttggaaggtgccagtctagatgtctgatacagcaaaagacagagtttttaaatctacaattataaatatttcgggaatcaaattaaaatgtgtcaaagaacgaaaagaaaatattttaatacttgagccagaggaagggaagacactttttattacaatggagttggggagtttcaggttccatacgtgataatcttgagaattgtcactgcctcctcacaggtgaaaagctgagcaaactgaaaactcagcagctcttcttaaacctgcaagagacatgaggtcacaggcaagccactgtccccagatagggtggacaggtgaagtggagaatcaccatacactggagcagaaagctccaaggaacccccgctgggattggaaaacctgaactggaattgacaaattgctgtagtgaggttgtggccaagtctgagagttaaaacgtccaggaggcctgtgcatacagggccatgattttgtgagttgtaccatcagaagctcaaccaggttctcgaagtaaatatcagggaagaatcccctcatacttactacaggggacggagaataggaatcattttcaaatatgcaggagcactcttaactaggtctaccttccagagaagctagttaactagagactaacctggtggggttttatcaaagccttccggcctggggaaaaggaaatatccaactccaacctccagaactgaaaagcaaagagaacactaaaaagcaaaaaagaacagagtatccaagcactatgggacgactacagaaagcataaattatgcggaacggtaatacaaggagaagaatgaggaacagaagaagtatttttaacattaatggctgaatttcctcagattaatgccagacaccaaaccatagattcaggaagctccagaaacacgaagcaggataaatgtaaaaacaacaacgacaaaaacaaaaataaactatacttgggcatataattttcaaactacggcgaatcaaagattttttaaaaaccccaacaaagaaaccagagtaatctccttccctatagaggatcaaagataagaattctattcaacttcccctcaaaaaccacgaaagcaagaagtagagtgaaatatttaaactattgagaggaaaaaaatgccattaacctagaagtctataccctgtgaaattatctttcaaaaagtgaaggaaaagtaaagactttctcagagaaaaattgagaaatttgttgccagtagacctgccttgcaaaaagtgttcatagttctttagagaaaatagtagaggtcagtaactcagctgtgcataaagaaaggaagagcagagtctgtgtacaggggctcacacctgtcaccctaacactctgggaggccaaggcgggagaattgctggaggccggttatttgagaccagcctgggcaacgtagtgagactctgtctcttaaaaaaagccaaacatggtggctgacacctgtagtcccagctactttgagaggccaagatgggagggtcacttgagcccaggatccttttcaaggctgcggtgagctataatgatgccactctactccaccctgggcaacagagcaagaccttgactgttaagaaaaagcatcaaagaaggaacagtgaaggtaggagaaaaacttttatttttcttaatagatttaatgtaacagttcattcataatagcgacagtgtatttgattatatgcttatgtatataccatatacacacagttaaatgtaagtgaaatgaatgacagcagtgatacaagggatgggagagagcaattaggatttaggattattttgtttttatagtgtgcttgcattatccagaaagcagtatagtgtcatttgaaagtgggcttgggttacttgtgaatttatattgcaaatcccaaggcagccacttaaaaaaaagtaactgatatgataagaaaggaaagaaaatagaaaatgctcaattaagaccacaagaagaaagaaaaaaaaagacaaaagggcaacagatagaaaatagtaacaaatatggtagatattaattcaactgtatatcattactcactttcaatgtcagtctaaatgcacccaactatatattgtctatataagaaatctactttagatataaagaaatatatatagatcaagagtaaagggatagaaaaagatataaatgttaacactaatttatttattttattttttttgagatggagtcttactccttggcccaggctggagtgcaatagcccgatcttatctcagtgcaacctccgcctcccagattcaagtgattctcctgcctcagcctcccgagtagctgggactacaggcatttgtcatcatgcctggctattttttttttcctatttttgtagagatggggtttcactatgttggccaagccagtcttgaactcctgacctcaggtgatcatcctgcctcggcctcctaaagtgctgggattacaggcatgagccactgcccagccaacactaattttaaaaaatggaagtggtgatgttaatttgacagagcaggctttacatcaagggaagttaccagagatgattattttctccaagaagataaaacaatccttaaatgtatttttgcctaagaaagcatcaaaatgccaaagcaaaaactgataaacttcaaggagaaataatccagtattatagttggagactttaacacccctttatcagaaatggaccaattcagtagccagaaaatcagtaaggacaaaattgaaatcaacaacatcctcagtcaactgtatataattgacatttatagactatttcctccaacaacagaatgctgaacattcaccatgatataccacgttttggtccataaaacacaccttaacaaatttaaaagaataggaattaaacgagtatgttctcaaccacaatgaagtagaaataaataatagatgactggaaaatattaggaattaaacaatacacttaaaaataatgcattgctcaaggaagaaatctgaagatttctttaaagttttgaagtaaatgaaaatgaaaactttttaaaatttgtgagatgcaatgaaagtaatgtttatagggaaatttatagctttaaatgcatatgttaaaaaagatctgaaatcaataagctcccaccttagaaaactagaaaaagaacagcaaattaaattctaagtaagcaggagacaaataatgaaagagcagaaatcaacacattgaaaacagaaaatcagtagagaaaatcaacgaaaccaacagctggttctttgagagaaaatctataagcctttaacaagaaaaagaaatacagcagataaattaccaatatcagaaatgaaataagggacataactacaggtcccatggacattaaaaggataataaatattatgaaaaactctatggccacaaatttgataacgtggatgaaatggaccaatttctttaaagacagaatctgccaaaatttgaacaggaggaaacaatctgtataggcctgtatctgttaaattgaatcagtagttgataacctttcaaaacaggaagtgccaggcccagttgggttcattggtgaattctaccaaacatctaaaagaaattatgccaattctctacaatctctttcagaacataaaagctgaggaatacttcttaactcattctaagcatcattttaataccaaaactggaacaaaatattacaagaaaacatctctcatgaacacagatgcaataaccttcaacaaaatattagcaaattaaatccaacagtgtaaaaaaaaaaaattgtgcaccaaaaccaagtggaatttgtttcacgcatccaaagctgctttaacatttgaaaaccaattaacgtaattcatcacgttaacaggctaagaaaaaggaaaagaatttgacaaaatctaacactcataataaaagctcccagcaaactaggaacagaggtcaccttcctcaacttgataaagaatatggacaaaaaacctattgttaacatcatacccaattgtgagaaactagaatttttcccactaagatccggaaaggggatcaggaaaaacaaggatgtctcctctcaccacttcttttcaacattgtactagaagtcctagctaatgcaattatgacaagaaaaataaatacatattcattgggaagagaaataaaactttgttcatagatggcatgtttgcctatgtagaagatccaaaagaattgagtttaatatacaaaagttgaacgaatttcctgtttaccagcaaagaacaagtagaatttgaaataaaaaagtggctcatgtccataattccagcaatttgggaggccaaggcaggcagaacacttgaggtcaggagttcgagaccagcctggccaacatggcaaaaccccatctgtactaaaaataataatttaaaaaaaaatttccagtagcactccccaaaatggaatactcaggcataaaatctaacaaaatatgttcaagatcttatgaggaaaactacaaaactcattcacagaaaaactaaatggacaggtagtccacgttcatggataggaaaactgaatattgtcaagatgttttccttccaatgcagtcccaaccaacatccgaacgagtttttttttcaatatcaacacactgattcaaaagtttatttggagagatgaaagactcagaacagccacttcaatattgaaaaagaagaacaaagttgaagactgacactatgcaacttcaagacttactataaatcagtgataatccagacagtgtggtattggtgaaagaacaaacaaaaggatcaatgggacagaatagagagcccagtaagaaaatatagtcaactaaactttgacagaggaacaaaggcaatacagtgcagcaaacacaatatttttaacagatggtactggaacaactggacatccatatgcaaagaaaaacaccaaacctagtcacagaccttacatctttcaaaaaaattaaacagatcacagagccactgtcctcattagtatagtggtgaaatattcctgcctgtcaaaatagatgacagatgtaaaatacaaaactatagaattcttagaagataaggtaaaaatctagtgactttgatttggtgataagtttttagatatgacaccaaaggtgcaaggtgtgaaataattgataagctggactccaataaaaatgaacatgttctgctatgtcaaagactcttaaagtaattaaaatacaagccacagacagggagaggatgtttgcaaaagacataaatgataacttttatttgaaatatacaaggaactcttaaaagtcaacaataacaaaacaatcaatctgattaaaataggggccagccaagtgtgatggcatgtgcctgtagtctcagctactcaggaggctaaggcgggaggatcacttgagtccaggagctccgggttgttgtgagttatgcctctcaggtgtcgacactaagttcggcgtcaacccagcgacctcctgggaggggtgaactagcttaggttggaaatggaggaggtcagaattcctaagctgatcagtagtgggattgcgccttggaattgtgctccagactcggcaacattttgagatcctgtctttaaaaaatgaataagtaaaaaatgggtcaaagactaacagatggctcatctaagaagatataaagatggcaaatcgacatatgaaatgacgcttcacatcatatgtcatagagaaatgcagattgaaacaacagtaagacaccactatacacctattagaatgcccagaatccagaatgctagcaacaccacagcctatgaagatgtggagctgcgggaattctctctcattcattgctggtcttaaagcaaaatagaacagcctttaggaagacagcttggtggtttcttacaaaactaaatatactctttaccatatgatctaggaattacactccttggcatttgctcaaaggagttgaaaacttacgtctacatacaaagcctacacatagatatttagagcagccttattcataattgccaaaacttggaagcaaccaaaatgcccctcagtaggtgaatgtataagtaaactgtggtacatacagacaatgggatattattggatgctgaaaataaatgagctctccatagaaagacatggaggaaacttaaattgacttctttcacttagcaatatgcaatctgaaaaggttgctgtatgattttagctatgtgacgtcctgggaaaggcaagactatggagacagtaaaaagatcagtggttgccagggtccagggggaggcagccagggtctgtgggggaggcagccagggtccggggggaggcagccagggtccggggggaggcagccagggtccggggggaggcagccagggtccggggggaggcagccagggtccggggggaggcagccagggtccggggggggaggcagccagggtccgggggggaggcagccagggtccgggggggaggcagccagggtccgggggtgaggcagccagggtccgggggggaggcagccagggtccgggggggaggcagccagggtccgggggggaggcagccagggtccgggggggaggcagccagggtccgggggggaggcagccagggtccggggggaggcagggatgaataggcaaagcaggaggattttttagtagcatgtgatctctgtatgatactgtgatggtggatacatgttatacatttgtccagacccatatattgtacgacaccaagaatgaaccctgatgtgaacgatggagtttgggtgataatgatgtttcagtgtagaagcatcagttgtgacaagtataccactctggtaggcaatgttgatgataggggacgctgtgcacatgtggagttggaaaggataagtgagacatcactataaagctggaaaatatgatagaagaaattttgctggtgggtttaacaggttggagaaggaagatgaagtctgtgagcttgaagagggatgaaaagaaattaaccaaagtgaagaccagagaaaccaaaattaaatgcgaacagaacctcaagctcctgtgacacaatgttaatatccttgtaatataagaaggaaaagagaaaagagcaggagcctttgaagaaatgagtcaaaatttactcagattgatgtcaaacacctgtgtccagccccgagaagttcagtgaactccaagcagaacaagtataaaaagaatcacatccaggttcatgatagtcaaagtgcaggattaagaggagatcctgaaaggactccgaagaaaaagacacgttacactccagagaagcatttgaacaatgcatgacttctgtgaagatacaatggagaccagaagaccatggaaagacattttttaaagtactaaaaggagaagaaagggctgtcaactcatatccggtgaaaatctcctttataaacacggatgaaacgacacattcacacacatgaaagctgagagaatatgttatcagcagaactacactataaacatgctaaagaatgtactttaggctgattgcaaatgctatcagatgaaaggttagctctatgaaaaagaaaggaccctagaaatcaaattttctggaatataaaatcatagaacactttatgattttatggtttttagttttttatgatcttagaattttatgatataaaatcataaaatgtccacgcttctctacaccttcacctgttttgaagtccgtgctgtaccatgcatcagtagtttattccttcttattgttgaattatattctgttagatggatctaacacatgctgtttattcatttaccagttggttattcattctttcctctattcggcaattatgaataatgctgctgtcgacgtttatgtacatatctttgtgtatacgtataatttcctttatcttgggaggatgccaagtagaatgattgactcttattgtaagtttaggtttagctttttaaaaactgccaaattgtttacaaaatagctgtaccattttacatactgccaccagcagtatatgagcatcccagtttctccacatcatgagaagcagttggtattttggtatttttatttttgccattctaattgatgtgaaatggtatatcattgtgtatttactttgtaacagttaatgatgctaagcatcttttaatgtgcttattagcttttaatgtgctaattcctattcatagctatttgtatatgttaattggtaaaatgtccagattttttgcccatgttttaaaatgggttggttgtcatcttatgggttataggtgccttatacgatctgaacgacttttacaggtgtaaggtttctcagtgaaaggacaaactgttctgtagcagacagaataatgaccctcccccaagatacccaggtcctactccccagagcttttgaacctgttaccttaagtggtaaaagggattttgcagctatgattaatatagagatcttgatatgggaccactatcctggtttaagcaggtggacccactgtaatcaagaacgtccttacaagagaaaaggaagaattggagactggagtgatggactttaaagatgaggaggggccataagtcagggacacaggtggcctctagaggttgggaaagaccaagaaatggattctcctttgaagcctccagaaggaacgtagctctgctgacactcagattttacacttctgacttctccatctgtaggataatagatacgtgtgttgttataagccacgaagatcaaggtaatttattacattagctagaggcagataatcatcttttaaaacttagtagttttctattttaatgaagtccagtttactaatttttatggattttttggaagttttagaagtctcatagtcttactgttctttcatttaggtctgtgatccattttgagttaatttttatctgtgcagtagggatctaagtgggatttttgtttgtttgttgtggtttggtttgggggattttttcccccatgctttttctttttggtgtgttgggtacccagttgccacagcaacatttgttgaaaaaaatactacctttctcttactgaattgtcttgagacgtttgtcaaaaataaattgaccgtaaatataagactttatttctgggtttaattctgttcctttgatgtatacatctattcttctgctaatactactgccttaattactgtgactttatgtaaagttttgaaatcagatagtgaagtcctccaactttgttttcctttttcaaaattattttggctattgtaggtcctttgtatttccagataaaattgagaataagctttcaatttcacacacacaaagccttctgggattttattaggcagtgccttgaattaatggaacagtttgggaagaattgctctcttgataatactgagttttccaattcacaatcatgaatctatctccatttatttagtttccatttatttggatctcctttaatttcagtaatgttttatagttgtcagtgtacacattttgtacctttttgttagaagtttggctgagtgttttatgtttttgatgttactgtgaatggaactattttcttaactttattctcaggttgtttattgctagtatatgtatatcttgtgtcctgtgacctcatcaaactcattttttagtaatgcaaaacatttttgatggacttcttgccgttttctacatccaaggtcatgtcatctatgaataaaggcacttttattccttcttttctaatctggatgtctttattattaaatttgttaatttatttcactagctagaacctgccagataatgtcaaataaaagtggcaagaggggacatctttgtcttgttctccatcttagggaaaacgccttctattgtttaccattaaatacactattagccatggcttttcatgaatgtgctttaacaggttgaggaaattgccttctattcctgattttgttgagtttatcttgagtttgtcagtacttttctatgtctcctaaggttaacatgcggttctactcccataattctatatggtgtatgacattaattcacttttgaatgttaacctgaattcctgtcgctctggtatttacttctagtcaccgctggtcatgctgtatcatccgtgtcatattagtcaccactggtcatgctgtatcatccatgtcatattagtcaccgctggtcatgctgcatccatttcatattagtcactgctggtcatgctgtatcatccgtgtcatattagtcaccactggtcatgctgtatcatctgtgtcatattagtcaccgctggtcatgctgtatccatttcacattagtcaccactggtcatgctgtatcatccgtgtcatattagtcactgctggtcatgccgtatcatccgtgtcatattagtcaccgctggtcatgccgtatcatccgtgtcatattagtcaccgctggtcatgctgtatcatccgtgtcacattagtcaccgctggtcatgctgtatcatccgtgtcatattagtcaccgctggtcatgctgtatcatccgtgtcatattagtcaccgctggtcatgctgtatcatccgtgtcatattagtcaccgctggtcatgctgtatcatccgtgtcatattagtcactgctggtcatgctgtatcatccgtgtcatattagtcactgctggtcatgctgtatcatccgtgtcatattagtcaccgctggtcatgctgtatcatccgtgtcatattagtcaccgctggtcatgctgtatcatccgtgtcgtattagtcaccgctggtcatgctgtatcatccgtgtcgtattagtcactgctggtcatgctgtatcatctgtgtcatattagtcaccgttggttatgctgtatcatccgtgtcatatgctgtttgtttggtttgctgctattatgttgagtgtctatatcatattatccttcaggtttcttggaagaggtaggtgggagtggggaatgaaagattgtaaagagttgtgagaagacattctggggagatggttgtgctccttctggacacctgggtgtgtacctttctcaaaagtctcaaggctgtgtcaattttacttttatagaaattgtgtaagttttcttaaaaggcagagtgggccaggagcggtggctcaggcctgtaatctcagcactttgggaggctgaggcaggtaaatcacgaggtcaggagttcgagaccagcctggccagcatggtgaaaccccatctctactaaaaatacaaaaattagccggtcatagtggtaggtgcctgtaatctcagctacctgggaggctgaggcaggagaatctcttgaaccagggagtgagaggttattgtgagctgagatcgcgccactgctctccagcctgggcaacagaggaagactctgtctcaaaaaaaaaaaaaaaaaaaaaaaaaaaacccaaggtgatagagaattttcaggctcttaacattgttgcttttctaacaagtaaacttttaaaaaaattcccagacagcataagtcatgtgacagtgataataagtgtgtatattgtttgcaattattatcttttaaaaaacaaacccgtgtcttaagattatttgccgtgacttctcctctcacccgatggctggagctgctcacctgagctggcgtctctcataactcacctggaggtaggattctgagtgtcattcttaaattgaagtttaaataacaaatacaccaacaatttattcccaaaaaccttggtactgcatgaaaagttattaaatgaaaaatattctcataaattatagtgaaaaaattgatgtattttgttataatccaagatatccaatctgcacagatagaaaaatcaataatgagaatgtataagaaacaaatactgtaaaggtgaattgatttgagtgtaaaatgtgacgtgatgaaggtttgtcgtgtgccccggaggaaaacggggaggtggaggggctgctccgcgtgaggcacgttctgctttctctcctgttaccatcatcagtgtcttgatccttaaggaactgtatgggtatctaacacacacacaccgacgtagaaataaatcagctgcatggttatctaacacaccaacgcacaaatcaggtgcatcggtatctaacacaccaatgtagaaataaatcagctgcatgggtatctaacacactgatgtagaaataaatcagctgcatggttatctaacacactgacatagaaataaatcagctgcatgggtgtctaacacacacaccgacatagaaatcagctgcatgggtatctaacacaccgatgtagtagaaaaatcagagcccacaagaacatctcaggactaacaagggctaaacatacgtcacactgagactcctgagagccgcacaggccctcagcatcccctaggaaacgcggcccttgttctctcactttgtgggtgacacaagcaaacacttggtttcttcccaaactgctgtgtagaggaaatgggtcagtgtgtatttgtctgagatgacagtgtcaaacatcttatagcatgtttatataaggtgtgttggatgaaaaactcattatgctaaaataaatggtttattatctgaaacgtggtttaacttctcaagagtgtatcaaaaagtcattgaacaactattgagacttacgtgaagtaaatctgtgtttggcgagggactgagattgtggtgcacgtttttgctgcaacatacagcaaatcacctttcttcttacacagatacctcttctggctcagaagatgaaggctcagtgcagggggactcccagggcacccccacctccagccagggcagcatcaatatggagcactggatcagccaggccatccacggctccaccacgtccaccacctcctcgtcctctacgcagagcgggggcagcggggctgcccacaggctggcggacgtcatggctcagacccacataggtgagcacgcttcacggtgtctttctgtgcctgttgtgtaaacgcctttgtgtgtgcacattctctgtttgcatcgttgcagcggaatccctcggtggaaagagcacagagctcctctggcccctggggtgctttggctggattgtttctggaagctgctttacacttctcatgcccaggtccctcccacagctgcaattccaggggccttgttcctggggaatcctgcagccgtatccgctcccatcttttcttctcacttatgctcctacatgaaaccttaacagtcccaatcaacaggacagggttttaaatgtgctcgtcctgaccgtgggagtcatttaaggaaacgagggctttaaccacagctgcttgacgctgctgtctgccacaggtgttcagacttcttgggggccggcacactgctttgtgtaggttctatgacagggagatactctgtatgagaaaaagcacaaagttaggatcactgccctatgacgtttgaacatgctgtggaaaaggagtaaagtgagaattattagaggaagagctggcacgtggggagcggtgatgggcctcacgtcgctctgcctttgaacggttcagtagtaaatgtttttcatcaagtacgggacttgggttgaatagggttttgtgtgtgtctccattaaagcagtaaccggagacgactgcttaccacgtcgccgataacggagctcgagccacgggctcagaccctcccggtatctcagctgccgcaggaaaacctgatccctgaaaaaatcatcagtgggaagcaggtgcacgtcattgtgattaaatagcccacagacaccccagaaccccagaatgttcacttctagatcactgactcctttacgctcagaggcgttttggattgacttgggtctcagccccttggtcgctcactgagacttaaagcgtcggccgttttctgtctggaacaggagtttgctggcaggagagctgggtctgtctcacttttcccaataactgctgctgggatcttgaagtcagttctcctgcttttaggcttttggtgaggaaaaaaatgaaaaaaaccatttcttttttctctctcagaactgttgtgagtataaaggagaaaatagaaatactctgtaaaagtttgtaaagtaatactcaaatgcaaagcagtattaaacttcagtttaacacagtttcaggaacatgtacactggtttatgtgaattaataacctgtacttgaaatcacagtacgttaaacaatgaacaggaatgtgtgactgttatttttttttgtaataaaattccatgtgtatattggatcccaggatagtggctgaggctctgccagctttatcgggcacctgaacggggaggccaaacaccatctctgccacttgggggaagcatttgtatcctcggattttattcaattttaaggaaatgggcagaatcttaccaaggaaaacacatatttttgaacaagtgaatcacggcacttggcctccctttgcgggtttacccttgcagtactggaggaagttttagtacaaagaatgtatccaaactatgaggggctcataactcatgtacatcaaggctcagtgtgacccaaatgtaactctcgggtgaccacattccggtaatttctaattaggcacaaagataatcttcctagactatctggaaattttctgtaactttgaaatttttttggaaaaaaagcagtggcaaaataatgaaacttaatcagaaaaggaaaaatattttctgtggcaaaacaaaagaagtaaaaagtcagatttgcacttgaccttgtgagataatcagaagcctacaaacaggaaagtagcgtgtgtgatcgtgcgtctgcgtgcgcgtgagtgtcctaaggagtccaagcacaacagatggctgagtcacactggccgatccctccggcaagggacagaagtggaggctgcagaggctgcttgtgtccgaggggagaaaagcccagggctgcagactcaggtcacggagtctctcagagctggccacgcttctacttgctgttgaagcaaaatctcaagtcctttgtggattttttccaccaatttaattatgccggcaattaagtagggacatctcacatgtatcttaagagtcaagccaatttggcataagataggaaatcccattctagttttctttttccactgctctacccgctgtccatctacaagctgtgtccagcgttttcacacctcggagctgagaggaggcctcccagacgctaccatccaagtccgctgaggacttgagggggtgtgtgttggttctgcaggaagtcgggcctgcctgcctccaggtggaatgtcgtggcactgacgggcggtgtggcgggccctccccttagttcttgtcttttcagtcacgggttcccagtgaacggcattgccgaatctacttgtgacaccggactgacaccgtcaggaggggccgacgccgtgtccaggcagctcggcaccgcccacccggcccgattctcagatcacaaagcagcgtcctgtcacggcctcttctgtgcctcgatcttctgtgtcctgtttttgtgcgttcagttgatttcgccgtctagacggcctccgggcacggtgcggacatgggcagcgtccggtgaagagaggcttttggggatgagccccactttcagcgacacaaagtaccgcccttctgttgcgtgggacagtggcggggtgatcctgaaaagcttccatcagaggaggattcaggatcgcgatccgcatcgtggcgcccgtcatcaagattctgggtgtgacgggcgtcatcagtgggctgcttggcacatcttcctcaatgcgttattcattaaatagaaaagcatgcttttccccattcagccacgtacggcttaactttatctccagggggtgctgtaagagaaagagctccacgcgctcattggccttacacgatccttagtacacattagggtgtaacgtggttttttgaatgactgttgttgtttgtactaagagaaataataaaataatagttcttgatgtctcccccttttatgaagaagatcctatgaactgtatacgtgttaactcacataatccacccaactaccctacacggtcatggccattactgttcccatttgacgaagaaactgaggcacggagagcttaagggacatcccaaaatccccagaagtttccagagccgggtttccaattccaggcctttggctgcgtcgactgtggcagacaggaaacaggacccctccgtgaacacacacagggttcctgacgccctgccattgccagtctaacgttattctagttaaaatgctgctgacatggctcccgttaggaaattacgtctgaggttttaccgaactctgctccatttgcggcaacatgagttatgctggggtccccctttgtgctggatgtgtgtggcagatgcggctgagatcggctctggctttccatggcacacccagggtgagcacctgtgcttcagtctcttcctgggctgtggcttgttccaccttcagagcaaacatcacaaccaccagaaaatctcatgatgtgtttctttacagaaaatcattctgcacctcctgacgtaaccacgtacacctcagagcactcgatacaggtggagagaccgcagggttccacggggtcccggacagcgcccaagtacggcaacgccgagctcatggagaccggggatggtacgtcccaaaggagagatgcgtttttttctggtaaacggtttgtgctgacgtcccgttccgtgcccatgactggatgtgtttcttcctggggtacaatcggttctgacaaagccaatttatcagatcttcgggagcctctcatggaaggtggcctagccacaaaaatgcaaatattctccaagtgagcccacagttattccttgtaggaaaaatgtaaatgttgtaggaatttagtcatgagaagaaaaagaaattttagaatttgctgccgtttttgctgctgaataacggtggttcagcaactgagaaattcttgtacaggtgtgttaagaccatgaacagtcacttagaagagcaagatgaagttaaatgtacaacagaattactgtcagatgggctgatatgttgctttagactttggaggaaagagggtctttttatccacgttggacagagatatcggtgacttggtaacaggctgtggccgagggcttcttccttccttctttgtggcccagtcttggtatattctgactacagcggctgttcgtgtcactcagcccctattccatttaggtctcagtccttcccgaggtcataaaagtcagggtagaacctagcggtgaaatacaatgcccttgtgtgaagctgcatggagcagccttggtatgctgtcatcttgcggtgcacgggactcacaggcggacagggaggcctatcagagccccgacaggcacagtggacagggaggcctatccgagctccgacaggtggacggggatgcctatctgaggcctgacaggtgcagtgaacagggaggcctatcgaagccctgacaggaacaggtggacagggaggcctgtccgcgccctgacaggtgcaggtggacagggaggcctgtccgagctctgacaggtgcaggtggacagggaggcctatccgagctccgacaggtggacggggatgcctatctgaggcctgacaggtgcagtgaacagggaggcctatcgaagccctgacaggaacaggtggacagggaggcctgtccgcgccctgacaggtgcaggtggacagggaggcctatccgagccctgacaggtgcaggtggacagggaggcctatcgaagccctgacaggaacaggtggacagggaggcctatccgagccctgacaggtgcaggtggacagggaggcctgtccgagctctgacaggtgcaggtggacagggaggcctgtccgcgccctgacaggaacaggtggacagggaggcctatccgagccctgacaggtgcaggtggacagggatgcctatccgagccctgacaggcgcaggcagacagggaggcctatttgagccgacaggcacaggcggacagggaggcctatccgagccctgacaggaacaggtggacagggaggcctatccgagccctgacaggcgcaggcagacagggatgcctatcctagctccaacaggcgcactgccacatcctcacgtgaggcagagcccaactgtgccttcgtaagtgtccagttagtgcgcttgaaatcgccctgattgccagtgcgatgacttttcctggaatgccttttggtgtcattatttgctttagttctctgatgagttcgtctttactaaattggccatttttgttattcttgtcattttagtaactttgtcgtctttcaagtctgtacctttgcctttgttccccaggtaaatcctgcgtggtgtgttgtgctgtctcggcgtgtcatagcctcccacaccagaatcccacaggggcccttgctgggagggtgattctgggtcacaccccagacgtcatgagctagaagttcgggggtccctgaggcaattctgacatctgccaaattaagcttgagaatcgttggcctggtggaatggtatgattcatctgaaccaaattagttgggctatttaatgggaacatactatgtgtggatattgagagttctggattgtgtgtttttctgtattttcagagatatgaaatatttaatgtctcaattcttaaagtgctatagagcattttgagactacctattaaaaaatcttgatagaaaaaatttccttgaattctgttctattccccgcaaatgttgaagtctgttttttatggtccagtgcgggggcgaacaagggctctgcctcaggtgaggggaatggactgccagctgcacctacagagacccctgcaccgtccaagcccacagctctgggtgatggtttcccaggtcctgccggcctgcagcgtgtgcctgaggaggacgcttttgatctagttgtggcatcagcgtcttggtcctctgtcttgttcatttgatttatttatcttaaaatttgaaaaccttgactctttcattgatcaaaccagttgattttcagaatggtgcagcattcattataattagcacagtattttaaaatggggcttttctcggtccacttggataggtaggggctagtattctgttacacaaaaatttgaatttagagactttaacttctgtgctttaggatgcattgcctgtgtgtgggctgagctgcgtgggtttggaacgcgtgtgaggagctcagtctttattaggagtggacagggcttgggcgtggtggtgctgaaacctgagcccggggctgtgggatgctgggggttccagacgtgactcagcggcccgatgttctcgtgcctccatgaggctgaatgctggtgtgaggctgaatgctggtggtctctggagagatagacgcagggaaggacttactgctccacggatggtctcaccctgttgagaagagggggcctggggcagtgggaatgaggagtctgccctctgcaggtgacaattctgtcctgagaatcagagctggggtcaagcaggtgtggccctgaggctcctcccagcatgaccagcagaacagcacatcctggaacgtggtagacattcgggtccgatgtatctctgtccggtctcctgcctagccacggggctaccgtacagcatgatcacctcgggcccttcccaggatcgcatctaggatgcagcctgttgtagccgcgctggggagggggctgtgggactgtgggactgtgggtgctcattgaagctgtgatgatcgctttccccacccgctgattcctgtttttcaggagtaccagtaagtagccgggtgtcagcaaaaatccagcagcttgtcaataccctcaaacgaccgaaacgaccacctttacgagaattctttgtcgatgactttgaagaattattagaaggtgagagaactctttaccacacgtttcttccagatgctcctatggtcccgtaaacaatgatatttttttctgcaaggctattttactttttaagagcagtaatcgtggcatttgccgcatgatgggaacccaggtagggagcgggtgatgttcccaggcagccttggtgtcggcaggtctctaaacctggttgttagtcgtcctctgtgggagttgattttgttctgtgacccaggtcaggtctctctctaagaactctgtaagagtatagaaatacaagtaaagtataaacatgtagaaaaacaagtaaactggggaaatccttcgctggcagcaaaactggcgtgtgaagtgctgtctcctccctcctcctgctgcctctccttataggtgccggagctgctgcctttgcccctgaatgctcctgggtctttttagacaaacaacttaaagttgaaataaagcacaagaactgctcattgtagcaaacttgagctccttagtatcttatgtgttaaaccacaagtagaaacgactgattttgtcagtcataaagtgacagacaagtctgttccagaaatggaagagataatttccattcttcacctctctcaaggattgggcaggtggtatttatgatgcactgattttagttttactcaggaaaatactcactccgtgttcctgttattcagagtacttgtagcagatttaaatgtacagctcaggccaggtgcggtggctcatgcctataattccagcactgttggaggtcaaagtaggcagatcacttgagcctgggagttcgagaccagcctgggcaatatggcaaaaccctgtctctaccaaaaaaaaaaaaaaatatatatatatatatacacacacacacacacacacacacacacacacacacacaaatatatatgtgtgtgtatatatatattgcccaaacctgtctctacaaaatatatatacattttatatatatatacacattatatatatacacattatatatatatatatgtacacacacacacacacacacacacacacacacatacatacacactctaaaattagctgggcgtggtggtgcatgcctgtagtcctagctacaggctaggactgtagcagaggctgaagtgggaggataacctgagcctgggaggtcgaggctgcagggaactgtgatcatgccactgcactccagccaaggcaaaagagagagaccctgcctcagaaaatatatttatcattaatctttcaggacaaaatataatttagcaagatttaagcaatttggggtccaaaatcactagctgatgttggtaatggaaatttcagcatggctgtttgaattccagcctctgggcacagtgtgcagcgcagtttccacctgttatcagtttgcagctgtgtgcaggtccacctaagcgctctacccacatgctgccttggaaattacaagaactaattttttaccagcatccgtgatgctagtgtatagaccccaattctagaaaagcatgcttttctgtcagctaataaatgtacagcttaagtataaatctcttggcttctttataaagaataaaaagtagccatgctaatgtggatgcatttctcttgtaacctcttgtattcaaacgatttagttcaacaaccggatccgaaccaaccaaagccggagggggcccagatgctggccatgcgcggagagcagctgggcgtggtcacgaactggccgccgtcgctggaggccgcactgcagaggtggggcaccatctcgcccaaggcgccctgcctgaccaccatggacaccaacgggaagcccctctacatcctcacttacggtaatccccaggctcactctctgccctttgcccaccccctcgcacagccactcccgaacgcaggaaactcagtgtccgtttacatcctcacttaaggtaatcccgaggctaaccctctgccctttgcccacgccctcgcgcagccactcccgaacgcacgaagctcagtgtctgtttaaatcctcacttaaggtaatccggaggtttaccctctgccctttgcccaccccctcgcgcagccactcccaaacacacaaagctcagtgtctgttacttctggtgactgattgattttgtgctgccttatgtttccgcacagaaataaatggaatctcaagaaactctttaggaaaactatttgatttcaatataaaaagttatttgttaaatattttttgagttaaaaccagaaatggctgcttgaagcagtgaccatagctctaataagatgttagatcttaaatacatgtgtgatttattgaaatgcatgctttcagcaaagattggtagttagaaaaaatgtctatctaaactttctggtatgtatcactcagaaaaatcaaaatcggtttccaagggactttttcagaaggccagagaaaccgcctttcccttaagtcttcagtacaattaatacagtctgtaagctttttgcacatggttaacggtagcagagaagtgcgtttctcttttttctgtggataagaggccatggaggggcagattgtcaggctattttctgtctgcttcagctttacaaagaaagtagtaactaaaaggctggcatgatggctcatgcctgtagtcccagctgcttgggagctgaggcaggaggaggaggtcgaggctgcattgagctatgattgtgtcacagcactccagcctcagtgacagagcaagaccccatctctaaaaaattaatcagttagaattttcaaaagatacgaaaataactgaaggaccaaaatggttcatattgtgtctgcatgtctgagatttatgttgatagctgaaattttaaacatagctgtttcagttctagactcttgggatagtacagtacatagttccgcctgttgtcagttggcaggttttgtttttaactttagcttttgttgttacaacacttttctgattgcaggtaggaaaggaattgatttctacattagccatggaggtcaaaagccagatgctatgttgaaccgtggaacctcagaccctagcctttcagggtggggctctgggaggcagcagctgtcaacctgtgcatctcaggacagatgtgggatttgggcctaggagcatattgggtttgggagcgtgcgtttcgtagcccctttgcttttatggcttcattgagtagttttaaatggacagtgtgtggcatccatgatgaagcataaactttatttttttaattatgctctcagaaataggttttattgagtcaaaagcatgaaagacttttctatgtgaccctcatctccggccaaattcagccctggagctaattgtgtacttggagtcgctgctgcatgacagctgatggcctctgaggcctccccgcctacatgcggggaattccaggagcagccgaactgttcgggtgcatgtgttcactctgagaactaatagacgttcacttgggtgttttaagcatgcagtatgcattggcacagaactaagctttgggaaatcaaagacaataagacacagttctcacggggcttctgatgtcgatcagaaggatcgccactctctgctgctggaactttgaacagggttggtgtctttccccttcctgcaaggttaagatgaatgggagacgtaagacacagactgaatattcatatgaaaagttggattcttcagaactcatgcccacaaccaaagcattttaactcctttatatgttgtattttaatcatctatatgttgtattttaattatccattttaattgcaggctgtgggttgatcttggtttttacttgttaaaggaatgtaagaaagcaacacatttccaaatttaagattacagcttatcagatgaaaacgcagtgaacactggaaagcgccatctgcgtagaaacgctaacgtagatgaacgcatgactgggtgttgctacgatgagtcagaaacaagctcgtcgaatgagaattgttctaatactgagtgatttggtatcgaatgagaattgttctaatactgagtaatttggtatcgaatgagaattgttcaaatactgagtaatttggtatcgaatgagaattgttctaatactgagtaatttggtatcgaatgagaattgttctaatactgagtaacttggtgtaactgaaggggctgtattctctaaagtcctgccgtttcccctcaacccccaaatttagcttcctacgaagcgctggggtagcagaattcccagcggataaacttgggatcagtaacagaaagtgtaggtggctaatgaaagccacaactgaataaacttgtaaaacatcattctgttttccactttagactacccgtggcatttcataatcttaataaaaataagtcacgctgtgctgttaatttcccttcacgtcctgcctcacagcagctctctggtacgctcttcctctgcctcctctgtggatttctggagagacctatacgttcatctggctttcctaccaaggagatgctcatgctcatctcccttttaacgttttatttatggttttccttttactccagatgtttcaagaaatctacatgcttgagctagcagcacgctgggccacctttctgtggccttgctgcttttttgcgtggttgatggtgtctctctcaagctcccgcctccttcccgggcttgctccggttcagcccttcgccacccaccgcctctcccctcaccagttacactctgttcagttgcctgttcctcagtcaaagccaagcgaaattacaattaatatctaatacaatagtgctgacatcacacacatctcctttatgaatcagttaagaactgctgtatctttatatcagcagcttaacttcctgccttttctctttgagaagtataaaaataccaaatatatttcaagaatttttccaaaagtttgcatgtgttttatcaaactctctattgttaactagcttgtgtatgaacttaggatgtcaagactcttagctgagaatgaagttgaaactttcacaaactagaatggtgctaattgagtgtaattgatttattcagttacaacacattgtttttctttcagttgcaaagaattgattgtaattgttttacccaactataatagttccctaatcttgttcacattaaagaaatctgaagccacaaaataattgtttttgttggggaaaaaatactccctgaattatatctaatgagccagtgatcttttccaggaaaataaaatcccctaatagaattccagatgactgtaaagctgcccgtcttgaagactgcctatggtgttgaggatgaggagctaaggaagacaggaggagggaacatgaataaatgtgtgtctagcaattaagtgctcaagaatatgctagaatgcacaccgtaactttgtattttattacagcttgcctgcgacatcagtaaaatgaagaaacatttgctgagcacgtagtatgaccgggaagtgtcctaggaaccagaacaatcaaagataatcattctcttcacgttctcattagcaaggggataaatactgtggtagataaataataataacactaatctaaggaactctcattctgatatgaaattaattcagggtgttttaatttgcactgtgttgtaaacgacaaaatctgatttagtgtttggatttaaaagagggaaaagattaaaacagtgatggtactgaaatagaaaacagttaagatagctgttacctttattacactattacagcattatcacgtcttctaacaccttgactactgagacgctctggcagctgaagcctctgagactaggttgtaaaaggccattgtgtatttaagaactcattttaggctttaaagtcattgttatttgatctcagactgttacatttaccattatctttatctgaatccaaggattgtgattaaaaaccctaaaaccctgaggttaggaaagtttgaaggtgagaaacacagggcttgtgagtttggagcctctcgaggcagttttctgctctgtgttgctcacattcacgtgagaccggctgtggatgagggacgtcaccgggagtgactttgtggcagtgacaccgttgcggtggccccagaggactttcctccctacaaccttccccgcggtttctgtgctgaccttgctgcaggcacttcatgcactaagaggggatttgttttgtgccggccttgttccagtgtccaggcagctctgactgttggagtcattgcttttactcctcttgactccagggactcaggatgagtttgaagctttgatctgctaggagaaggttctcagggccctcccgctccctgatggtgtcatttcagctgggcagatcccagccctgtgacgacggtgtgtgcactgtccgcgccccccctcgccacccccacatcacagacagatcagaagacaggccaacacttggttttagcttttttattttcattctctctcctgaagttttgtctttagaatccctgatgcttttctactttcactcattttccattcttgcctaccagttccccctttgctcagctgcccccacttcaagtcgcttgcagaccatgatacgcaggaagcagaatggactcatgtcctagactttgacttgcagaagctgtgctctccgtatggtttaatacgcacatttgtctgtgatttgtattcataggcaagctgtggacaagaagtatgaaggtcgcttacagcattctacacaaattaggcacaaagcaggaacccatggtccggcctggagatagggtaagtgcaacttaaactgctggatctacaaaacacaagagtcctgtgggaaaaggtgcccactgtttaaacattacagagttcagcgccacctccactttctattggaaagcaagtttttattcttaactgctacctggtaagttacacaggacagatactattaatggtgtctccattctaacattacatcctgagcaggtaatggtcttgtccatgctttatgccccagtttagatgtggagcttggtatagaagctggttttcttgcatttatgtgtagagcctttttacctatgtgctttagatgcccccaagattaggttatcctacctaaaggactccaagtgaattacataaagacatcatttagagctccataaaccaacaagagcatgagctttgattacttaagcaatactataaaggcatgagtctgctgtgggcatgttcaacagattgcagcagctccaggagaccgtggcctgggattctttcccattttttattgaacacgtttggcctcttttaaaagtaaattgtaggtgtcatatttcctgatcgtaaaatttactacaaagcttataataatcacaacaatgtggtactggcttagagacagacacatacaccagtggaacagaataaagggcccagagataaaccctcatgtatatggataagtgatttccacaggtgccaagatactcaacggggaaaggacagcctttccaacacacagtgctgggaaaactggacatccacctgcaagagaatgaaggcggatgtttacctaacatcatatgcaaaaaattcattcaaaatggaccaaacgcctaaatgtaagagctaaagccaaaacctagaagaaaacataaagaaaatgccttagaagaaaatatagagaagacacctcatgaccctggatttggcaacagtttcttggatgtggcacccgaaccacaggcaacaaaaggaaaataaataaattggacatttacattaaacatgtttgtatatcaaagagtactatcaagagagtgaaaaggccacctacagaatgggagaaaatgcaaattatttgccaacagagattaatatctaaaatatttaaagaattcctacaagtcaccaccaccaaaaaaagcaacaacaacaaaaacgtttaaatgggccagagacttgagtaaacgtttctccaaagatttagcagtggccgataaacacatgaaaagatgctcagcatccttgatcagggaaaagcaaagcaaaacctcagtgaaatgctgctttacaccgagaagcacggcaattactaaactactgaaaagggcacgtgttggcaaggatgtggggaagtcggaacccttgcgcattgctggtgacagtgtaaaatggtgcagcctctccgaaaaacgtgacagtccctcaaagaattaaacatggaattactgtgtgatccagcagttctgcttcggggtgtgtacccaaaaggattgaaaacagagtctaggagagagatgagtacactcaggctcatagcagccgactcacacaaccaaatggtggaagcaaccccaaatccacggactagatgtggatttcccattagaagggaggaagttctgacacataacacatggatgaaccttgcagatactatgcctagtaaagtaagccagacacaaaacaggtattgcgtgattccgttcctgcgagcgtaactacccaacagttcaccttgcccgctgcctggccagagccgatttgtctagacggggattgcaatggagaaagtgattcacgcagagctggctgtgcgggagactggagttctattatttctcaaatcggtctccccaagtgtttgaggatcgttcagagtttttaaggataacttggcgggtgagggcttgggaagtggggagtgctgattggtcaggttggagatgggatcgtagggggtcgaactgagtttttcctgctgtcttctgttcctgggtgggttcgcagaactggttgagccagatgacctgtctgggtggtgtcagctgctccatccagtgcagggtctgcagaatacctccagcactgatcttaggttttatgatagtgatgttatccccaggagcaatctggggagattcagactgttggagccagaggctgcatgacccctttagggtcatgcagtaatttctaatcttgtagctaatttgttagtcctacaaaggcagactggtccccaagcaagaaaggggtaatttcgggaaagggctattaccagttttgtttcagagtcaaactatgaactgaattccttcccaaggttagtttgttctccacccaggattgaacaagggacagcttaaaggttagaagcaagatggagttggttaggtctgatccctttcagtgtcataatttcctcagttatcattttcacaagagtggtttcatgacatccctagagtagtccagctgtagagaaacaaaagcagaaaggttaggtgccagggactgggggagaggaatgcaaagttcgtgtttaatagggacagagtttccatttgggaagatgagaaagttctagagatggctggtggtggcagttgtataaccttgtgattgtgcttcatgctactgaattctacgtgtaaaaattgttagaatcgtaaattttgtgttaccacataatgaaacgttaattgtaatggaatagctcctttatctgtaatgtggtttgtagtcttaagagttgttttaaaaattctttcatagtatggcctccagatacttgaagtttccatatgataataatcacaaaataaactcctgtgttcctctaagatgtcagtagagatacgggagcacggtttgatgaaatatgtaaagaggcttattttgggcagggattggtttggcttggttgggtcaggggtgaaggcgctacttttctaaaatttttctgaggaaagattatctgagaagggctctcgaggagaaaagatgagccggtagctcttgggcgggttccaggaagtagcgtggaaggtgctgaagcctttcgcctggacagcagggccggctgtgtgaggagccctggaggggagctgggaatccttcagccggaaaggcctttgctcccctgaagagttgagtgtgcgtctcctgatcggctgatgcctgctgtgtgaataattaggtacagtgaagtatcaaagaagtacacagaggattgaacggagggaagccatgtgggtttacaaaaatcgagcgtctttgtatttgtccagtattgtattgggatcactatggaggtagcaatacaacaggatttgtgactgattcaaatactgaaggaatgcctaacaaaaatgatgtaagtacaacgttctcttccttaaaacaaattgcaaaaaaattttcagttttgatgctaaaagagcctttaagtattttacccttttctatccattacttgtattgttgtgtgtgtacaataatgtacaattttatattctgcttttattaactttgttataccacatttcagtacaactctgcagtggtctataatatgaaattttcagcattaactctagtgataaatcagtgagaattttaaacccctgataaagaagaacttcctttgagcagaggcaacaggagctgggagaggaggcagacacgaggtgcttctcgggagagggctgatcgccgtctggccgtggggatgacacgcatcctctccgtctcagctgtctgcccttggtgaagactctgcctccagagctggtattctgggaagattaacaagtcagaactgaacatgttctcatgaatgggtgcaaccatcagttttggatggaacttcaacatctgaattttctaacgtttcctggtgttttttggtccgccttaggggaagaagttgtacagcagtggtaatgtggaaatcttacaaacatttaactgaatactgtttgttcaccatatcaagatctgaaaaacatgccatcagctctcagtccgtcacatgacactcatgcctagtgtaaacctcggatagtttgaagaaataattggttgtggcttatccgcatagatgtacaaataattttattccctttctaatctctcttagcaaattgtagtggactatagaaattccatacagaaaggaaatattcatatattcatagaatctacaacttaattttgtgtctgccagtgatcctgcattccgacctttccagcatggcctgctcccctctcaatgaccatctggatgcttttatgtcagcctgcttacttagatacacagatgattaggatgtttgtctaaaactgttcgtgatgaaattacttccagttaggacatttttcataaaaaattgtttaacttcaagaatgaggcctggtgcggtgactcatgcctggaatcccagcacttcgagaggctgaggtgggcagatgactaggtcaagagattgagaccagcctggccaacatggtgaaaccctgtatctacaaaaaatagaaaaaaattggctgagtgtggtggtgcatgcctatagtcctagctattcgggaggctgaggcaagagaatcgcttgaaccggggaagcagaggttgcagtgagccgagattgcactactgtactccagcctgggtgacacaacaagactctgtctcaaaaaaaaaaaaaaaatccagaatgaagtaatgcaaaaatgatgcacatgtgctaaatcataggattcacgtgctgatgaacacataccaaacttgtccataaggaagagtaatgctaatgctaccacacatgtaaaatcataggattcatgtgctgatgaaaatgtaccaaacttgtccataaggaagagtaatgctaatgctaccacacatgtaaaatcataggattcatgtgctgaggaacacataccaaacttgtccataaggaagagtaatgctaatgccaccacacgtgtaaaatcacaggattcatgtgctgaggaacacataccaaacttgtccataaggaagagtaatgctaatgccaccacacgtgtaaaatcacaggattcatgtgctgatgaaaacgtaccaaacttgtccataaggaagagtaatgctaatactaccacacatgtagaatcacaggattcatgggctgatgaaaatgtaccaaacttgtccataaggaagagtaatgctaatgctaccacacgtgtaaaatcacaggattcatgtgctgatgaacacataccaaacttgtccataaggaagagtaatgctaatgctaccacacatgtaaaatcacaggattcatgtgctgatgaacacataccaaacttgtccataaggaagagtaatgctaatgctaccacacgtgtaaaatcacaggattcatgtgctgatgaaaacgtaccaaacttgtccataaggaagagtaatgctaatgctaccacacatgtaaaatcacaggattcatgtgctgatgaacacataccaaacttgtccataaggaagagtaatgctaatgctaccacacatgtaaaatcacaggattcatgtgctgaggaacacataccaaacttgtccataaggaagagtaatgctaatgctaccacacatgtaaaatcataggattcatgtgctgaacacataccaaacttgtccataaggaagagtaatgctaatgctaccactcatgtaaaatcataggattcatgtgctgatgaaaatgtaccaaacttgtccataaggaagagtaatgctaatgctaccacacatgtaaaatcacaggattcatgtgctgaggaacacataccaaacttgtccataaggaagagtaatgctaatgctaccacatgtgtaaaatcacaggattcatgtgctgatgaaaatgtaccaaacttgtccataaggaagagtaatgctaatgctaccacacatgtaaaatcacaggattcatgtgctgatgaaaatgtaccaaacttgtccataaggaagagtaatgctaatgctaccacacatgtaaaatcacaggattcatgtgctgatgaacacataccaaacttgtccataaggaagagtaatgctaatgctaccacacatgtaaaatcacaggattcatgtgctgaggaacacataccaaacttgtccataaggaagagtaatgctaatgctaccacacatgtaaaatcataggattcatgtgctgatgaacacataccaaacttgtccataaggaagagtaatgctaatgctaccactcatgtaaaatcataggattcatgtgctgatgaaaatgtaccaaacttgtccataaggaagagtaatgctaatgctaccacacatgtaaaatcacaggattcatgtgctgaggaacacataccaaacttgtccataaggaagagtaatgctaatgctaccacacgtgtaaaatcacaggattcatgtgctgatgaacacataccaaacttgtccataaggaagagtaatgctaatgctaccacacgtgtaaaatcacaggattcatgtgctgatgaaaacgtaccaaacttgtccataaggaagagtaatgctaatgctaccacacatgtaaaatcacatgattcatgtgctgatgaacacataccaaacttgtccataaggaagagtaatgctaatgctaccacacgtgtaaaatcacaggattcatgtgctgatgaaaatgtaccaaacttgtccataaggaagagtaatgctaatgctaccacacatgtaaaatcacaggattcatgtgctgatgaaaacgtaccaaacttgtccataaggaagagtaatgctaatgctaccacacatgtaaaatcacaggattcatgtgctgatgaacacataccaaacttgtccataaggaagagtaatgctaatgctaccacacatgtaaaatcacaggatttatgtgctgaggaacacataccaaacttgtccataaggaagagtaacgctaatgctaccacacgtgtaaaatcacaggattcatgtgctgatgaaaatgtaccaaacttgtccataaggaagagtaatgctaatgctgccacacgtgtaaaatcataggattcatgtgctgatgaaaatgtaccaaacttgtccataaggaagagtaatgctaatgctgccacacgtgtaaaatcacaggattcatgtgctgaggaacacataccaaacttgtccataaggaagagtaatgctaatgctaccacacatgtaaaatcataggattcatgtgctgatgaaaatgtaccaaacttgtccataaggaagagtaatgctaatgctaccacacatgtaaaataggattcatgtgctgatgaaaatgtaccaaacttgtccataaggaagagtaatgctaatgctaccacacatgtaaaatcacaggattcatgtgctgatgaacacatacgaaacttgtccataaggaatagtaacgctaatgctaccacacatgtaaaatcacaggattcatgtgctgatgaaaatgtacgaaacttgtccataaggaagagtaatgctaatgctaccacacatgtaaaatcataggattcatgtgctgatgaacacataccaaacttgtccgtaaggaagagtaatgctaatgctaccccacatgtaaaatcataggattcatgggctgatgaaaatgtaccaaacttgtccataaggaagagtaatgctaatgctaccacacatgtaaaatcacaggattcatgtgctgatgaacacataccaaacttgtccataaggaagagtaatgctaatgctaccacacgtgtaaaatcacaggattcatgtgctgatgaacacataccaaacttgtccataaggaagagtaatgctaatgctaccacacgtgtaaaatcacaggattcatgtgctgatgaacacataccaaacttgtccataaggaagagtaatgctaatgctgccacacgtgtaaaatcataggattcatgtactgatgaaaatgtaccaaacttgtccataaggaagagtaatgctaatgctgccacacgtgtaaaatcacaggattcatgtggtgaggaacacataccaaacttgttcataaggaagagtaatgctaatgctaccacacgtgtaaaatcacaggattaccaaacttgtccataaagaagagtaatgctaatgctaccacacgtgtaaaatcacaggattcatgtgctgatgaacacataccaaacttgtccataaggaagagtaatgctaatgctaccccacatgtaaaatcacaggattcatgtgctgatgaacacgtaccaaacttgtccataaggaagagtaatgctaatgctaccacacgtgtaaaatcacaggattcatgtgctgatgaaaatgtaccaaacttgtccagaaggaagagtaacgctaatgctaccccacatgtacaagtaacctgtgttaaaatagaagcagagttcacagggcttagtgggaatccagaaatagggttgtctattaacactctatcatcgaaggaaaattgttcttcgtcaagatacaccatactgttaaggaccatcagaaaacatactggccaggcaacagtggctcacatctgtaatcccaacactttgcggggaccaaggcaggagaatcgcttgaggccaggagtttgaggccagcctgggcaacataacgagaccccatctaaagatattttttaaaaattagctgcatgcagtagtgctcacctgtaaggcaggaggatcactggagcccaggagttcaaggctgcagtgagctatgattgtgccactgcactccagcctgggtaatagagtgaacttgtttctttagaaaaaaaatcataatatctattagtaggtaccaatattacttggtaatttacattaaccacacttttagaactctgataattctactcttaggaacttagttcttaagagaggctgagctggcaggatgggttggtgccacatccaggcagctacacagggaagactgctgcagggccagggcccacaacacatgcacgtgtgtggcaccaggggactgatgctgccaccagccctagtgccagtaacttgggctttactcatagtcagcctccacgaactcacgccatgtgtgaagcagcccactgagttctctatgtgcattctctcatttgaccttgaccaccgcattaagacatcagctctatcattattctcacttttcagagaagaacactaaggctcagagaggccacaattgtgcctgagatcccagagccaaacactgccatgggatctgagctgagtcctgcacatgctgtcccaggacagttatgaagactgtatagaaatacaaggaagtatttacaaagcttagtgagaaacagtaggatataacttcatctatgtggaaacgtgtgggtatggaaggtagtatgcagaaaataaaggcagttgtactctggtgacagtatcatagacgactgttcacgtttgtcttctatatgaattcaaggccgggtgtgtgatgcttattaaaacacagcttactgaaatgcattttacataggatctggttctcactgaagcgtgccctctcacctagaaccaagctcttccgtggcgtcttaggaagccaggaccccacgttaatgctgacccgctctggcctgtcccacaggtggcactggtgttccccaacaatgatccggctgccttcatggcggctttctacggctgcctgctggccgaggtggtccccgtgcccatcgaggtgccgctcaccaggaaggtaaggaatgcgccctttgctcggtttctcgctgagtgagatggctttcacggtggctgtatcccggctgggtgagggtctcctcgctgtttctggggccctgggtttccttcggttgcctcgataagggatgcggtcgctagtgggccctgcagcctgggatgggcgtcctggaggtggagcacagcttgctttggggtcaaacgtggatcagcagcctcttggtcagtaaagcaagggtgtttgagaatcttgttccttggtgtcatgtgcactagaattggggtaaatgatagtttttttttaattattattttgaagggtggtggatgctgcttttgttcaggtgttttgacatccagtccaaggttgacctatgatttgtcaggttttattctataatgaaaataagctactaaacttgccattgtaattattgtttaatccaatgtaaagaaattaatgtgcgttgtcaatcaaaaagtatttgagacaggtttcaatttagaattttattttgccaaggttgaggacgtggccatgccacagcctcaggaggtcctgagaacgtgtgcccagggtggtccggctgcagcttttgggttcgtacattttagggacacatgagacattaggcaatacatgtaagacatatgttcatttggtctagaaaggtgggacagcttgaagccgcagtgggggccttccaggtcacaggtggattctaagattttctgattggcagttggttgaaagagtttatctaaagccctgaaatcaatagaagccagtgtcttagggttcggggttgtggagaccaaggattttattatgtggaggaagcctccaggcagcaggcttcagagagaataggtgtaaatggttcttatcagacttaaaaatgtgccagactcttagttaattctcccctggatcaggaaaaggacctggaaagggaaggagattgtctacagaatgtagattttccccacaagagagagctttatagggctatttcaaactatgtcaaagaaatatattttgaggtaaaatacttcgatttctttcagggcctgctatttgtcatgttggtatcttattgctccagagagtcagctttgtcagtctggaggtgtctgttttaatgccattgctggtcaactgtgtctgaatttcaaacagaggatgagggagtaaggggggcatgtccgacccctccttcccatcatggctgaactggtttttcaggttaactttggaatgtccttggctgagggaagaggtctcttcagttggttgaggggcttagaattttatttttggcttacgctcataccaatgtaaggttttagtccatgtggatggtttgttcttctgtaaagcagttacggtaactgtaagagacatgaagtggggcggctgcagtgcaggtcacgctgctgctccctgtaggcggccagtcgtgtaggaggaagccagcagcacgcgccccaagggactgcccaggtctgaacctgcaatgtgcctgtgcacactgcccttaaaccatcagctcccttcagcacttttttttttttttttgagatggagtcgctgtgtctcccaggctggagtgcagtggcacgatttcagctcactgcaacctctgcccctcgggttcaagcgattctcctccctcagcctcctgagtagctgagattacaggcgtgtgccaccacacccggctaatttttgtatttttagtagagatgaggttttgttacgttggccaggctggtctcgaactcctgacctcaggtgatctgcccacctcggcctcccacagggctggaatgacaggtgtgagccactgcgcctggcccctttagcacatctttaatgtgtgcacagtgtgggtgactcttccagctctaaaaggcaacaatcacaggtagcccaggcaaagaaacttcagctgtctttgtggctactccagcattaaagtttgttgactcaatatttaagaaaaccatctgccacgtgggtatctcttcagagtctgtgccagttacatggttgcatttcaaacttccccttggatgggaagggagagaacacggggttccttttggaaacaggaaagatgattgctattttcatttcctatgtacaaagccaggaggttcatgcttggcctcctgagtatgctcgtgtctggcagaggcaggggagtctgtggtagctgctatgggagaatgccagtttcccccccaccggatttgcagccagtttcccccccccccaccggatttgcagccagcactccacgtgtgcatcagacagctcagacttcccgtgaggtgctttctcatcccctgggtcccatggtcttcacaacaggtgagaaaagtggaaggactggaggactccagtcatgcttacatgacagcctcagtactatagttaaccccagtcctgggatctagtgaggagtttacaaggcttctcttcagctgatgttcatgtccatggttaggggctctctggacatgctctgaggtctctaagcgacagtgaaatgatgatttgcaggaacttgtaggcatgagcatatggtgatggttcaataaccagacacaaaacatttatcattgttattcgtaacaattattcttttcttcactttaataatttgtatttatccatgttaaagtgtatagcctggtgtcctccagtccaggctggtttgtagaggaaaatgatttggataaaggggggaggtggttttcctgagcatgttggagtgctgctctcaggttggcagaaatgccatcctattatctcaaatcctaggcatagctccaaataccaaggtggcatttatttcagccatgaaacgtttcactgtaacacatttaagatgctttgaaataatgaattaagtacctttgaatggtagtagagacataaaccgtacgttttgaacaaatcagaaatctttccaaggccacgtggctgggaagctgtggcagtgatgatggaggaagaggacagttttcctctcccacaggaggacccaacagtccccctcagctgagagccccttgtacccgagtagaggctgcacgttcactgtgcacagggcagggtccacatggggatgaggggcatctcggggggactctctgtggtccgagggcagggagcatagcaggagaacagtgtggggacatttcaggaggccaggacttctcacgctgggaggtccctggggacttacgtgtcagtgactgtaacctgtgcatgtgatgaggacacggggacaggaaagatcccctgcctgtccctcacctccaggacatagggaggggccctctgtggctatggttttatcaccaagcaccaaaacccctctcagaagaaagggctgacattcctgtcttgccctctctgtgccaatataaccctgaggtgactttgcctacagatgcctcaggctttgcagaaagctgtggagaacgcacagaccttaacaaggcatttagaaacctttactgtgccaaccagtggtcatgggatagaatgctagggaagccacaagtgatttcacaggtgaagtacagagaccctcccctgaggccgagcctctcaggtctaaagacaccgtgacttgattttactttttaaatattattttaactgacaagttataattatatacatttatggggtagagtgtgatgttctgatatatgcatacgacgtggaatgtttatcaaactgattaacatatctgtcaccttgcttacctctcattttttatggtaagacatttggaatatactcttggttattttgaaatgtagattacattttcatttattatagttaccctgctctgcaatagatctcaaaacctcttcctccaatctgaggctttgtctcttctgaccaacatctccccatgtcctccctcccccccatctcctccctcccccaactcctccctccccccaactcctccctcccccccagccctcgtggtcaccattctattcactgctaaatgccacgtgtaaatgagctcatgtagccttggtctttctgtgcctggcttatttccggcagcctaatgtcctggttcagcatacggcaggcttccctcctcactgacggctgaatagtgcccactgtgtggcacagtgtccttcctgttcagcatacggtcaccttccctcctgtctgaaggctgaatagcgcccactgtgtgaggtaatgtccttcggttcagcacagagcaggcttccctcctccctgaaggctgaatagcgcccactgtgtggcctagcgtccttcctgttcagcatgtggcaggcttccctcctccctgaaggctgaatagcgcccactgtgtggcctagcgtccttccggttcagcatgtggcaggcttccctcctccctgaaggctgaatagcgcccactgtgtggcataatgtccttcctgttcagcatacggtcaccttccctcctgtctgaaggctgaatagcgcccactatgtgacgtaatgtcctttggttcagcacagagcaggcttccctcctccctgaaggctgaatagcgcccactgtgtggcataatgtccttccggttcagcacacggcagacttccctcctcgctgaaggctgaatagcacccactgtgtgatgtaatgtcctcctggttcagcacacggcagggttccctcctcgctgaaggctgaatagcacccactgtgtgccataatgtccttccagttcagcacagagcaggcttccctcctccctgaaggctgaatagcgcccactgtgtgacgtaatgtccttccggttcagcacaggcccggcttccctcctcgctgaaggctgaatagcgcccagtgtgccggctctgcctgctctgcatccattcgtgggtctttgggcactgtggttgatttgtcttcttgacccttgtggataacactccagtgaatgtagggatgccgataatctggattcctgatcaatttcagttcctttggcccaatacccagtagcaagattgctggatcatatggtagttctatatttaggtttttgagaaatctccataccattttccataatggctgtgctaatttgcattcccaccaatagcgtgcaagggttttcttttctctgcatcctcatcaacgggtatttttcctctttttgataaacacgttgtaaccagtgcaagaaatgtgaggtgatgtctccttgtgggttgttttttttttttttccttttcctttttctttttctttttttttcttttttttttttttttttgagacggagtctcgctctgtcacccaggctggagtgcagtgacgcaatctctgctcactgcaacctccgcttcccgggttcaagctattctcctgcctcagcctcctgagtagctgggattacaggcgcgtaccatggcacctggctaatctttatatttttagtagagattggggtttagccatgctggccaggctggtcttgaactcctgacctccactgatctgcctgccgtggccacccaaagtgctgggattacaggcctgagccatcgcgcctggcttccctgtggttttaatttgcgtttccctgatgattagtgatgtggagcaccttttcatggacctgttggccatttgggtgccatcctttcagaagtgtgcctttagaaagtagcagcttattggtcttagagaacttttcttatttttaactgaaagaatctgttggctatggtgcaagtcaaagtgaggtcagatgagcatattcgtgtagttaagtatgtgaatcctaatattgcttccatctgccagtcctacagccgctagaagtgtcttcgaataaagaccctgatgagaacctagttttctgaatgcatcctgggaggattctttttattcactttcctgagatgtagcacctgtttcccggagttggcctcagatccagccagactgaggccgacgccacctttccaaggacagaggactgaggcctgtgagtcaggaaagccactagtccaggtgcagccgggtcccgtccttgggtcaccggcagaggtcgtgaggcccactgaggacccgcagccctttgcttcaggtgctgtgtgcagggtccatctgtctggtccctttctttgttgagtgtgtgtgcgcgcctgtgtgtgggcacgtgtgtgtgagtgttgagtgtctgtgtattgtgtggggacgtgtgtgtgcgtgggcgtgtgtgtgtgtgtgcgctgagtgtgcgcatccgcgtgtgtgcatgggcgcgtgtgagagtgttaagtgtgtgtgtgtgtatgtgagtgtgtgcgcgtgtgtacctgggcgcgtgtgtacctgggcacgtatgtgtgttgaagactccactgggctgcctcccacatgggtgtgtagggtgagacatggttaagtgctgttctgagcacactggccagggctgggcagagctgtgctgagggctggcgtctgacggggccgcggggggcactctacacgtgcggaggagcagcaggcccagcctcaccttggctgaatagcagccgcatcctcccaggcctgctgctcctgtggttttcagtctcttccttattttttgggatcttcttatgtgtatgattttatcatttgggggattaaatcacgggcggacactaccagggcagggtttagcgaaaggttggctcctggcctgaggtcagcattccacccacagccatgagcgactggcctcagccgttcctccgtcttgtgacagtcacgcgtgttctcctgcctcggcccggcacttcctggctcagcagagccgccttcctgctgcagaagctgatgtcgccccacctctgcccctcacctgtgtcccttcaagagtcgggacgtttgctaatgtgatgttcagattcacattaaagtgactgattagggctttacttgagcaagcagcatctgtgtgaaaagcaccacaagatgtccccgaagtgggttccatctgtccgcagagctcccggcggccagatcttggggagctgccctgcatgtgctggttggctcatttggctgttgctccatgaaaattccacagagaggcgttttcactgtagatttaaatctacaataagaaaagtactaaacacttaagagactacagctttgaaattttaaatctgcctaatttacccaggtgaaaacaccactcttcagctcatgttttcctgttatcagggaacaggtgggaagatccacagccaggcctctgattactgacagcaaccaggccttgtagggtccataattgaggggttcatgctgagccatctggggagcgaagacggtgacttgctcactacaatgtggcatttttaggtcctggaaccctggctgttttggagctttcagtttattttatgaatcaaataatggaaaacccacacagctggcacagctggtgggcgtagagagagtgatgcgagtgccttggctgctcgcccacctgcctttgggcagctggacaggagtgacgactggcgtaggtctgttcaggtctgaccttcccaaaccggagctggcagcctggagccacctgtatctggtgtctccagtggggctgcacagcagtggcctgtttcagcaagcttcagttagttcgttgagactgggctgctcagggtgaggagaaagtgacccaggtcttccttcctctggccgaggtgccctgcctggcacccatgacaggtgtgcctttcgtgcctttggtctttgagtgttttaaagatcaggcacttggtgttagcatgttagtagaagtgttttttcaggccctgtctattctctacagtaattgcattgtataatcatagtcttatggaattggagagagctataacagcaggctcttaacgcgacccgctgaacgccagcctgcactgagcactttccacaccctcttctaatttatccctcaacaaacctgggagacagctgttctttctatacctgttttacacgtgaggacactgaggccatgcagtctcacctgttcagggtcccacagataccaagcagcagggctgggggttggatcctggttctgcagactcgagggtctgtgtgaacgctggagggagggccgaaggctgggcggagtggggcaggtcgtggattctcaactcctctctgttgccctctcaggacgcagggagccagcagataggtttcttgcttggaagctgtggagttactgtagccttgactagtgacgcctgccataaaggacttccaaaaagcccaacgggagagatcccacagtttaaaggtaagccaccgagcctccgagagctcgcatgcccacgtcctttgtcagaagacgggtgcgggaatacgtcaccccgcctcggtttcaatcctctgtggaatgaaacgtcagtcacagacccacgagttttcacgcgttctcgtccctgatgacacagccgagttgccagcccgtggggtgacgtgaggtaacgcatggtggcggcttgggtgctcttctgttgatgtcttagatctcgtgaagtccggagacaccagagattcgatctagttgacgtgtttgaaagggtaccacataaatggggagaaattctacagaccgactttcagagtaacatttaaaaggaacttgttgtttatttccaaggttggccaaagctgctgtggtttgtcacagagtctaaacatctctccaaaccgccccgagactggttcccacacattaaagatgccaataacgacactgcgtatattgaggtgagtcagccttggcctcctccactggccctgagtgtggccttggcactaacgtgtgtttctgacggttacacgagtgccaaaattcagggacttggagaacctcaagtaaccagaaaaactgccgtgacctgtcagccccacttccctcacgctttgtctcgtttcagtacaagacgtgtaaggatggcagtgtgctgggtgtgacggtgacgaggactgcgctgctgacacactgccaggccctgacgcaggcgtgtggctacacggaaggtggggtgccagaccctgactccttgggaccctggttctaaccgggacacctgacacgaaggccacatcactcccacgaggagccatagaaatagcgtgaagtttgtgcccagctccgctgacatgaacttattgttgagttaggatatcagctcagcctaccatagcaaatactacagactgggcggcttcaacagcagacatttatgtccgcacagcgcggaggtctgaggtcagcgtgtccttgggcagttcccagtgggggtctcttccaggtttctcgtaggaggtgtgagaagatgtgcagttaggaacccatccctaccaccccactgaatgcaaaggacctcctgaaaggtgcgctctccacacagccacgccggggcctgggcttcagcatgtggatctggggagacgctgttaacgccgtggagcttcatccctgggtgcacatgagcatatctttagttgtaaagaaaacgcctgtgtgtccacccaccctcccaattgagtcagagtctctgcattggtgctcgtgatgtgttttccttcccccgggtgggctggtatgggaggcaaagaggggaagtgagtggagggaacttgagtggagggaactgtggcaaccacactgaaatggcacagagaggggagggtgcgaccccggggaccccagagactccccccattggtggcctgagtcctgctgatatcccctgaaacctcctgagatgttctgagacgttgtgatgtaccctgaggccctttgagaccccttgagaacccccatgcccctgagatcccttgggatgccctgaggccctttgagaccccagagaacccccatgcccctgagatcccttgggatgccccaaggccccttgagacctcagagaacccccagagaacccccatgcccctgagatcccttgggatggcccgaggccccttgagaccccagagaacccccagagaatccccgtggccctgagatcccttgggatgccccgaggccccttgagactccagagaacccccccatgtccctgagatcccttaggatgccccaaggccccttgagaccccctccggagaccccctgaggctccctgacatccccttgaccaggctcctgacagggcaccgctgcggcgtgcacccctgcctggcgtctctttctggaacttcacgaagccgtggtggcatctgccgctccgctgtggaatgaaacacttttctttttctactatttttattatctgcccatcctcataatctcccttttaaaaacagcgtgtgtgtctcgtgggtattctgatgtttggccatggagttttcacacctggggacgcactgccccctgcgcctccaaggtccagggtggtcacgcttgtggaggttggggagggaatgatacgttcgctctttacttcactactttcaaaaggaacttaggttgtttacttttggccatttattgtgaaagcctcctgtctattatcctccacactttagcctttggaaggggaggtgagactgagtcacctgcaggcagctgctgaccttggctggccaggtgacttcgggagaaagctaggtctgttcagggccagcatgctctgtgatggtaaacctcatcaagcacgagcttttagcacctttttagagccctcccccatagtcattgaatagattgtcctccccgtcttccaaattgcagtgcctcctttttttattgcagctccaaccttggagacttgcagtagagctgtgtaggcccctgtgttgccaaaaatccacttcctcctctgtgcgcagagggcatgccagctgcaaagcttcctttcctgggagactcatgaggaagtgaaaagaaatcttttaaagaaaaaggcagagagggggaaatatataaaaggagaaggaacgctgcgttttaaggtgcagtgtggagagctaacgctgctcactcatgtgtcaggatatctgtcgagaaactccagggtggccggcactcaaaccggcctacttggagtctacagaatttccaccaagatacggcaaaatgatattttcccaagatctgttatttcccctgatgcaatattggattttgtttgcattttgatctgttgccgccctgtcctaagtaaaaatctcctgactccctctgttgtgcagctgaaaccattgtgaatgtgctggatttcaagaaggacgtcgggctctggcatggcatcctgacagtaagtgaggtccccccggccgtgtctgtccacaaaggagtcccccaccctgccctgcctgtccacacaggagtccccctccccatactgtctgtccacacaggagtcccctccccacactgtctgtccacacaggagtctccctcccaccctgcctgtccacacaggagtcgccccccaccccgccctgcctgtccacacaggagtcccctcccctcactgtctgtccacacaggagtcgcccccccgccgcccgcactgcctgtccacacaggagtcccctcccctcactgtctgtccacacaggagtgtgctgggtgtaggaatacaaatgcctagatttgcctacgtttcacttgtgcaagctgcttcctgccacactgtgaagcagaaaatcgtcactgttagaagaccgaggttgtccactaacgtggttcacaactgcaccacaaagccagttgtgtcagcagccactggtgtgagggtcttggacacgtggattgaggttacagctgccgaaaacagccttccagggctcacgtggagatcattatctttcttcccgcacttttggcattcagtatcttagaataacgtcaaaggttggttcgtgtgtgggctactgtcccgtacatctggttagctggatgtttctgtttgttgagtcggtggggcctgctattgtgttactctgcgggggaaagtagtttccagatttgcccttgaggatggcagtctgtgtgtgttgtagggaaacgactgtctcacagtcacgagtgccctggatgacgtgccgggcttgggcacttttcgtggggaagtagccttgttatttgtttaaggtgggcctggcccttaaaagctacgtggagcatgactgcttagacgctccccccatctgtttcatatgtggtaattttcactcatttttcttttgaataatttcttacgctgaagcttcttaccttttggaggtagaaaattctaggagttgtcacatgagtgatgggcatatgaatacaggaattcctgtattcgccgtttcttggcgaaccagaattcatgtgaagaggagccggcaagcatttcctagaccaaatatctgtggctgcagagcagcccggctggcttctttccgtgttacacacaggtcgtctctcaagtctggatgctgttgggggataagatggagcagcgtgttcccagcaccactgtgtgctggtgcagtggggagcccctgctttgggattgaaggacctgggataagatggagcagcttgttcccagcaccgttatgtgctggtgcagtgggagcccctgctttgggattggaggacctgggcttgtgtctcagcctttcctttcttagctttgtgactcaggcatgtcagacgtgcgtccaagtcccttctcaaatccaaacctcagtttttctgtctgtgaatggaacgacgatcctatttgacgtggccggtgtgagaattctgtggcctaaagttgaagcactcactccacctacacgtttgacgcatgtgattcaatgatcaggtcccaaagaacagacagctacatcactggtgccgttagtcactctcgtcattagaacacccaactttccggctgtgacgttgtccacacagccctgctttcgaggcctcgtcgcggggccgcctctctgaggagctcccgctggtggtgccagcctgcctgctccgtgctccggggtacagctggcagccctggcaggtgcgagtctctccactgtcacatctaaagcgaggtctctgagcaggcagcagcatcttttgagacacccttacctcccccagcagagtggcggggagtcggcagagctctggggagtgaaggcacatgcttttttgctttcatctggagcttcccaaatcgagccagtggcagaggggtctctgccctctcgtctgcccccaccccgtagcctacaagactgcaagaatcctagcccgccacacagcctgccaggtggtgcctggtctgactgctgcggtgtgaggcaggtgtgttgctgccgcccctgtaggtgtgagtcccagcctctgtgtgcagcagcgtgcaggtactagccagtgtttcccagtttatttttgtcagaagtagtaatctgccgcagcaaggcccggccagagccagaatccgagcttcccctagccctgcgattcagagcagtgtgcggttctcaagatgggttctgtgaaataaaagttagcataacacaccgggaagaattaggctttgaggatacgaaaggctgttgaaaatgacgatctgtttcaccaaaggtttcgtcttaaaaagatttggacttaaattacttaattctgtcaggagtagtttagggaaagcagtggagttcgagggagaccttgggaagtcgcttttcatggacatgttttaaaggattacacccagaccctaccgtgtcacattcatgcagaccagccatccctgccattcccacactgaggagcctccagggtcctgtgcgaccgctcctcctccaggcctgtgcagcccggtgtccgtggtgctccctgagagctgctgatcctcgggtcccgtgcagcctggcgtccacggtgctccatgagagctgcttctcctcccagcccgtgcagcctggtgtccgtggcgctccctgagagctgcttctcctcagggcccgtgcagcctggtgtccgtggcactctctgagacctgctgctcttccgggcccttgcagcctggtgtctgtggtgctccttgagaactgctgctcctcctggcccgtgcagcctggtgtccgcggcgctccctgagagctgcttctcctcctccttccctgggggcctgtgcagtctggtgtccatggcactcactgagagctgctcctccactatgcccctctgtatttgccatccctgccagccccaccctgaggagcctccaggggcctgtgtgcatggtgtctgcagcgctccctgagagctcccccctgcccgtgcggcctagtgtccatgccactgggtgagagctgctcctctgcgtgcccctccatgctcaccctgcgtgttcctttgttgattgcagagcgtcatgaacatgatgcatgtgatcagcatcccgtactcgctgatgaaggtgaaccctctctcctggatccagaaggtctgccagtacaaaggtgggtctcgccgggcgcagtggctcacacctgtaatcccagcgctttaggaggccaaagcaggtggatcacctgaggtcaggagttccagaccacccgggccaatatggagaaaccccgtttctactaataatacaaaaattagccaggcctgatggcgcatgcctataatcccagctactcgggaggttgaggcaggagaaatcttgaacccaggagaaggaggttgcggtgagccaagatcacaaaaaaaaaaaaaaaaaaaaaaaaaaaaggtttgtgggggctgggtgaccagtgattcttcacccttccccactactcacaatgatctctcttttgcaataggggacgatctgacggtggcacatgttaacttatttctatttttctttttagcaaaagtggcgtgtgtgaaatcgagggatatgcattgggcattagtagcacacagagatcagagagacatcaacctctcctctctgcgaatgctgatagtggcggacggcgcgaacccctgtaagtgaggagcgtgtgatctcgtgaggcaggcgggctgtggagtcttttttttttttttttcgtgaggcaggcaggctgtgaagtcttttttattttttccccaggtttcattctttgcactttgatttttctttttctaatccttatcttagtaaagaaattgtcttaaaatcaccaaacagtaatcactcactcgggccaagaggtacgatggcataataaggacaggcatttgtagactccacagccctgggattcagaggatgtcttgattctgtagagaaagttcctttgctgaccctgtttccccggctgtaaaacggtgcttaagtcataaattttcatgaggatgaagtgaagtaagccctaagcaggtaataaggaaatattcaagaaatacttgactgctagtactttttggtgtatagtagttttcttgatcagtaaattaatttgtcgttttaaatgtaattgcgttatcacatcctgtaacaaaaatacccagttaaagtaaattagcagctccacagaatactataaatacaccttgagaaatatttcagccaactgaaacaagaacctagctagcatgcttttgtgaaaaaagtacataaagcttcagaagcaaagtgaaattaaaggtatctgaccacatttatgaaacatgcaacgttcatgtttgtaaactaaagcagcataaactcctttaatgcctgatatacaaaagcagactcataaacaggttttataaacagtcttcacttatagaatttcataaatcctgagctaatttaatgaacaattggttttaacccataagtacaaaacaatacatcttgcataaagaaaagtatatctatatttggagatagtttagctgatatgttcttgataattgtgcctcgacctcatcatttaaattaatagagaggaaagttttcttcatttggtttagatttacccctgtcttggaacttctgtactgaaaatggtggaacaagtctcagaaaagttactaaagtaagttcatctgtcagaaaaggtgtcataaatgtggaggttgcattctttaaattcttgagttctgtttgagaataaccactttcagtgtaacataaataataaattgtattaaatatttttccacgctgcctagatccacttgtgcctgaatcccaccttcggaactattttctatggtgggattttgtaatcaatcacagtgcttcagctgtctgatcattgtccctctttcactctagggtctatttcttcttgcgatgcatttctcaatgtcttccaaagtaaaggccttcgacaggaggtcatctgtccttgtgccagctcgccagaggccctcactgtggccatccggaggtactgggtcatgttgatttacgtagataacctagagacagtcctaattcagcagcgaagggagatcaggaaatcctaacagttgatgctgagggtgagggtgaaaacgggacctaacctttcaagatgagtttatttctgtttttatgtgctggaacagattcttttgaacagcctagattcattcattaaaaaacatttatcgctctctgcagtttcacggtaattccttaataagtggaactgtctagaggcgcatggaatcgtaataccgtgtccttggaatttactccaatttccatgtgcgtgtaccaatctctggtttcttctggggtgggatagggtctgttttcatcagcctgcttttcttgtagtgttaccgacttccatgtgctgtgggatttactggtatatttattttttcattgtctgtctctggtgtatagttgatgcctaatacatattttttgagtgaatgaaagtgaaatttaaagtaggtaaattcagagtgcactttgctctgacaatctcatgtcatgcaccagaagtaaagcccaaacctcttcctgtgtgatacgcacacacttgacattttacctaagtggagccgtctgtgggtttggggttttgttttcattttccttggtcaacgtaggtgccactgacggcctaaatatgctgttgtaggagaacaggctcctgcagagaagttgtgtcggctgtcaacggcccatccaaggctggtccagagggaaggtgtggcaagagagaggaggtgtggtgtggggctcttggggcagcatgtccacggcaatactcccagtggtggggaagagaaggaccattcctttcctgtggggtgagctctggagtgtagagtgagtgcaggagacctgcttgcaacaggcttcccagagcagtgtgtggtttttaaattattgcaggcagaactgtggaagggcaggcattgaccaggacacagacagaaataacaagagcaggacgtgtctccctcccactgtcttgcctggtgttgcacgtgggcacgcatgtcaggtcggctgcggcctgctcccgtgcagtgtctggaggagtggtctctggacacggcccaccatgggttacagcagcccctctccagagccacctccctggagctggcttcagtggtcttctctggtgtgccacttttctgattggcgtgattgggctcaacacaccgaaggaccgaaaaggattaaaggtacaattttagcattccaggttgaattagaaatgacagtgtcctgaaaactagaagcagcccgcagtgtccccatgccggttctccctgcccctccatcactcagtctcattaagactgtctttttatgtcgttatcatgcatatgatgcatatttaaaccgttcagtgctgatgctgtaagaaagaataatctgtataattggccattgcagttggactccctaatttcctgagatgaattaggcagcaactctatctcagtggtgaaaatctttaggagagaagccaatgctggtccttagaacctgtacctttcgttaccctgatgtttaagttacttttgaataaatttgatgaaagcagcactcgtacttgcgtttccaccaacacatccctctctgcattgttttctgaatgtgtgaacagaagggaaacttccctctgtgcgggggtttcagttgtgtgccacagaaaggttgggacagatgcgtgtttttggaaaatgagccagtgcctgtgaactcaagtgtattctgtcttaaaacttgaggtgaatttcccatgtaggagtggtcagaggccaggttattaagtgaaaaacggctttcgtacattccgtaaagctgtactaagtgaggtctggcaaggcttccctgtaggttttggcatgagaacaaaatgaatgccttcttaaaggtcgtcacgtccaatgtgggaggcagtacagcgatctcattttatttactccttatgttttttaaagaagaaagacaagtgttcggctgctacattcccctgttttgttgcagagaagggtctgtagaggacggattatgcctgtttggatgggttcgaggatggccgtttcctctgtgttgtgatctaagcatttgtgtcctgcgtgttaaccatcatccagggacagcctcttctgcctgttaaccatcatccagggacagcctcttctgcgtgttaaacatcatccagggacagcctcttctgcgcattaaccatcatccagggacagcctcttctgcgcgttaaccatcttccagggacagcctcttctgcacgttaaccatcttccagggacagcctcttctgcgtgttaaccatcatccagggacagcctcttctgcacgttaaccatcttccagggacagcctcttcttcgtcttaaccatcatccagggagagcctcttctgcacgttaaccattttccagggacagcctcttctgtgcgttaaccatcatccagggacagcctcttctgcacgttaaccatcttccagggacagcctcttctgcgctttaaccgtcttccagggacagcctcttctgcgtgttaaccatcttccagggacagcctcttctgtgcgttaaccatcatccagggacagcctcttctgcgtgttaaccatcttctagggacatcctcttctgcacgttaaccatcttccagggacagccttttctgcctgttaaccatcatccagggacagcctcttctgcacgttaaccatcttccagggacagcctcttctgcgtgttaaccatcttccagggacagcccctgctcctggtatcaaagcagagactgaacttccaggtgctgagttgcagctggttggttgcttggctttcagtccacttaatttaaaaaggataacgattatctgcagtagaatgcaaataaaattgcagatgcatttgcttactatttgtagaattttggccctctctggaatatgtatcacttagtgattctcttctgcaaaaaagaaaacaaaaaagtagataaatcagaagctgaggcactcacaagaaagccacccagtggctgcaggtgccagcagggccaagcatggacatctgggctatgagtcagtcttccaggcgtcaaggtccagggccttcaagagccccaggtctgacagggatgcccacagcccactggctgtggagtatcttcatatcactcttgcaagcaacatagaatgtctgtcatgcaaaacagagcatgtcggaaagttctggggctcacaggatcaatggaacctccagtatcccgcttgataaatacgcaggatgcacgggcacttccgggagcagcagcagccctagtgatggggaaggggttggggtggggtagcggggcagggcgtacagaagccagcagcagctgtcaggggttgtggggggggggggggggggcgtggcactcgggagccagcagcagccctggcgatgggtatgtgggagcaggctggcgcctgggccgcaggtgctgtgccctctgtcaggttgcccagcgctgcaggcaggtcactgccagagcttatgccattggttctcccctcacagaaaggccagtctccaaaaaagaatgaccagcactcattttagggaggttgagagtctttaaaaacatgagtcggagactttgaagggacaagggctggtgactcgcctgtcctcacgcatgtctgtgtccgtgtctttatgcatgtctgtgttcacgtgtgtctaggcatgtctgttcacatgtgtctatgcatgtctgttcacatctgtgcatgtctgttcatttgtgtctttatgcatgtccatgggtgtctaggcatgtgtgttcacgtgtctaggcatgtgttcacatgtgtctttatgcatgtctgttcacgtgtctgtgcatatctgttcatgtgtgtatgcatgtctgttcatgtgtgcctaggcatatctgttcatgtgtgtctttatgcatgtctgtgttcgtgtgtctttatgcatgtctgttcatgtgtgtctatgtctgcgttcacatgtctgcatgtttgtgttcacgtgtctgcatgtgttcacatgtgtctttgtgcatgtgtgttcacgtgtctttatgcatgtctgtgttcacatgtatgcatgtctttgtctaggcatgtttgtgttcacgtgtctttatgcatgcctgttcatgcatgcatgccttcatgtctgtcttcacctgtgtatgcctgttttcgtgtttgtgttgatgtgtgtgccttcatgtgtgtctgttttcaccttcgtgttcatgtgtgtcagccaagtggtggcaggaaatcacgttctctagtgaagtctgctcagtcttgctacgtgaactgtattttcacctaggcatttaaagtatttttttctctttaaaactgtcactgtcctgttatattttgtgttttcttttctcccgatgttagttttagagtagaaaaatattggggaaataggggcttgtggtgcctaaactcatcagacattttttaaaggacaaattgcaaggcgaaaaccaggaaactgtttcctggctacaagtatcccctaaatctcctgccatctgactctgttaccatctctagaatgtagatgatagacttgattttcttaaagctacgttgtgaaatgtttattgaactgaaaaacataatttttagctttgtaactacaaagtactatttggataccctgatattttagtaatgaaaatgcaaaaatcatataaaacaatgaaacaataattccagaaaagataaaatacccccttgtcaccacaaccatcttctagtttttgaaagtatccaagctcgaagttagctgggagaaaaatcaaagaagacgtgtccgcagggagaagggtgctgtctgatgcccactgggtgctgatggtgcctggatgagtgacagcggagaaaacgtcagcacagccctgagccaaagtggatccgaagtgagcacttcccactgctcggaaaagtcagacccagagttccataatcccgcatgtaagagaacgcaagataaactgtgtcattttatctaaaaagagggataaaattttgcaattctctaactacagagtagtttcgagatgaaaatcacgtgacccagaccatgagagttaggtagcatcgaatagcaaaccaagtttcctgtttaatttcacccaaccacgtgcgttttacagtgtgttctgttttgtggtgaattagatgatgagaagttggttttggcaaaggaggtgcagcgggaagatggcagaggaggggcctccccacggggtcccccccagttccagcccataacctcccctggaaatagaaaggtggccaaggcttatgagaaagagtttgtaaaaaagtttatatagtgtgatcccgtttttggtaacaaaaaattaagtatctgtaaatagtatattcagtgcaaaaaaaaaaaaaaaactgcgctgcacagggtgggtgaggcagtaaagatgggcagctcactttccgtgctgtgcagcttgtaaaatgggctgtttttagtgggcatgcattgctcctgttagagaaaaggaagaatattacattaaatcaactcataacttaatatattggctgcttttacattgtatcttttcctattaaaaatcgcaatctcacttatctgttgtgtttttgaaagtctgtgtcacgctaaacatcgaaaaaggtacatgcacatttttcactgaatttcccctcgcggtgcgtgtttcctgaaaatattatttctgctgaaatgagttcacaagcttaactgctcctgtcctttaaagggcatttttaccagtactgtgaatttattagttcattctgctgctgtgaaaaagagtggcccagagaggaaagaaagcagaggagatgttctgtgttctgtgtgcgttgtgtggctgccccggcaccttcatcagggctgatttacgtccatctaaaagagaaacctttggtggtgaatggtgattcaagaccagagtagctgccctgtttaaaaaaaaaaaaaaaaagacacttcctcggggttctggctgccagttcagaagggaagaccccccctcccaaccccactctcaaacaggcttcctggtaacttcgcattttgtctggaaccggaatgcgtgttcccaaagaagcaacgttgtgcaggtgcttcgacgccagcacagggaacgtcgtgtgtgggatgagcaccacctcattcttgctctgtgccggctccgtcgggggccgaggtgggcctgggtccttctccctgccggctccgtcgggggccgaggtgggcctgggtccttctccctgccggctctgtcgggggccgaggtcggcctgggtccccatctcgctgctctcgcgcctgctttgtcatgtgggcagggcttcaccttgaggattcctcgtctgtagatgagaatcacagcagttagctacgtcagaggcccgtgtgagcattgagtgggttcatacacacacagagcttgaaagcacgcctggtacatagtaagaattcaacaaatgttaccgccgttacatgactgcaggcgtgttttgtgtgtggtccgttgcatagaaatgctgtgtaaagattgctggggaggaggggcctgcagcttaactctttcttctctaaatgtgccgttgttgctaagctgaggaatactacattggagatcgcccgtataagataaaaaaaatgaaagaccttgttgactcacttgcttaagggattcagcaaatgatgagcggcactgaagctgtgcaggtgcagtgtggctctctgttaagccctagaactggaggctgtgaggcttgttcactacttgatgtgtttgttttgtgtgaatgtcccaagcctggcctggctctgcttgtggtcaggagtagcaaactgcagatgtgttcatgaaatttataggagctgctacttcaaggtgttatgcgggcaaggcttatggaatgctttccagaggctggaaatgctatgacaagtcagtggtgcaaatggttcaatggaagccatagtgtacattcctcgtgaggccacattgcaaggtctggcctgcttctttcctttttgttggtgtgtttgcattgttataaaggaatgtgtgagactgggtaatctataaggaaaagaggtttattttggctcacagttctgtaggctgtaagagaagcatggctccagcatctactcagctcctggtgaggcctcaggaagcttatgatcatggcagaaggcaaagtgggagcctgcatgtcacatggtgagagattgagcgagcaagagagagagagaggaggtgcccagctctattctaaacaactagatcccacgtgaactcataaagtgagaactctcgtgttactgcgagaacaggcccacctgcattgttggacgtcacatttcaacgtgagatctgcaggcaacaaaacatccagactctgttgtcctttagttttattttgtttcccttttgcacgtcatcgtggtattgtatacacaggtacgtattttgctccttccatatctccaagagaggactctgcctccttacattcctggagatcactgagatggtccctcctggaatccatattcttcatgagacacacaaagctgtttggtcttgaacaccatttcacatgggaactgagtttggaagttgatgaatgggcggatacctttattagccattttttaatgtactgatattgattattaaggtggatgttttttaaaccccctcgaattctgcctatggggactgtttcttcccttcctcacctcatctacctacttgggatttttacttcttagcaaggtgttgatggagataaatatcatctaagtttctcaataatacagggaacacaaattggaccaacaaatggtgttttactgaacaaattgggaagcattttaagtgttggcaagagtgcagagatgggcactgctgagcagcttggcgctgtggtcagatgcacagattctgaagccagactgagattggcgctggctccactccacagcagtggctttgggtagcactcagccctcctcgcccctgcccctgtctgctaaacagggagggtcatggtgctgcacccatctccacagggttgctgtgcagaataggtcattaaatatataaccacaacacaatacagccagtgtgaggtgcttttctagtagatgagaaaataatactcctgttctgttagtgggaatgcaaagtatgttattttgggaggatatttaggtcttcttaaaaatttaagtatatgtgctttgtgatgctccattttctttctaggtatgtatattacagatacatttccagctgtataaaaattgaatgaaagaaaatatatgatcttatatttgtattactaaacactgtgtgtaacaaaccagctgaattcagtggtgcacacacctacacagatgcacacccacacacagacacatggaaagatctgcagatatgtttagtgaagagagtgagttttagaatgttggggtgatcagatccaacaccaggttgttggggtgacaaagtatggtggagtcaaaggaatgagaaaagacagtttgagagagaaattggatccggggggctattgcgagtatggaggctgcgaaggccctgagctctggaagcccagactatttattggtgatcaaacaaagaaacaggtgttgagaatgtggggcttgaaagggcaagcgcatgatcttacagctgtgacggtttagcattttctttgaagcatgtggaacatattctgcttgagataatggagagcaggttcttttaactcaggatacaatcgaccctgggagagcaaggagccagcaagtctagacacattccagagccacaagccctggattctatccaagccacgagggattttatgccctgggcttagtttatggtgtgtcagggcagccttccaccctttagcacagagcttggtgttccaaagaccacaaggggttttagaccgtggaccccagacatgttctgagactcttacattatgtcagacctgcaagccctgccgcagcttctcccaacactcagcttttctgccaacatagaataagcatcatcttgattctgcttttcttttaaaaatcaatgtattggtatacatacatattttatacttaactgcatatctaggagtctaaactttgacattaaaaaatctgtatgtggttatttgtggggcataggattggagcagaaacagggactttgccttttgactgtgatgtttgccttgttcatactaagaatgtgctgacgttggttgtgctgtttgcttctaagtttttataaaaagaagagagcagtagactgattcactcagtgtcctgggatcagaggcaaagaccagggaggggcgggcactcaggtcagcaggggctatgctctgggtctgagtcctgccgagccccaccacccacttgggcagtgaagtcaacctttctgtgcccgaatcttctcatctgaaagtgaggaataatagccataggcttatggtgagttttaagcgagtccctatgcatgaaagagtcagaaccatttggcacacggagggtacccctggggcactggtttgccatctggagggggaggcatcagcaccaccaggtcagaagttaaggggtggccccaaacaccacgtctgtggggaggtggggctgtgaggctgccagtgtgtcaggagtacccgcgcttctgtgcctgcctgtgtgccgggagctcccgcgcttctgtgcccacctgtgtgtcgggagcacccgtgcttctgtgcccgcctgtgtgttgggacctcctgcgcttctgtgcctggctgtgtgtcgggacctcctgcgcttctgtgcctggctgtatgccagtgtcttgcacatctgcaaggaaagaatcccggggccgtgcgttttctccgactagcaagggaatctatcaaatatgaataaatgtacagtggaaggttaaattaatgaaggttaacgtggctaatatgaacatattcagcctcctggaactatcattgtataagcataactgaaaagttcctatagcaaacacaatttgtaatcttaacatattcaattattaaatgtgcaggtcttatttctcgttaactgtgtttaaacatagaaaagaggatcttggccaggcacagtagctcacgcctgtaattccaacaccttgggaagccgaggagggcagatcactcgaggtcaggagttcgaggccagcctggcccacatggtgaaaccccgtctctactaatagcaaaaaaattaactggctgtggtggcggcgcctgtagtcccagctattcaggaggctgaggcaggagaatggcttgaatccgggaggcagaggttgcagcgagccaagatcacgccattgcactgcagcctgggtgacagagtgaaactgtgtctcaaaaaaaaaaaaaaaaaaaggaaagggggtttttgtgattgagacaataaaacatacgtttttgggccctgagataactttttcccttccggcccttgcccggcaggtcagtgttctcaatcttggctagcctagcattttgctttcatgtggcttttaaaaacaaaaataagtgtaccttaaatttttatcactaagatagcgtattccggctctcgtaacaaagtaccacacactgagtggtttaaacaacagaaacttgtctcacttctggaggctggagttggagaccccaaggtgtcacagggctgggcgtctggacgtgctgagggggcccaccccaggcctgaccgcagcctccctcgggtgctgctcagctcagcccaggcctcaccccagcctccctcgggtgctgctcagctcagcccaggcctcaccccagcctccctcgggtgctgctctgctcagcgatccgccctgggcctcaccccagccttgggtgctcagctatcctggatgggtacctgtcactccagtctctgcctccatcgtcacgtgagcttctccctgtgtcaggacctctcttttctcttacaaggacagagtaattggatttagggtccattctaacccagtatgacctcatcttaacctggtcataagatggccctggcttacggtggctcaacttcaatttccgcctttacaatgggtttatcaagttgtaagtccaggggcatctgtgtctgaacagcccctgcatccaaataagctcacagatacaaggggtgatcttttgcggggacacgattcaacccacagcagatgctgaagctcacagtgcctgacttccacgctgatctttgtagaggactcttgtagggtgaggggatggtgcagggtgaggggatggtgcagggtgaggggatggtgcagggtgaggggatggtggcaggaccactgacaacacctgtgttttcattttgaagttttgatttgtttggggtctctaggaattaaaggccaggaggataatggaaagcccggggatctgagctcgccctatctaggtagttccgtgtgggttttcttatttggggagacttttcttttatatctggttagctctatcctttttgattcttacatctagaataattctttttccagagtctttcatgcttttttcaatacaccagttacttcattcaaatgagatctccttttccaaatattaacttttatgtttccccatttatgtcttcagtttcattataaaccataatattttaaagttaaacagctaacttatagtccagcttttaggtctgaagtgcgttaaagatttataaatggaaaattacagaaacaatgtgtacctaaattgtggtgactcacttagataaccgttgaggaattgttagttttcaggaatgtaatccgtgatcttagattttaacttatttgttcgcaaattcagtcagcagctattcattgctagacattttccagggctgggatgcagcagtgagcaaaacaaactgtggccgctcttgggagagttgggtctgagggaggaggtcgcacaggtagtcagaggtgtgtgctgtggggtgggcacactgggtggggggtgttttctgaggggacaagaagtcccctggagacagggagagggccgtgtggacgtctgccggaggaacgtcctgggtagcagcgagaaccagcacagaagccccaaggcgggagcaagctggggtgtccggcagaggaggtggggtgggccccagcgtggtgaacgtgtgcgcagtggtcttctgaaaactgccttatgcggacccgtcttctcctgacccacaatgcattctacagcttgcctgccacccaaatagttttccttagaacttggcagccacaatggcacagcgtaaatcttattttagattcttataaaattgggcatacgcccaggcagtctgcatctgaattgaggctggacagtcaggatttccatcattgctgttcagtggttttgtctgcattcttggagtggatgcaccaccctccagacatttgcaaaactagaagagcagaccgtggagtgagcaggagccgggaggaaagagagagctggtctgtgcagggcctggagggaggggagagagagctggtctgtgcagggcctgcatagagggggcaggagaggagctgcgttggtagtttacgggtgttcttgggattccctgggaatgtagaggcggaagcagtagactcgctgccagctgttcataaacagaacgagcatcccctaatgcagccacatgggcagccagcactgtgcctggggtgccagcactgtgcccagaggtgcccagcctgccgcatgtgtgctgactgcacatctgtgattgtgatggcttatctgctcctgcatattcaagttaaaaactgtcattacaggcccacggatgacagtaaccagcccccgggccggggtgtcctctccatgcatggactgacctatggggtcattcgtgtggactcggaagagaagctgtccgtgctcaccgtgcaggatgtcggcctcgtgatgcctggaggtgagtgtgggtcgcgagctgcacagattaaccagttattaaatgcttttctaacacatgtcaccaaagcctgcgttcccacgttcccgcgttcccgtggtgtgccctcaggctgagagcctcactcccagtcttctgaagtctttgttaggcttcagacatttgaggcagtgttccctctcctggtagacgatcaagaagatggggaagggcagctttgcacactgggacctcaggctgctcttccctggaaggcttcggggccagtgcagggtccacactggtgcctgggcagcttcccttccctcccccagaggacgtgcccatctgtcaccctaaggcactagccagagtgggaacagccaagctcggcttccgccaaggcagacacatgtgaaaatcaaggaatgtgagtttgtgtgaccatgaaacctgttttcagcagtagagacctttttccaagtctcagaagccttttccacagatgcatgaggaagcgcccagctgcagggcccgccgtgcctccccaccagccccacgaggagcgcccaggcacctcccaggagccgctttaccattcttagggtgcacacgcttggcgctcaactcatggggtcacaggcagcatcagcccctggctgtttggccccagaaagggaacccgtctcttttctcagctgggaatcctggagcctgtgtctcctgctgagccctccaggcatggggtgtgggctcaagcccagcagggtagccatgcctgtgcgagcagtgctgccgccttcagcagcaggtgcagggcgccaggtcaggtgggcctcagcagggaccctcgccccatggagtctcacagaggcagacccctcatgccccttcatggtgagctgcgctagggccaggcactccagaagctgtctcgcctttctgttcggcctgtttggcataaaagaaatgaaggcagcccgtggcttccctcctcctcactactccctgattccctgcggacgccctccagcatccccgcagctctgcctctgcctgcagccctctagcccctgtgtccagcccactccctgcctcccagctgtggccaggcccccctggctccatttctttaatatttaattttcaaataaatggaactgcatggtgaaatcttcaaaaggttctgaaggacacaatgaaaatgctcctttgtgactgtgagaacaaccgcgggcttcccaggcccctgtcagaggcacctggggctgtgcagcagtgagagcaaccgcgggcttcccgggcccccgtcggaggcacctggggctgtgcagcagtgagagcaaccgcgggcttcccgggcccccgtcggaggcacctggggctgtgcagcagtgagagcaaccgcgggcttcccgggcccccgtcggaggcacctggggctgtgcagcagtgagagcaaccgcgggcttcccgggcccccgtcggaggcacctggggctgtgcagcagtgagagcaaccgcgggcttcccgggcccccgtcggaggcacctggggctgtgcggcagtgagagcaaccgcgggcttcccgggcccccgtcggaggcacctggggctgtggaacagaagcctgcacccccaccccgtgtgtgtcctctgccctgggttccggggttttctcacgtcatgatggagtactgcgtacatacgcatgttttatcctgagggtcctttgtcagcgcgtaacgagctccgcggtgttctcaaggcagcacagtgctaccttgtgggggcactaagtttatttgagcccccccgtttggtgaatttccctcttttgctgctgcagtgagtgaccccctcgtgtctaatggaaacagttctagaagtgggagttgtgtttcaaagagaactgccgatgtgatttttgtgattgtcttttcgaaggttgtgaagctgtaccctgccgagcggtaagcagcagcacttctttctccactccttacccaccgtgttacctgacttttgtttttaccaatctgatgggtgaagaatctttcagtgtaaatttaatgtgaactttttttttttttttttctgagacggagtctcgctgtcgcccaggctggagtgcagtggcgcgatctcggttcaccgcaggctctgcctcccgggttcacgccattctcctgcctccgcctcccgaggagctgggactacaggcgcccgccactgcgcccggctacttttttgtatttttagtagagacggggtttcaccatgttagccaggatggtctcgatctcctgaccttgtgatccgcccgcctcggcctcccaaagtactgggattacaggcgtgagccaccgcgtccggccttaatgtgaatctttcttcctgtgagtttaacttatgtttccactgttctgtactccagcccagcgggtgccggctgttttaggctctttctaaacagctcagctgtcactaatgcacactccacccttctgaagcctgaggctcttggctccctaatcagatttgtggattgcagttggggggtatgtaggatgttgttgggcaaagcatgaaagtgttggtggcacagaccagtgagaacttatcagcattgaaccgtgtgcaaagcgctccagtggtgttctcggaagggctcaccttgcacggagtgtgaaatcgaagattcagatttccataagacattagaggcttgatttgcagaggtcaagttgcaccacgttgctgatgtctggtgtggcaggtggtcctgatgttagttctgaggttcctccccatatctaaatggcagatgatgtcacgcccctaaatacaacttgcgcattaacattaaagcaattgaaatatttattgatgtttcaactatgaaatttgacatgttgctgcaacaggaaaactcatggctctttagggaaaatgagtgcctggctgactaccatccgtgcagttttgctccagaccccattcctgttcactggtgtcgttcatattcgcgtcttccctgtttcctttattctccccacctgccccctctcacactgcatgtgctttcctgtttgcttttagccatcatgtgttcagtgaagccagacggggttcctcagctgtgcagaacggatgagatcggggagctgtgtgtgtgtgcagttgcgacgggcacgtcctactatggcctctctggcatgaccaagaacacctttgaggtaggtggaggagagtcttaccatgggcaccatctgtggctccgtctccaaagagcccttgccaggtgcatagtgatagacgtggaatgtaagatccattttagcaagacgtgtttatatgaatgaaaacgatggcactttaccactttttatcgcttttgataaatttgttttatcagcattgttctgaccttataaccagtgtttaaaagaataagcatgctttaaaaaggatcctttttgttacttttctcacttttactgtgaaaagtggatcattattgaacgtgcacttgtgtgcgtgaagggccttgcctggggaagccaagtggagcccctttacagccccttggcctgggctacacgtggccaggtacgaaccctcgcctggggaagccaactagagcccctttacggctcctcggcctgggctagatgtggccaggtatgaacctgtgagaactcgagcacacgtgtatgtaacgatctcagtggcacaagcaagtatgcatgtggtgtacacagatgcgtgtgtaatgtgcgtgcatggggcgtgtgcacagatgtgctgtgtaatgaagggctcagacacacgttcagtgctgcaactcagaactcttatctttttaccaagtaggtcctggccttagaagtagcacaacatttaagttatatgtaagaaaatataaattgtttggggatacatttcctaaatgtttagaacttttggttgttgttgagacagggtcttgctctgtcactcaggctggagggcagtggcacgttcacagctcactgcagcttcaaactcctgggctcaagccatcttcctgcctcagcctccgagtcactgggagtacaggcgtgtgccaccacacctgaataattaaaaaaaaaattcttgtgtacatatggggtctcatgctgttgtccaggctgatctcaaactcctggcctcaagcaatcctcccatcttagcctcctaaagtgccgggattacaggcatgagccactgttgctggtctaaatgttgagaactttggatgtggctgaacagatgttacagtacctgtctatgatagctttcttgagtgtgaattcaactttctaaaatatccctcgaaactgagctggatacaaatctaaataaaaactccatctccgtttctctggtttatctgcaagggtggaggaaaaaagagggttagagtttgaactgatctgatttgcttccttaatatttttcttttcagcatacttccaacaagggcaaataacattttatgaatgaagagagattactttaaaactaacagacgttgtttaaaatgtaccttgactcttcactcgtcttttacattgtggttttgtaaaccaagtaatcagttactgctgattggcctcctgtgagacttctgggtgttatctgttcagggttcagaggcaggaggctccagcaggtgagtggaggtgcaggaacggatggggtcctgctgaggtgggcaggaagtgcttttctgcctcgaagactgttggccaccagcggtcactgtgacctcggccctagggcagggttgctggggtgaaaggcagagcttaagcaaagcaggtgccgtgctcccaggagtagcggcgaggattaaaaccagctgaccacatgaacagtggcctgatggatgctgtttcccccaggtgtttcccatgacaagctccggggctccgatcagtgaatacccattcataaggacaggcttgctggggttcgtgggtcccggaggcctcgtcttcgtggtgggcaagatggatggcctcatggtggtcagcgggcgcaggcacaacgccgacgacatcgtggccactgcgctggccgtagaacccatgaagtttgtctaccggggaaggtcagtggcgttctgcaaatcaagcatatggtttccggtcggccatattttttatgtggttttgaagggttgaaagttgcacagtttccttaaatgtattgtgtctccgtttcctcttccatgttattgaagcaactggactctgacctctgagatttaatccagttctgaatgtccaagattttatagaaattccctgagctccataaatatatttccattgaacttcccctctaagtataatagaaatatgcattagaaaacttatttctgataaataactgcacaaattaaagatccagatatccatcgtggagcgggttggagagacccaaggacaatggttcagtcacagacttgtgtgagtgcagacgctcgccacctccccgctctaccagttttcttctccctgccttgcctggtgcacagtggaggctccgtgatgaaataagttgccacggttcctgagtttttgccaatctggaggaagtcataaagtgttttagagccttttttcagtttggaagctgatgggagcaggaagtagatacctggatatgatgttgctgcctttgaattatctttacagctacaatctcttttactggaggtgactgtgctgtgctgacagtataaggcacatacacttagcagaaaatcactagttctgaaacggcaaatttctactgatttggagaccgttaacttcacgggtgcaaactcgagctgtgaagggtgtgactccctaaatttcagcaggtctgatcattgcgcatttgcccctctgtaccgaaaggcgcaacctggtcaccagagcccgcgggtgctgtgtgtggcctccgtggggatcagggtgaccttgcctcggcagcatccctgggcgcctcccacagttcttcccgtactgatgagtgtggggaaattcggaagtacagcggccgttttgaagtcgtagttggagctgtgtcactcactagtgatggttatggagcccctgatggcggagggagggctgcatgagcgtccccggcgcgtgctcaccatgctcctgtgtccccgcaggatagccgtgttctcggtgaccgtgctgcacgacgagaggatcgtgatcgtggctgagcagaggcctgactccacggaagaggacagtttccagtggatgagccgtgtgctgcaggttgccctccctcgccctgggcactggtcccctgtgtcttgtttctggcctccttacttcattcagatcatggtgtgaccagctgttgctttgcccatggggtggccctttttcccttcccttcatttgatcaggaactacatcaagtgtccagaaactagctcagcagatcgagggtgtagggaccaggaatttgcacagctggttcctaccggacaccttggggaggtcgaagtaagctttttgtttgatcttgagaacatgttatcttttctccaaagttccttttttactgtgtatggtcttccacaagccctgggtaacattattcagctttggtgagtttagtaggaaaatcctttctcttaccttggcatttttatgctgggaacagtgcttatactgcacagacttctgtgtattgtggatcatattttgcataatataaatacgtactgtttatacttcctcttataacatgatttcctctttattaactttctaggcgattgacagtatacatcaagttggagtttattgcctggccttggtgccagcaaacaccctccccaaaaccccgcttggtgggatccatttatcagaaacaaaacagctttttctggagggctctctgcacccctgcaatgtcctaatgtgcccccacacctgcgtcacaaacttgcctaagcctcgacagaagcagccaggtatgtgcaccacttgggcagcttgtgaggtgcgggagttcccttggggctgcacggcactgggaggtgcgggagttcacccagggctgcttgcaggaagctgatgcttgcgggaaagaagtggttaccccaagaaaatagaatgggtgggggcaacttggattctggtcttctggctgtaaatgccttgcttttattctctgtaggctcaggggtgttagtgtggtcgtcagcacgtaacttactggctctgttctcccgtagcaaaagctcattctcctgaaggacacggccacggtgctctcactttctaagcacattgggttcacacgtatggttgctctttcatttctgacctacttctaatttttttcttatgttgcagatttccttaaatattcctcctccatttcttttttttttcccccacaccattgttctcatggtctctggtgtttgattggcacagtttgtttccgccccctcccacacacggctgttctcatggtctctggtgtttgattggcacagttttccccccacactgttgttctcgcggtccctggtttttatgattgacacggggaatgtggagttgcagggaacagtatccatttcaccacattctgtgggtgcgtggccttctgttgggagccgctcaagccatgggcatcgtccctcagggagtgctctgaaagggtggaaaacgctgcctctgtctgccgcctcgggacgtaaacagccttgtgaaggacacggaggcagttgctctccccaggctgtttctgtagtatgaagatttataatggtgtcagcgctctccagggtatcctcattgtaaactccgaagtgacctgatcctctctccccactgtttgattgtcagacactctcaacccagcaaccccagtgacccacggtcccagctgggaagtagttcagtagctggtggagacagggttcagacaagtgtttatggaaggaggaggatcctttgcaaatacaaagctgtaatgactccatagctacagggctcggctcacctgagccaaatgtcgagaagcccagtgaccgggaaaacccaggcgagagagagcagccagcagcctcacgccgaggtcaggaaaacccagtggggagacagagccagcaacctcacactgcggtcaggagtgtgacctcctgcagaaagccctcttccttaggagtttagctggggaatagtggcccaggagattggaaatctttttactctaataatgtacttcattaaatgaagcttcatgtgattgataacttgaaagaaagaaaatagtatatatatatttagtgtctcatctgtttttgctaaactgagaggttacataattttgtgtctttaaaaagctttttaacaaatattaactggcagagctgaggccctacgtctctgctgagggcctgatacgcagcttagcagacgtcccctgccccggggccccagcttcgaaccacagagaagggaattgggctggatgatttctaaggccccttcgaataaacatttaaaatgaccctgacaggtgagtagccattattggaagccaaagcaaacattcgttgaggccatttgtgggtgacagtgttctgagatgctggaaacagagacagcctattgacacccaaattgcctttcttactgcatgaattcatatttactcagttaatggcactgtgtaccctcagattatcttatttgagcacaaaagtattaagagacctttaactcagcagctgagctggcaaaaatattacagagttacaaaacaaggtacaattccacagctttaaaggtccctgggaatattgcccccgaatagcaggaagagtctgctgaggccagagcctggcacctgggaagggcttgcctcccacttgggatttgtgtgtctcgctgctgtctttgagataaaactcccgccctgtgccctgagcgaattcgccaagcattgcatggtaggatatttgataataccagcgatgcggctgccgacttgcagatgggtgaatccattaatgggagcgggaagagaaaagagacatgagcctcaaatacacacgttttgggattcctctcaactctgtagcttaaatggcgaggctgtgatataccctgggggcatttgggacatgcccacctctcttcaacaggggacactgtcagctgctgccaagaacagactttgagagtgaggtgcagctagaaggcctctgcctcccaggagcagtcgggaaaacaggccctagtctgcatggggaggcattcaaggtcccaaacttccattcagaggatgcacgtggagatgagggaacgtgctacgtcttcatgtagcaaacgggcacaaaataaggctccacaaaaagcctgatctctcctcaaaagctcgctttccctaccccagtctgaattcttaaaaacattacgggaaaccttggaacccatttaggccagtttccaagttgacttcttagaagagccgtctcgtcttgcccagcatcggtcaccaaggagaaggctcagagcttcatcagccaggcgcagtggctcacgcctgtggtcccagcaatgcgggaggccaggatgggagaatcagtggagcccaggacttcgagaccagcctgggcaacatagtcagattctgtctcaaaaaaaatctgttaaagatgcttcattcagaagacgcttctatctggtagagatagaggatgcgcagcgggtgaatgagggtctcccgggtgttgtgttctgagatcgtgcaggggctcccaggtgtttggagatcacagaggggcaattgttcccaccacggggcagctcccttccttccagagcctgacaaattcttttgctaaatgtgaaaaggctattcctcttccatacttcattaagaactaagaaaagaaattcagtctgttcacaactacgacgtgaaaattcaaaaatgatttgccgagtgtaggaggcatcttactgttacacagagtccagactcgaggctcctacacgtcgcctagaacccaaggcaccggcaggcagcagcccagacatctgctcatagaccgttctcctccagatttcaatcctggctgaagtgccgtgccttctcctgcgcagctgtgataagtggaatcgtttctggcagcctgcatttgaaaaggatggccgtgcatctgtagagagccggtggccctgctctccctgggggccggctagaggacgtcaggccctgactgccttgttctggtgccaccatttccgtgagctttttgggaagccgagggacatcggttgtcatggtgatgggctcatccgaagccttgttctgtgccactgccccgtcagctgcatctgggcacgtgtgtctgtttttgacacggctatgagcaacctgcttagccatagccctgcttgtgcagtaactaatgcagcatgtggcctggcttagaaacctgttacttgacctttatcgggaatttaagaatttgatttaatagtagccttcaaaccaaggattaggcataaattgatcatatcattgttattttacctgcaattcttttggtaaacattcttttactctccctgcttcctctgctcctccccctgcccatcccccatccctctgccccctccaatcccccgtcccccacctcccacccccgtcccccacctcccacccccgtcccccacctcccatcccccatcccccgtcccccacctcccacccccgtcccccacctcccatcccccgtcccccacctcccatcccccgtcccccacctcccacccccgtcccccacctcccatcccccgtcccccacctcccacccccgtcccccacctcccacccccccttcttccccactttccccagttggtagtcatctcatcgctcatggataagcgatgactttatgacagcccttggtttattcttccacacctcactgtgggcctgacagaacctaagaccttttcagtcagtataacataccgagaagcgactctatcctgtcccgtccacagtatcactctctgactccaccccacgacatctgtatgtgaaatgtccactgtctgtttgtccacagccagctctcaggtgtgtggaccccagagaactcgaacagacgggagccacaggtctctgcagtgagacaaatcgtggcttttaattctgtgtgtgtcttccgttttattttttacaatcatggctgtgagtgccggcacacggggctctcacattaactggaaagtcaggcgtgggcttggagggcctccagggagcttcagggatgataaaaacatcgtttctgaagaacctgaccaaggcttgttacactcccccttcacaatcatttgatttcgttgaatctctgttcttagaaggtttattcaaagccaggtctttccagaagttttccgagagtaaggtctttaccaaagtgggaggtctagtctgaaggaatttctcttttgtttcctcatggccatgtctctgtttctttctagaaatcggccctgcctctgtgatggtggggaacctggtctctgggaagagaatcgcccaggccagtggcagagacctgggtcagatcgaagataacgaccaggcacgcaaggtaggagctgggtccctgagtctccccgaccgtccccgacttttccgactgtccccgaccatctgcgaccatccccgacagtacccgactgtcccctaccttccctgacagtccgcgacagtgtctgactgtccgcaaccgtccccgacagtccccgactttcccgacagtctccgatgtcgcgcgctggtggtggaccaccactgcagatcttcctttattctacctgtcctctcctgcaagagaccatataatttcataagaaaaatgtgtttataggagatacaaagtttcagaaaatgtcacagcgatgcagaaatcggtgaggggtgtccagtcccacgactcgcaggaccgaggcaaatgtctggcagtccttgtcccgcgcacggtcccctgaactactcctttctagtttccccaccagcccggattcaaagcccaccctgcccacagcagcttgcagcaaggcttctgtcctgtgctctgtggactctaagaagcagttcaaaacccaggttagggggccaggcctcctaacagtggcgttagaagccgtgggagaaactcccgaggcccagactttgcacattgtgccgtgtgcgtccacggtccccattagaaccgttcggccttcctgtttcccacagccaaaagtgtgcccttgtgtgtggcccattaggaaatggggcaaaatcagcaccgtgaaatgttgatgaaacggatgaaaccttatctgtgggtttttctgtaccctgatgtgaaataaggctgccccttttactgtggaccagctcagtagcacacatgtggtttgtttaatttgtggcttcatgccatcagggtattgccattctagaaacctaaatttattagatcccgctttttaaaaccagatagatctgattctctcactgtagccaccaaaatccgctttgcatcttctggaagccccaggagaagggatttctgtgcaggctgctcctgcctatgagggaaatggttcccatccttgggcagactttcagaaaacttctcacaccagggtgcagcaccagccctttgctttgtgaccctgactcgggtgctgtgaacctaagtccctgcaggaacaaagctgtgggcacttgcttgtcctgtggtcgtgtgtgacggggattttcccagcatgcatgtcttcaactccctgcagagaagcatgcggttttaagacccaaagcactcagcctctatgggtttgagtatccaggttgccccacctcagcccgcacagcctgatccaaccgcacagcctgatcctcatgcccgtgctctgttccagttcctgttcctctcagaggtcttgcagtggagagcacagaccaccccggaccacatcctctacacgctgctcaactgtcgggtgaggcgcggagctggccttccctggctactggcctcaaggggcctagcctggttcctgggagcgctcctgcttctttctttgaatccttttgcttcagtcttatgggaattctttttatgttttgctattttgactgagacttttgtacctagggattgtttttaaacgtaaccatttgtgcagttatttacacctatttgtgtgtacagatattttagcaacctatttacaatatttctcccccaaaatgagtaatgatatctgcaagagagaaatcgtaagtctatgagatatttgcatttttattttgattactaaactagtttttgttttgttttgtgttttgaggcagtctcgctctgttgcccaggctagagttcagtggcacgatctccgctcactgcaacctccacctccctggttgaagcaattctcgtgcatcagcctccgggtagctgggactacaagtgcccaccaccacatctggctaatttttgtatttttagtatttagagatggggtttcaccatgttggcgaggatggtcttgaattcctggccttgagtgatccacctgccttggcctcccaaagtgctgggattacaggcgtgagtcaccacaccgagccctaaaccacttttttatacaccagaagttatgtttattgcagactcaggaatgaaaatcatttccactttgtaattaaatttcctgtttacactttacatgagaaaactacactcatcaaatattgttccaccgtagtacttaagagtaaggcattaaataaacaagctaatactattaacaagaaaaattaaatgcaaaaatcttaatatgcttgttactactttttaccatggaaataaagcttgaaaaatggaagaaaaatgtaagtcttcttgacaagtataggtacttgcaactcttcaaaaagtcatggctgtttagaattgctgagtatcaaaatcttagtgtgcgaagcagcagattgaagacaaaaggaaatgccagcagcatcacgaaattattccccgactctctggtttgagtttcagttatcagaccattctctgcacgtggcttagttcataggaacaacctctcctcctcctctgccagagaagcgcgtgtcgtcttgacgttgtcacggatgctgagttgatcccagccattggtcgttcactgtatctgctcaagactgtttcccaggaagaggctttaaaaccaggaaggcccgtttctgccaccaccttctggccctcgttcgctggtgctgtgacggagcccctgccccacgctgagagctcaggtgtgggggccggagatcttgaggactggagttgctgtgggtccctgtatctgaaatgcccaccttccacttttcatctttctccactggacccttcctcagcctgtgaatatggatgataccccctttgctaacccgatcgccaggttcgccggccttgggtgctgtcttgatttcctgcccatctctgcttgtctgactttgtcctctcccagtagtgtttctcctgtaaactgcctgtgacttctcgttcctctttccctgtggtcttggcagttctctagagatttccagtatcatctccaacgtggtgacctaaatctgcagcactaactccagcctccttcggcaccccagatcccttctgctgaaagtgcttcctccctcccctaatttcctcacagaggtggctacccctccgcaagctgcaagcagtcaggggcagagtcagctctcagtctccctgaatctctgccttgatgttgcctgacacgctgctcccatgtgtgggggttgcacaagcatgtgtccagtaatctagaggtattgatgggcagctcaagaagtagcagacccccatatacgcaaagattcagacatgatttgggtacgttcatgggcaacatgtaccatcaggaggaggaaaatagagctgttccagctgtgcctgatttggggaagatccctcagattgctgggtggtgccatggtcctgggcttggcatctggtctatctggccctgtggacagcccagtgtccctgaacacctgtggtcacctgcatagctggatgctggatcttcagggaaaatgtatttcccggaaatgattccggttctctaaaaagggctttattaggatcaactgcaaatccgatgggggccagatgtagggatcagagccatgagtgatttaccttaggactgtgtggaaggcatggcctgaggatgtcttttccttggaggtgtgagctgtttccaaggctcgctggacacagaggcaggcacgcttgagctattgcttgtgttattttgcgccaagcatcagatcaggcatgggtccttcgctcctctgctgcctcgtatgcacactgaagagatgctgggcctggaccaaggtagcagcatcgtcctcacggcattcatagtgtctttccccacctaaatcagcttccctgttcagcaccgtccagcggaaactcagtacacgccacatacagaatcatgcattttctaaaagcaagattttaaaaaggaagaagaaacatgaaattcgttccagtgatgaatcactccacacaccataagtgtccgttcagcacgtacaccagccccccagccgctgcttccatcaaggatgcacgtttctgctgatgatgaatttggcccggtcttgctggccgtgtagtcacaagctcatttaaagtggtggaggccaggcaccatggctcacgcctgcaatcccagcactttgggtggatcagttgaggtcgggagtttgagaccagcctggccaacatggtgaaaccccgtctctactaaaatacaaaaaaaaatagctgggtgttttggcacatgcctgtaatcccagctacttgggaggctggaagcacgagagtcgcttgaacccgggaagcagaggttgcagtgagccaagatcatgccactgcactccaacctgggcaacagagcaagactctatctcgaaaaaaattaaatggttgaaccaatgggtttgtagccaactcttttgaccttttttaacttataccttctttagaattttaaaatataaatttagtttggctttttcttcttgggttttttttcccccaagttgtttgatttaatgtgaaacgttaaaatggtcccaagtttacagaaactgacagtgaatgtgtgtccttagacaagggcagactctttgtgtttccctgtgtgcccctccggtcatgctgcctcccagcacttctgtgggggaaaagccagccctcatttctctgatgaaatggttttacctagaaccttcttcttagctggtgggtttcaggacggaaaccccagtgaatgttgatgaggatgccagagaatgacgactgtcacctgcggtgaatggttgttgctttatgggacactcgccgagaatgcatcacattcttaacacggagttcatgggaaaatggaaagtgcaagcaaaagttactggcatttctcctggggtagaggctgcattaggattcctggggagcaaggctgaggaacagtgtcacgtgtgtggagttgccgtgtggtgtagctgtgtcccgttcaaccacacggggtggggaaaggtggcaaggaagaagggacactgctcagtcgctgcaggtgcctgggactgccagcctgcaacgtgagccaggagcgactgtccctcccagccaacggtggggtccagtgttcactcacctcgtcctttccaggcaagaaaggcgcccacctggtgtgacccatggccctgcctggccatggagcgaggggtgtctgctcatgtccgaccggctgtgaaatcgtgtgcctgtctccagcacagcactatctcaaggggctttttaagaacttaatttaaatcaccctgtgagctggctttgggacctaacacctgagaagggcaccgtcctcgtggagcgtgcctggaagctttgctgtttgtttttatgtcagccctgaaagacatcaaccagcattgagaaaattgtgtttcacagggttatcaaagataaaggacagcatgcatgttacactcatgctttgcaagtacctacaggtggggatttctgtgcaccagaatcaaaacattttcaaagacactcttggctgctggctgtgtctcatctgagcctctcaaatctcaggacccagaatgtgggcaaaccacaggctttgtcatctgacagcaaagcgggtgtttgataggaaatcagcttcagctctccagagatggggaagaaacagttccacaagccgaacaaaccagactgggcactgctgctgcaggcaggcctggcatgagaatggactgtgggggtcggggcctccctcagcggggcgggggctgagctgattctgccagggctcttctctgagacgcgtccatgctcacagcgatgggtggtgtgctggttttccttgttgggagacctgcccctggagtcggggtggacttgaatgggtcccatcagcacccagcctggccgtgctgggtgtctctgtcccatgttcacttgaagagctcagaggacgttggcggcaaggagccggtgggctggttgctgtgaacaggtggcaaggagcccctctaagagtaaatgctcagaggaacagtccagtttcaaaggcccccaaatctgtcttctcagcaggatttcccggactccagccctgcgttccttgttgtctctgcccatctctgctgccacctgctcttgggctcttctactttaaatcagtttctgttttctaattttttaggtgtcctctaagtggggaaataatcaaggaaaatgtgtgggatgagaaggttgaattcagagaaatgtaagctaatcctctccatggaggagaccagccacaggcggcaggaagggtctgaagacccaccgggcagtgacgtgggccgcctccccgcagccctggtcctggccctggcgcagaggtcctcagggagagtatactttccccacagacctcgctgcgctcatcggctgtcttgtggacgttttggtagaggtcagggtcaggtgttcacatcttgatgcttcctgagacattatcttccactcaccgtgccccgccatgtgtttctgacacgggcccttcgagctgggaggctgacgtgcttttcccagcatcgccgatgaatagccccagatactgttcgtccgtgcggcgtccttttggttgcactaactcggctacccgcaagcccctctgggcctctctccctgcgccttcactctgaatcgcagtgtctggtccccgacagccatctcgggctcgctgtgcactctgtccccaatctctgaatcacagcgtccggtcccgacagccttgccaggcccgccgcgcgctccatccctacactcatgcattcatctttgtagctgtgactcacataagaattcctgggctgggcatgatggctcacacctgtaatcccagcactctgggaggccaaggcgggcggatcatgaggtcaggagttcaagaccatcctggccaacatagtgaaacccccatttctactaaaaatacaaaaattagttgggcgtgttggtgtgcatctgtagtcccagctgcccaggaggctgaggcaggagaacgggagaattgcttgaatccggaaggcggaggttgccgtgagctgagatcgcgccactgcactccagcctggcgacagagcgagaccccatctcaaaaaaaaaaaaaaaaaaaaaaaaattcctgagcccgggtgttcagtcactcttcggctctgcagtcttcctgaccccatggactgcagtccagttgcccactgcttgagggaagatcctcaccctgttaatagctgtgagacagaatctgatcacaaagaagaggttgttaaatgactgtagaagccgtcttcacatctgagagtgctgcaaaggaactaggactgtaaagtgtgtcctcaggaaaagcttgtttcggttagttacgtgcttataatttgtaatttattcacatttgtctttatggcttaaataggccaagatgggaagatcacttgaggccacgagtttgagaccagcttgggcaatgtagggagaccccatctctatgagagaatttttttttaaaattagccagtcatgatggtggcacctgtagtcccagctacttggggctgaggcagcagaattgcttgagcccagcaggtccaggctgcagtgagcagtgatcatgccactgcactccagcctgggagacagagaccctgtctcaaaaaacagcgaatcccacactcttgcgatgtttcttggtatatatcttgcaactcaccttccctcacaaccctcgtgtaaggtattttcctgcacaaatatgttttctatttgtttgtacattaaagtctatgtgaaaatgcgtttgatagttcttttcattcctgtagggtgtgtttgtttattttgcttttgttttttgctttctgacttccttgatttttgatgtggtctttctaaataaaattttttaattagtcttccgatgtgcaggtgtactaggaattcccactgcccacgacaatgacacaagtcccagaattgccagggttttttgttctaccgttttttaattcacgtaatcattttttaaaatattgcttgttactctaaatatatctagatgtttctttggtctgcactgcttacctagttggaagaaaatggagttgacctctaacgtatatgtagttttgggggaggctaaaaacgttctaaaattgactgtcatgttggttgcacaggtctgtgcttgttctaaaaaccagtgatgtatgctttgcgccagtgagttgtatgacgcgtgcgcgctctctgcaagctgctctgctgaaggaatcttatgtgcttgtccctgtgatcggcccgcagggtgcgatagcgaactcgctgacctgcgtgcagctgcacaagagagctgagaagatcgccgtgatgctgatggagaggggccaccttcaggacggcgaccacgtggccttggtctaccccccaggtacaggcgcagggtgggcttcccctgagagatggcaagccggtcagccgcggtgcgaggaggtcccttacacccgctggtgcctgagccgagggtcgcgtcatggctgggagtctgcactgtatccagctggatgctaaccagcccgtttgtgtctggctacgaccactcacaggcaccagccgcatgtgctactgtgagaggcgtcaataaagtgatgctttcaatgacttttatatccaaatttgtgttattagatacctcaggtaattcacttaatagtacctaaatcttgactaaattcacagttacaaaggtgggtaattccttagcaaaatgatgtagacattaaacctccaggctgcctcgtcacctcatgtctgaaaggacaggtaaatgacagtgaccgccaaagctgacaaaacccgccaggatgacggaggctgtgagaagctcagctgctcgtttccctgttgaacttgccccagacaagcattgatgctgacagggagagtgtgcactcagcagcgtggtctgcttcaatgatgatgtttctctccttgtgtaggaatagacctgatagcagcgttttatggttgcctgtacgcaggctgtgtgccaataaccgtccgtcccccgcacccacagaacatcgcgacgacgttgcctaccgtcaagatgattgtggaggtaacatgcctgggaatgtcggggcctccacctgcctggagctgagtgtggagcttgcaacgcgcagactctgacatctcttggggcagctgctggctgtggaagccggggtgtgtctggagtcaaacggtcaggacagggtctctacctgcagggagcctagagtctaggtctagaagcgagatgtaaacgtgtgtggaggcagaggctggatggtagcctctgcagggtcttccctggagaaaacggctcccaagagagggcatcaccaccattcctcgggcttcctcacgaacccagctgagcagaccgaccacgggaagaggcagggctttttccaaagccctctcctcaagatgtggaagtttcctgctcctttttgaaagtatagatctgttttccttcgtctacagctggaggagtttgagaggattcagctatattttcctcgttgaaggaggaagtacaggggagaacagtgtgggcagagaatgcacctgtcctacccacacctgagtcccttttggcatggtcctggagacctgcacagtggccactcctagaaagtgtggcgacgcgtctgggtgcgtgtggggtttccaggagagctatgcgcgacgcgtctggggtttccgggagagctatgcgcgacgcatctgggtgtgtgtgacgtttccaggagagctatgcgcgacgcgtctgggtgagtgtggggtttccgggagagctatgcgcgacgcgtctgggtgcgtgtggggtttccgggagagctatgcgcgacgcgtctgggtgcgtgtggggtttccaggagagctatgcgcgatgtgtctgggtgagtgtggggtttccgggagaactatgcgcgatgtgtctgggttgggtgtatgtagggtttccgggagaactatgcgcgatgtgtctgggttgggtgcgtgtggggtttccgggagagctatgcgcgatgtgtctgggtgagtgtggggtttccgggagaactatgcgcgatgtgtctgggttgggtgtatgtagggtttccgggagaactatgcgcgatgtgtctgggtgcgtgtggggtttccgggagagctatgcgcgatgtgtctgggttgggtgcgtgtggggtttccgggagaactatgcgcaatgtgtccgggtgagtgtggggtttccgggagaactatgcgcgatgtgtctgggtgcgtgtgacgtttccgggagaactatgcgcgatgtgtccgggtgcgtgtgacgtttccgggagaactatgcgcgatgtgtctgggttgggtgtgtgtgacgtttccgggagaactatacgcgatatgtctgggttgggtgagtgtggggttcccgggagaactatgcgtgatgtgtctgggttgggtgcgtgtggggtttccgggagaactatgcacgatgtgtctgggttgggtgcgtgtggggtttccgggagaactatgcgcgatgtgtccgggtgagtgtggggtttccgggagaactatgcgcgatgtgtccgggtgagtgtggggtttccgggagaactatgcgcgatgtgtccgggtgagtgtggggtttccgggagaactatgcgcgatgtgtccgggtgcgtgtgacgtttccgggagaactacgcgcgatgtgtccgggtgcgtgtgacgtttccgggagaactacgcgcgatgtgtccgggtgcgtgtgacgtttccgggagaactacgcgcgatgtgtccgggtgcgtgtgacgtttccgggagaactacgcgtgatgtgtctgggtgcgtgtgacgtttccgggagaactacgcgcgatgtgtccgggtgcgtgtgacgtttccgggagaactacgcgcgatgtgtccgggtgcgtgtgacgtttccgggagaactatgcgtgatgtgtctgggtgtgtgtgacgtttccgggagaactatgcgcggtgtgtctgggttgggtgtgtgtgacgtttccgggagaactatacgcgatatgtctgggttgggtgagtgtggggttcccgggagaactatgcgcggtgtgtctgggttgggtgagtgtggggtttccaggagaactatgcgcgatgtgtctgggttgggtgagtgtggggtttccgggagaactatgcgcgatgtgtctgggtgcgtgtggggtttccgggagaactatgcgcgatgtgtctgggttgggtgtgtgtgacgtttccgggagaactatacgcgatatgtctgggttgggtgtgtgtgacgtttccgggagaactatacgcgatatgtctgggttgggtgagtgtggggtttccgggagaactatgcgcgatgtgtctgggtgtgtgtgacgtttccgggagaactatgcgcgatgtgtctgggttgggtgtgtgtgacgtttccaggagaactatacgcgatatgtctgggttgggtgagtgtggggttcccgggagaactatgcgcggtgtgtctgggttgggtgagtgtggggttcctgggagaactatgcgcggtgtgtctgggtgagtgtgacgtttccgggagaactatacgtgatgtgtctgggttgggtgtatgtagggttcccgggagaactatgcgcgatgtgtctgggttgggtgagtgtggggtttccgggagaactatgcgtggtgtgtctgggtgagtgtgacgtttccgggagaactatacgtgatgtgtctgggttgggtgtatgtagggttcccgggagaactatgcgcgatgtgtctgggttgggtgagtgtggggtttccgggagaactatgcgcggtgtgtctgggtgagtgtgacgtttccgggagaactatacgtgatgtgtctgggttgggtgtatgtagggttcccgggagaactatgcgcgatgtgtctgggttgggtgagtgtggggtttccgggagaactatgcgcggtgtgtctgggtgagtgtgacgtttccgggagaactatacgtgatgtgtctgggttgggtgtatgtagggttcccgggagaactatgcgcgatgtgtctgggttgggtgagtgtggggtttccgggagaactatgcgcagtgtgtctgggttgggggtgtggggggtttccgggagaactatgcgcggtgtgtctgggatgggtgtttgtggggtttccgggagaactgtgcgcgatgtgcctgggtgtgtgtgacgtttccgggagaactgtgcgcgatgtgtctgggtgtgtgtgtgtggggtttccaggagaacagatctaatggtgtgagcagtgagctcttttctgcacatgtcacaacgctgtggatgcactgggcccaggaagtgcagatgcagcagcttcaggccgcatgccctgcccccgtgcctccacaactagactcctagctctgtcctaccttagccagcaggagggctcggtaacctcatctgcccgttaaagctacatggttttagtgtatgtagtaagcaggagacccgtgtgaagtgagcacgctttcatctgggtccacgttcatggctccattctcgctctctgatgccaggtgagtcgctctgcctgtctgatgacgacacagctgatctgtaagttgctgcggtccagggaggcggcggcggctgtggacgtcaggacgtggcccctcatcctggacacaggttggtgctttagctgcagaaggtggtttgctcacggccttgctcaggctggatctgctgatagtcatgttcctctccagatgatttgccaaagaagcggcctgcccagatctgcaaaccttgcaacccagacactcttgcatatctcgacttcagcgtgtccacaactgggatgctagctggcgtaaaggtgaggggggtggctgcgggcggtggccatggaggcaactgcggagcgtgctggaggtggcaggtcacgtgctggctctcagcgcctctcgtgtagtcagactgagatgtggaaagaggtatacatacgtgtttcattcacggtatgacacgtatgaccatttccatccttaaccaggctgactgattctgtccaaatgccccaagtatgtttttatgtgaacactgtctcagctgacagtagaacactgcgaatgtttttctcttgctggttctcaaatccgaacgctctgtgataaatttctgcacactgcactttctagcgttttaacctgggctctattagaaatcatcatgaccctctcagctcagatgccgcccttgccgaggtgccgtgcaaacccccccccgccccgcccccgccccacccttggggacttcgcagccttgtgtgccgtctgcccccatctgtgggtctgacgggtgagctggctttacctcgcacagttctcacgctctgtccacctcttagtagaactgaggtggaataccaaagtagctacaatatgaaataaaataatttttcaaaagcttttgaaaagaaatgttttcagatcaagatgatttacttactgtggtctgaagttagctgtgaccctcccactgtcatagccagaagagaagcagctgcttccagtcataccgtttcatggcccgcttatagtctcagcgtctgacgtagagtagaccatcagaacgttcctggctgcttttctttaagtggtgtcaattcctgtttctctgctgaagtcccgcaaaggccccgctggctttgtgacccacagccagggtgttgggagcagcctctcttacaccccatacacggttgtccatgccctcgtctgtgaattcccactggatcctgagggcagggctgtgtcttactcttcggttcatctccagcgcttaacacagtgtctgatcacaagctctcggtatttagtatttgctaagctgaagaactgaattctccacctagaaatagtgctttgcacagagcagcagttcagggcaggcttgctctagttgctgatctgagtgggtgggtaattttaggaggcagggtttgactaactcctaatccagggaggcaggagtctggatggatgttgtataaattcagtctcatttctcctttaaacaaaaatttgccttaaaagcaagctaaaaagaattatttacattttacattttataataattctacgttcccctgtatgaatatagtaaaacagttacgaaaccttctcccaggcagaacttccaatagtgatggaacgttttacagtgggaggactcccacctccaagttctctcacctcttgctggagtgatgaatgaatgatggggagccaggcatttggatttccccagttattacaaggctctgtgctggtccctttacagtttagctctggtgacattctacttcagatcaacttgtgacatgtttttttgtttgagatggagtcttgctctgttgcccaggctggagtgcagtggtgcgatctcagctcactgcaacctccgccctcttggttcaagcgattctcctgcctcagcctcctgagtagctgggactacaggcatgcgccaccacccctagctaattttttgtatgtttagtagagatggggtttcactgtgttagccaggatgttctcgatctcctgaccttgtgatctgcccgcctcggcctcccaaagtgctgggatcacaggcgtgagccaccttgcccagccgtgacgtgttttaaaaccgcaaaaatcagaccattttgtatgctgctttgacttcctttttcctctgaggtttgtttggctagaaagcttctgtgagaaaattgatcttattaatatattttattgtatttcaaaataattgacattacacacagactgtagggggactattacagggattagggaagaggaagatgcggaagctcttcactgtctggtcatgatgggatgattggattttagccaccatctccatgcaggatggtggaagatagtgaagggccctggagtgtaggaggacctgggctctaactcctagctctaacttatgtcacaggcagcaaaatctttaacttctgtgagccttcactttctgatcattaagacagctgagccacccagcaggtcttgctggccacatgctgcacagcagaggctatgtccagccgtggagatagccgtgaataagacagggcctcgaccagcagaggaatgcaccgtggtgcctcccctacctgtgggacggtgtgttagagagagggtcacacgaggccaggcgcggtgtctcgtgcctgtaatcccagcactttgggaggccgaggcgggtggatcacgaggtcaggagatcgagaccatcctgcctaacatggggaaaccctgtctctactaaaaatacaaaaaattagccgggcgtggtggcgggcgcctgtaaccccagctccttgggaggctgaggcaggagaatggtgtgaacctgggaggcggagtttgcagtgagcggagatcgcaccactgcactccagcctgggcgacagggcaagactccatctcaaaaaaaaaaaaagagagagagtgggttacacgagaaccccttcctccatgacttgctgttcaaacgcactatttcaatagctagagttgctaggtcctggaggaccaacagttctgagtgaggtttactcattgaaaatgagaactccagtgaaaatatcagccactcacattccccagacacaacatagcccagcttggtgacagttgtcgccagtcctaaaaacagctttgggcctttggggccaggtatcgtgcatttgttgttcttttgggttttgttctctaaaatttattgaagagacagggtctcactccgttgtccaggctggagtgcagtggtaatcatagctcactgcagccgggaactcctgggctcaagtgaccatcccaccttggcctcctgaagtgttttgattacaggtatgagccactgcaccaggccagcatacatttcatttggccttattgtcttaaagatgtctttgggtgtcaggccccacgcatttaatgcggctttattgtcttgtaggtatccttgggtatgaagtcccatgcattcagtgcagccccgtattgtcccgggtgtctgagggtgtcaggcccgatgcgttcaacacagccttgcgttcagtgcagccccgtattgtcccgggtttctgagggtgtcaggtccgatgcgttcaaaacagccttgcgttcagtgcagccccgtattgtcccgggtgtctgagggtgtcaggtccgatgcgttcaacacagccttgcgttccctgcagccccgtattgtcccgggtgtctgagggtgtcaggtccgatgcgtttaacacagccttgtattttgcagatgtctcacgcagccaccagtgccttctgccgttccattaagctgcagtgtgaactttacccctctagagaagtggccatctgcctggacccttactgtggactgggatttgtcctctggtgcctctgcaggtaagatgcctctctatatctttacattaaaaaaaatcatgcaccttcctctccagaccttagacccagccaggcaacctaagcactgcccccacacccccactcctgccagaggaggcctggggcttacccgtgtccctctacttctcctggtggacttggctctcggggaaagcagcacctggggtgactttgactttctgcagcagggaaggagcattttggagagccgtctgttgcggacctttatttctgacaatcagaagactcccaggctccaggcttggttcttatgcctgtaaaacctggcgatggtgctgggcctgggttctcgctgggccagcaggcattgcaggctgtcacctccctcaggcttcaccccagctgttactgcggggcttaggctgggcaagcccagaggtgagtccacgagggctgagcgttccctggggtgcggcactctacccagcagccggctcggagcctggcttacagcaggtgctcagcaagtatttatgggatgaatgaatgaccagaaaaacttatggatgtttcttggcttttttgtctgattatacatacatgttcattgtagaaattatagaaaatatgaagaagaaaataaagccatcaacaatcatagcacctgataaagagtgttaccaataaatacccactattagcattgggcatatagttttcagagttcattttctaatggagcgttttcaagcaagtaagcatagagcatgtccagtaataaacacccgtgaccatcatccagcttcacatttcagcattttagcagttttgtattatccgcctgctttcccccctttttttttaaatgggtattttaaagctaacacaaacataaaaataatttcactcataaatcttctttacacattttatgaataaatatatgttaatatatttataaaactgagacgctacagtatgaaattggttatgattttctcaaaatttatagtggatcttttatctttttttttttttgagacagtcttgctctgtcacccaggctgaagtgcagtgccacaatctcagctcactgcaacctctgcctcctgggttccagcgattctcatgtctcagcctcccgagtagctgggattagaggtgcctgccaccacgccctgctaatttttgtatttttagtagagacaaggtttcaccatgttggccaggctggtcttgaactcctgacctcaagtgatctgcccgcctcgccctcgtgcgccaccgcacccagtcagatttttttctcctgtcaacactcttctggaacaaatatttttaatgtgtgactaatatttaatagtattaagttgtattaaaatgtaattctgtatttttgaaaaataccgatattctaattaggacaattcagctttttgagaaagcagataaaactgaataaatgaaatatttaatgatttttgcctcaatccaaaatgccataacattgtgagtaaatttttttttcttggaaaatcgctcagaacatggcctcaggtatatgcgccaagctgaacggcagaggtctgttctgaacaacggcccttgtagggtgaccgtatttcatttggcaaagtataccagtaaaactgaagccagccgatggaagcctcctgcctgcaggcttaccaagcctggctccccatggaaaccagagagaagatgtttgttgcagggaaagtaagttctccgtgtgaacccacaataacaatacactctttaagggtttgtccaggttgcgatgaaatttgacaagcatctttcctgcaaaatgttactaactcagaagtcacaagatcacagtattctgttgattgcccttgcaacagtcaaaataaatatagccatgaatcttcccattaaaaaagaaaaaaatctctatagaaacagatcccaatggacttgcttttaaaaaacaaaaaaagcacttgggtcctagatccacaatgactaatacataagttaaaaataataatgacttccctttcccatgcagttcagcaggtctgggaagagaatcaggcagaagaggccctgggggtgtaaatttgaggacgcctcgacctcaggctgtgctcctaagagtgtagcagggtggggagtgtgtcttggtgggggcagccgcgcagggtgcccaagcccacgtcggaggaggggagtccacagaggggtgtcctggcgtgggctgtgggagccaggcagggtgcattgtgggagccaggcagggtgcagggtgcaggtggcgtgggctgtgggagccaggcagggtgcagggtgcaggtggggtgggctgtgggagccaggcagggtgcagcgtgcagcgtgcaggtggcgtgggctgtgggagccaggcagggtgcagcgtgcaggtggcgtgggcagtgccagccaggcagggtgcagcgtgggggagtcagagcttgttctaagaatcggcagcagccgagggagatcggctccgtgtggggaattagaaatcagtgcggccaggcgttagtcatgggggtacgttccaaatgggcgatttcattatgtaaacatggagtttgcttgcacagacttggctggtacagcctgacacacccagtccgcagtcctgtgcagcgtgttagtgcactgaatgctgtgggcagcggtaacgtgatggtaagtggtcgtgtgtcgagacatatttaaacacagaaaaggtacagtaaaaagatggtatagaaggtgggaaaaaaaaaaaaaaactgtgtagggcatttcccatgactggagctggcaggagtggaggttgcccaggtgagttggcgagttggtgagtaagcggcacctgaacgtgaggccaggacacgactgcacactattgtggcctctgtaaataccagacactttggctacgccaagtttgtcaaaaatatttttagttcttcagtaataaattaaccttcgcttactgtaactttttaaccttaacgttttaatttgtaacatttttgactcatctataaaaacacttagcttataacacaaacacattatacaactatacaaaaataatttatctcctttataagctgctttctattaaattttaaaaaacatttgaagcttttgttaaaaactaatatatacacgcatacacatcagcctaggcctccacagcacacacacagcttcctaggcctctacaacacacacacacgcacacacacacacgactgtctaggcctccacagcacacacatacacatcagcctaggcctccacaacacacacacacagcttcctaggcctctacaacacacgtgcacacacatcaacctaggcctccacaacacacacacacagctgcgtaggcctccacgacacacgtgcacacacacagctgcctaggccttcacagaacacacacacacatcagcctagtcctccacaacacacacacacatcagcctaggcctccacaacacacacacagctgcctaggcctccacaacacacacgcgtacacacaccggcctacgcctccacaacacacgtgcgcacacacacacagctgcctaggcctccacagaacacacacacacacatcagcctaggcctccacagcacacacacagcttcctaggcctctacaacacacacgcacgcacacacacacagactgtctaggcctccacagcacacacatacacatcagcttaggcctccacaacacacacgcacacacaatcagcctaggcctccacaacacacacacacagctacgtaggcctccacgacacacacacagctgcctaggcctccacaacacacacgcgcgcacacacctgcctaggcctccacaacacacgtgcacacacacacacagctgcctaggcctccacagaacacacacacacatcagcctaggcctccacaacacacacacaccggcctaggcctccaccacacacacttgcacacacagacagctgcctaggcctccaccacacgcatgcacacatcagcctaggcctccacaacacacacacacacacagctgcctaggcctccacaacacacacacgcacacacacaccagtctaggcctccacaacacacacacacacacacacacaccagtctaggcctccacaacacacacacacacacacacagctgcctaggcctccacaacacacacacacacagctgcctaggcctccacaacacacacacacgcgcacacaccagtctaggcctccacaacacacacacacacacacacacacacctgcctaggcctccacaacacgcgcacacacaccagtctaggcctccacaacacacacacacacagctgcctaggcctccacagggccagggtgttcagtgtcactgttttcccctccacctcttgtcccactggagggccttcagggacaggacgcagacggagccatgatctcctaggataacaataccttctcctggaagaccctcctgaaggacccactgaggctgttttacaatttactttcttttttataagtaggaggatgctgtaaaataacaaagtacagtaaattcataaaccagtaacagttgtttgtcatcatggttaaagtattaagttgtgtacataattgtatatgctcatcaaaaacctaatccaccgtgcccaagtaggcttcatctctaagatgctaggtatcatatgcaaataaaaaaatgtgattcatcgtgtaaacagaactgaagacatgattgtatgtgctgtgcttttatatgactggcagcacaggtttgtttagaccagttaccaccaccaacacaagtaacgtggtgtgcttcagcatctctaggcagtagaaatttttcagcttcgttacaggctcatgagaccaccattgtacacggacccatccttgaccaaagcatcgctatcctgggacctcagggatgctgatttttaaatttttttttagagatggcgtcttgccatgttgcccaggctggttttgaactcctgggctcaagctatcctcccacctcagcctcccaaagtgttggaattataggcatgaaccaccacacctagcctacaaaaacattttttttttagttagccgggtgtagtggtgtgcgcctgtggtcccaactacttgggaggctgaggtggaggatcacttgagcctgggtggttgaggttgcagtaagctgagatcacgccactgcactcaagcctgggtgacagagcgagaccctgtctcaagaataaagattgcaacaggttgtaacactttgagtaaaataggaaattttccaactattcagatacacagatgaacaaatggaaagcttgatgagaagtgaggatttctatagtagccatccacgaaatagttaaaggaaagagagtcttcatggtggaaaagcctgaaccagctggtccaggcaaacctcagtgatggtgaagcctgtagcacacagcgggtgggatgaagagagccgcatccgcgatactcctgccgaagatgcctgtcctggatctccccatgtggaagcaccagcccccaagttaggggactgattggacaatgcacctgcctagaatcttcccaaagcctggtgtcgtgagagtcacggaaacatccagaaactcgctctgggcagcgggaagctgagagccgaccactttcttgcagtgtgcctgtgcaaactgggtaattggggatggctagagaaacttgaacagggtctgagctgggacaggaggaatgcgttggttttctgattttgatggcttaggtgtttatggaggaaaatagacttgtttgttggaaatcccccctgaagtgtctgggattacgcatcaggtcagtgattcaccattagataatccaaggagagagaattattttaaacgtacttgtacattttctataactttgtgattgtttgaaagttaagtaacacaaataatttgtgtcctcatcctaaagctttcttctgtcatagaggattgtttatctgagacatatgagtataatggtattgtttcaaaatattttttaagattacacctgtttttaaaaattgtgtcagatagcctgtattcatgtattggaagattcaatattattaaaatggtagttctccccacattgctttataggttcaatgtaattcctaccaaaatcttggcaggctattttttgggggttttttggggcagaaattgataatatcctgaagtaaatataaaggacccacaatagtgaaagcagttttaaaataggttaacaaaattggagaattcagaacttctcattcctgatttcaaaaatattgcaaagctgcaataaccagaacaatgtactggcattgagatagagtgattatatatatgagaaacagaattgagagtccagaaataaacccttatatttatggtcaaataattttttaatagagttacccgagcaattcaatgaagaaaagtttttccaacaacagatgctgggaaattcggacattcacatgaaaaggaaaaaagattaaaccttgactcaacgtcatatacctaagttagttcaagtggatcatagatcttaatgtaagagcaaaaattataaaaattttagaaaacacaggagtaaattttcataatcttggttaggcacagagttcatcaaaggtatactacataaatactgataaactggactggaacaaaatttaaaacttttgtatatcaaaagacagaattaagtagaaagacaagccacagtctgggaaaaaatatttgcaaattataaatctcatgaagcacttctaagcacctatgtaataaattttttctttttttttttttttttttttgagacagtcttgctctgtcacccgggctggagtgcagtagcttgatctcagcttactgccacctctgcctccaaggttcaagtgattctcctgcctcagcctcccaagtagctggaagtacaggcatgcaccaccacacctggctattttttttgtatttttagtagagacagtgttttgccatgttggccaggctggtcttgaactccttacctcaagtaatctgcccgcttcagcctcccaaagtgctgggattacaggcgtgagccactgcacccagcctatgtaataaacactcaaaactcagaaacaagcaacataaacacgggcaagagatctgaatagatatctcaccagaagaagacatacaaatggccaataaggacgtgaaaagatacctagcgttaattagggaaatgcaaattaaaaccacagtgagataccacttcacacccactagaatgctgtcaccgaaaacacaggaaataaagttggagagctcgtgttttctgacttcaaaacttacactgcaaagcaacagtaaccaagaaggtggaaaaacgaattctcatacattgatagtgggaatgtaaaatggggaagccactgtttggcatgatcttaattaagcagacttgctgcattgactcagcagctgcactcctaggagaaaggaaagcgaacatccactcagagacttggtgtaagttccctggaacctcggtcaacacaaggaaacaatccaggtatccgctagcaggtgactgaacaggtgacgcctgccacgtccacatggtgggtgcttctgcacaggatgagctcagaagcacctgctgagggagggaagtgtggctgtgtggtaggcagtgtccagaaaaggcaaatttgtaaacaaagtagaatgatgactggggctagggctggaaatgggactgactgcagatggacacgggatccctttcaggtgatgggaatgttctagagtagtgaccattttacaactcttcaattttattaaaagccattctgtgcttaaaatgagtgaaacttagggtatgcaaagtatacctaaataaagccgacgggtgttttaaaaagaataggccgggtgcggtggctcatgcaggtaatcccagcactttgggaggctgaggtgggtggatcacttgaggtcaggagtttgagaccagcctggccaacatgatgaaacctcgtctctgctaaaaatacaaaaattagcctggcgtggtggcacacgcctgtcatcccagctactcaggagcatgaggcaggagaatcacttgaacccaggaggcagaggttgcattgagccaagaatgcaccactgcactccaacctgggcgacggagtgagactctgtctcaacaataaaaaataataaagtgcttcattgcagtaactcaagtgtgtagggagaccctgggctggatggcatgcctgctggcagacagggtatgacccaggacccccaggtgagatgaacctgtcttgttgaattcccaagttaggagagttttcagttgttggtatattttgtcaggttagtaatctgaaatcatcaaattgctaatgtgcgaatgtgtattacttaccaaaatgtctatttttattctttttgaagttaagatctgaagaacagctcaggttcccaacattctcagagaataatgtcttgagaataagcaacctgctcttaagtaggtttgtcttgtccatagcagaatttattgccagtgccaaaaatcaattttggctaatacagcaattaatcaaaatttgctgtattgagtgaggtaagggcaattaggaaatcatgagttgggttttctatttgtttctgctgtcaagatttgtgttttcttaatgttgatttcttatttatggtgatgaggagggaggtgaaactatatttagttttcacaagtatatttgaaattctctggccaggaattcacactgggttcccaagcccgttgtgtgctgacaattctgacagagcaaatcattaatgctgatgtgtatttttgaggaagccacttccagggacacttagaaatggttaaaatgactttgggtgtccgaggcaggaggattgcttgaacctaggcgttcaagaccagcttgggcaacatagtgagaccccatctccacaaaaaaagttttaagttagccagtcatggtggtatgtgcctctagtctctagtcccagtcatggtggtacgtgcctctagtcccagatacttgggaagtgggaggatcacttgagcccatgaggtcagggctacagtgagctgtgatcacaccactgcactctagcctgggtgacaaagtaagactctgtctcagaaaaaaagaaaagaagtggttaatatggtaaatgttatgttacatatgttttaccacagtaaaatttttaaaactaagatgaaatggccagtttacagcagagtaaaaattcgaggcctgatattcaccccttatgtgcctaaccctgttctcaaagtattaaacccttggaaaggtcactatttgctagaaagtcgtccctcggtgtccacggaggagataggttccgggaccactgcagaaagcaaagagcgaggatgctcaagtccctgatataaaatggcatcatacgagcacatcacctatgcacttcctctctcatgttttaaataatttctggattacttgtaatacctaacacaatgtaaatgctgtgtgaatagttgtactatgttgtttagtcactaatgataagaaaatctacaagttaggtatagatgcagattttttcatgaatatctttgattcatggttgaagccaggggtgaggaacccacagacacagagggctatgtgtccttttgaaaagaataaatcaagctttggaataagaatgaggaaagaaatggaaaattgcccaaaaacgcctttgtcacatttgccgaagagtagtttttcatactaagggtcccgtttgaaataaattttgttagccaacctaacttccttacatttctttagttggattctcttataaacaattatgaaaatttttagatgagattggctacattaaagaactggctttagtattatagcatagtagttaacaaggcctaactcgttaatcatagtgctgtttcactgataaaattttgcgtaggcctcttatggcagctcatgcctataatcctagcactttgggaggctaagataggaggagtacttgaagccaggagtttgagaccagcctgggcaacaatacgaaaccgtatctacaaaaaaaaaaaaaaaaaaaattagccaggcatagtgttgtgcatctgtagtcccagctactcagggactgaggtgggaggatggcctcagcttgaaaggcagaggttataatgaacccagatcacaccactgcactccagtctgggtgacagagtgagaccctgtctcaaaaaaaaaaaaaaaaaattgtgtaggttgggcatggtggctcatgcctgtaatcccaacactttgggaggccaggcacatcttacatggccacagcaggaacaagagaggattgcttgagccccgaagttcaagatgagcctaggcaacatagaccctaccactgaaaaaaaaaaaaaacaagcatggtggtgcacacctgtggtcctactgactcaggagaggcaggagaattgctggagcccaggagtttgaggtgacaggtagctatgattacaccaccctactctagcctgggcaacagaacgttcccgttaattaaattgtaaatcttagaacgtgatttatctaggatattttattttaatgtatggtatctattgtgaattcatagtagtaaacaaaattaaaaccattaaaaatgtagttttgacaagttgttaaatccacacttaccccatcaattgataaaatatgtaatctatcactttttcatttctctaaatctgttctctagtatgaaggtaaaattaaagaatcgttatttttctctatttcttctgtttggtaattcgttgggatcctttttagtaaaaatctgatcttaaaaagattgagtgactaactttaattaccataattgtctttttttcaccctggctgtcagttttctaaaccaggtataggcctgctctttattaaattgctgtttggtaaatattttaggttctgtggtctctgaccactcagctcaaagccactggagacaatatttaaacaaatgagtggtggtggccctgttccaataaaactttatttacaaaaacaggaagtgtctgtggtttgccagctcctgttctgaagctggactttttttttttaaaccgaaatttgatccctgtgttttctactaagaaagaggatccagtttgctgatgtcgcaggtctgagagacatcacagcatcacagcgtttagtagtcttaaatgtgtgttcaaagtggtaggaactgccccatgattctgtagtacgtatttgcttttcagaaggctttcgtgaacatggttgcagtttgcagcgttggctttactgtgcccttctacagatggcagcacgggctgttccaagtcctccttttccttggagtcagtgctgccctgagccctccagccttgctgagctccagccttgctgagctcccgccctgacagcctcttctttctctgcagtgtgtattctgggcaccagtccatcctgatcccgccctctgagctggaaaccaaccccgccttgtggcttcttgccgtgagtcagtacaaagtccgagacacgttttgctcctactccgtgatggagctgtgcaccaaggggctgggctcgcaaacagagtccctcaaggtaagcagctcccttggcagctcagtgccctgtgagcccacagggactcctttctaagaaggcacatctgtgatggggtgaagttaaaacagtcctccaaaacaaagcctgggtttaatctaacgtcacctgaagcttacaaactgcctttatatgaaaatctttttaacgtgaatatttccccacgaccacagacagtaacgaaccagaatgtaaaatattttcaatgcctgtcattccactgggtctacttgaaagatcctaaatttgattttttgttgggtggattcagtgttctgaagtgttcagtgttcagaagatcttaggtgatgttaactttatttgatactggtgtttaagaaggtaggtttgaatttagccgctcacttttattttccctggagaccctgatttctgggtctggaccctaagctcaattcattttacagttcagttaacagtgttgtgtttcattttttaataattgctattatgtaagaataatagtatttccctccatttaaaccaaggacattttgatacgtatatcttcatggtaaattaagtagtccttagctccaagtaactaggagggaataatcatctgaccagttttgataaaatttcaactgactttgtactctttggatgtgtgtatgtctttgtatatacatggattgtgtttgtgtttctgtcatctacacagagatcaataacggaacagtacatttatctgtcctgcattgttttcctaatgcataaagcttggacaggaaagcaaaatgcaagataactttatgtaacataagtaattgtgcaatcattttaagtttttatataggaaaaagttagcactattcatgttcatctatattgtattagaaagtgagtacattttcatgaccttcctgttggcacatatataaataaccagaataaaatcatgacatagttgagggtcagtatgcaatttacgtattcatttcatccttacaatagctctctgaaataggagcccttattgtctccattttaaagctgaggaaacttatgtcatagagaaattaagcaacctttccaggttcttaggctgaacgaacctggagccaaatttagaatctttggcttcagacctgctgttgcagctgcatgctgctttacctctcagacgtgcgcgcgtgtgaatatgtaatttgtgtcacccagacttgagtttttcctgtttaactctgtgtgtacagtcgtgtctgtacactgagcacgaatgtcaaagccagctcgagctgtgcgtcctccttgctcaggacccttgtcggttgtccgtgtgccgaggctgccttgaaagggttcgcagggcctgacggttggggttttggtggccgcccccttagcagctctgggttccactccaagacgcagacattcacggctcgccttcacattcacaagccattcctgtcgctcccttactttccctctgctcggcccaggtagtgccacagagtgagctgagcttaactccttgaattcctgtatgactttttctgttgtgctcggctgactgaatttggtgtggaaactgagatgttgttaatcttttgcttactgtggaaacagacacgcttgagaatgagaagaaattcttggcgtaatgggacataaatggagcactgtctatgaagtcatccaaaaattttagttttatattcctatatattaaaatgtaggttttcaggctgggtgtggtggtacatgtctgcagtcccagctacttgggagaccacaaggtgggagggtcacttgagccgaggagttcaactccagcctgggcagcatagcaagatcccatctcttttacatgtagatttttcccgttcctctccagtgtgtgttctggtacatccatgcccagaagaatgtatcagatggctctcttttcccgaacggcctttcatcgtctcagccaggaagttgcttttcctcaacctttttcctcataacagttcttgctgtggctccaggtggttgtttgagacgtgtttgtaattccattcttaatcatttgaatagttgtgtgaatgttttttcaccaactcctggtttgttatattgaagaagtggacacaggtggccctggaaatgcatagctgtgttgagttttccaatgtttacgtggggatctgtgggaaggagtctctggctcactccaagctcgacacgtgggggctgactcggtttctctgtcatcatctccaggcgcgagggctggacttgtcccgagtgaggacctgcgtggttgtggcggaagagaggcctcggatcgcactcacacagtcgttctcaaagctgtttaaggacctgggccttcacccgcgggccgtcagcacctcgttcggttgcagggtgaacctggcgatttgcttgcaggtgagattcggcgacatcacagtgctgagtgggaagtgtggctcccggggtgggtacagcacagactggctccactcgtctccctcggctgatgcttagctacatccagaagagatctttcagtcacacgcatgcggttggtgcagatctctgtttctttaaactacagtctacgttcgtatccattattcataacaagcattcataggacttactctgtcctggaacattttaacttttgtgacaggggtagcagtttgtccagacctctgctgttcgactttttaaagattagatactagacagatgaagaaaccagtccctcgaagtacttagtcccacgcgtgtagacgatcgctgtaggaagaacttaatgacattgagcaggttctgggatttgctgctgcaatggcattttagaaaccgcaaagccgcacttctgggaaacaggcgtaagtgaagcagctctagcaagacagccttgcattaacagtggctgacaagctgcaggcagagctgcggatttccttcctggaagaataagggcttccctctcagcaggtgctggtgaggcaaacggttggtgtgcatccctccacctccctctccccaccccctatcctacttgtgatcccagagtgattgcttaaggttgctgctgggtgagcctccgaaggctccctctgcccttttcacgcctgtctaggtgcttggagttagccactaggtcagaggagggaacctcctctcttcccgagatcacttcagaaaaagtagctgcaaaaagcttttcttgatttttcttttacttttttgagacagggtatcactctgtcacccaggctggagtgcagtggcgtcatggctcactgcagcctcaaccccctgccccccgctcccaggctcaagcaaccctcccacctcagcctcccacgtggctgggactacaggtgcacaccaccacgcctggctaatttttaaattttttgtggagacggggtttcaccatgtcgcccaggctggtcttgaactcctcagcttaacaatctgtctgccctggcctcccaaagtgctgggattacagacgtgagccactgcacccggccttttttttaattttcataaacgtggtgttccttgcttctgtcttgcttctcttttaattattataatagctccatctttaagaaattataaattaccaaatttctctcaagagtcagttaaaccttgtcctatgattaaaataatacccttttctaagaggtcatctgaagaattagatttatctcaccaaactagttcttaaaatattgaagttttctctgcctattcacctttttctgttcctcataaatgtttatcgccatctatcccattaggagaaataggaaatgcagaagtctgcttcttaagttcagcaatagtgtgatgtctcacttgtctccatccaccagtgacagggacccccgggcaagaggaaatcagtgatttgtgagagatggcactggccatggcgaggctgctgcttctggctttgtctcttaaaatgtcaaggtggcgctgaagggagagagcagagagtaacccgtcgcatcgtgccctccagcaggtgacagagttcagcgtgtggtgtaaaattggcctcttgtagagtacatacatttattttcctctttactttttcatttatttccatccacctggatccaaaatgttttttttttgtttgtttgtttttgagatggagtatcactctgttgcccaggctggagtgcattgccgtgatctgggctcactgcaagctccacctgctgggttcacgccattctcctgcctcagcttccccagcatctgggactacaggtgctcgccaccaagcgcagctaattttttgtatttttagtagagatggggtttcaccgtgttagccagcatggttttgatctcctgacctcatgatccgccttcctttgcctcctaaagtgctgggattacaggcatgagccaccacgcccagccccaaaatgttttaagatggtttacaaggaaggagtacgctcagtaggagaagataaaatacgtgaaaaaagaaccaaaacatggagatgaaagaaaaacagcgcaggaaagggacagaatgaagaacagagttggcgtgctggtgttttccacaaggcttctgaagcgtgccaccgtccttacctcggcaccagggcggggcctgacacgtggtggatattgaatgaatgtgcgccgtgggagtgttgagcacggttctgtattcttaataggaaatggcaatatgttcttgtgcagaagacaattctgtcaatatgaccgctaaatcaaaattcagtattctaatcatgggtcatggcgttattttgcaatcttggcagcatctttaagcatttttgtccatgttcagttttctacttgacctatccctaactcctttcggtcagcatttccttgtctgcatagtattggaaaatagttggaagtatccaagtgtctaccagcagagagaaattaaatttatgtacaaagcaatgcgagctcacctccccttcccagaatctttgagggcaggtgtgcttcggaattaggtttctggctttgtgagaggtgatgtggcacagatgccatgcatgatgccacagctcagtatcacatgtgccagtgttcctgcagcaaggaagggtgggggccccagacttgaaggggctcatgtcagcctatgtcaaattttactacaaagaaacttatgacaaagtttgtgccatcatcaaacatttctcacagtcagtgagttggacggtaggcatgtagataattttttcaggaagtgactcattttagtaaaagcgagcagtgagaggatagagtgccacgaacacggggaggcgttctgggggagggcagtcaggaacgcttcagcagagcacagtgaaagggcggagtcgtgcgggcgagagtccagcgaaggcagccgtaagtgcagaggctacaggcagagctggtctttggaaacactcattttctagaatctgcaaaattaaaaaaacctgatggtgatagaaacaagcagagtggagaagcccaggatccagcggcagaaaccacctctcgctccctggctctccatagagcccagcacacaggacatgcctggtacattaaatgtacggaccacactgctcatgagtcctaataaggaaagcctgaaatgtttctgaattttctatacattgaatttatttttctttataaaagaatattttagaaaacaaaatcagaaaatacactttagcttataaataacagtcataaacccatctaccctgagataatcacaattaatcatttgatgtaaaaaatcaaaaacacaaaaaattaagacactgccagaattccaaaccttgtacctaaatatttaaagatgttgaaaaatgtagctttcagtttgaagcagcagcatcgtgagtgagtgtggaaacgggggtgtctgctctcagactgactgcgttctaacaacgctggtctctcgctggagccccgcacccccgactgactgttctaacagcgccggtctctcgccggagccccgcacccccgactgactgttctaacagcgccggtctctcgctggagccccgcacccccgactgactgttctaacagcgccggtctctcgctggagccccgcacccccgactgactgttctaacaacgccggtctctcgccggagccccgcacccccgactgactgttctaacaacgccggtctctcgccggacccccgcacccccgactgactgttctaacaacactggtctctcactggagccccgcacccccgactgactgttctaacagcgccggtctctcgccggagccccgcacccccgactgactgttctaacagcgccggtctctcgccggagccccgcacccccgactgactgttctaacaacactggtctctcgccggagccccgcacccccgactgactgttctaacagcgccggtctctcactggagccccgcacccccgactgactgttctaacaacactggtctctcgccggagccccgcacccccgactgactgttctaacagcgccggtctctcgccggagccccgcacccccgactgactgttctaacagcgccggtctctcgccggagccccgcacccccgactgactgttctaacaacactggtctctcgccggagccccgcacccccgactgactgttctaacagcgccggtctctcgctggagccccgcacccccgactgactgttctaacaacactggtctctcgccggagccccgcacccccgactgactgttctaacagcgccggtctctcgccggagccccgcacccccgacggactgttctaacagcgccggtctctcgccggagccccgcacccccgactgactgttctaacaacactggtctctcgccggagccccgcacccccgactgactgttctaacagcgccggtctctcgccggacccccgcacccccgactgactgttctaacagcgccggtctctcgccggagccccgcacccccgactgactgttctaacaacactggtctctcgccggagccccgcacccccgactgactgttctaacagcgccggtctctcgccggagccccgcacccccgacggactgttctaacagcgccggtctctcgccggagccccgcacccccgacggactgttctaacagcgccggtctctcgccggagccccgcacccccgacggactgttctaacagcgccggtctctcgccggagccccgcacccccgacggactgttctaacagcgccggtctctcgccggagccccgcacccccgacggactgttctaacagcgccggtctctcgccggagccccgcacccccgacggactgttctaacagcgccggtctctcgccggagccccgcacccccgacggactgttctaacagcgccggtctctcgccggagccccgcacccccgacggactgttctaacagcgccggtctctcgccggagccccgcacccccgacggactgttctaacagcgccggtctctcgccggagccccgcacccccgactgactgttctaacagcgccggtctctcgccggagccccgcacccccgactgactgttctaacagcgccggtctctcgccggagccccgcacccccgactgactgttctaacagcgccggtctctcgccggagccccgcacccccgactgactgttctaacagcgccggtctctcgccggagccccgcacccccgactgactgttctaacagcgccggtctctcgccggagccccgcacccccgactgactgttctaacagcgccggtctctcgctggagccccgcacccccgactgactgttctaacagcgccggtctctcgctggagcccccgcaggccttccctgactgtgcactctggtgggggacgcctgatggagagagggaagagttttatctccaggagatagggagcaaactcagcaaagaacattgtccaaaagagagagggagcctcacccgtgtgcagcagggcttaggatgtgtcaagggcatcacggtcagagggggtcctggtcttcggggaaggctgagctgcacagttcatgagtgttatgactgcaggatttcaaggcctcaccggtgctcctgagcagtgctgcatcctcaagggcgaagccgcatgcagtttttccagtgctgacttggcgcctggacaagcactttttagaacatacctgacacaggaaacattacaggtgtacagagacacattgggtgtttgtttttactttgcaaaaatcggctctatcagtggcactctggtcctcccaccatccagccccaagcgtctgcctccccttcgtgcagttgttcctaagccactttctcatgcagtctttcctgcttcataacccggacactgtgctcggcctggatggactctcctctgccctcatcctgctccgcccgggtcccctccatggggccttctcgaactctgtcagctgcggtgctctctttcctctgaattgccagtgtactttgttcctcctccttcacactttccagctgctttttaattatttatcaccatgtccatgtcgcttctgctctgtgagtagctgttttacagaacacagttttttctttgttgttgttagtgtttgtagagacagggtctcactatgttgcctaggctggtcttgaactcctggcctcaagtgaccctcccacctcagcctcccaaagcactgggattacaggcgtgagccaccacactcagctaagagcatggctttatgaaagaatctccctccctgagtgtccagtgccatctcacatcatcacagtcacttctggatgttggatacattttgtcaaagtactgatacttgatttttttttttttttttgagacggagtcttgctcttgtcatccaggctggagtgtaatggcatgatctcggctcactgcaacctctgcctcctgggttcaagtgattctcctgcctcagcctcccaagtagctggtattacaggcacctgccacctcgccgagctaatttttgtatatttagcagggacaggattttgccatgttggccaggctggtctcaaactcctgacctcgtgatcctcccacctcagcctgccaaagttgattcttttaagtgccaatctgtgtgtgtaaatacaattcacattagagaaattaaacatatccttacttgactagagtctagtctcccgtggaaaatgacttggcatgatgaattttctcaaaatgaacccctggtgtgaatcttcaccagctaaaagctcatatgccatctgtaactgttccttgcaaatgaaaacccagggtttactattcttcaaccttctaacagcattttcctctcaaataggaagtctggggcttgcaccttaagagtcattcacgctggaaaaatacattctttagtcattgcattggaccattggattcagacagcatctagttaggtcttcccatgctctttaagggaattcttagttgttttaagatgagagatgaaggccctgagaagtgaactttcctaattgacaaagctaggaggtaaaaacagaacaaaatttagaagtaaaagctatttgttactcttaggagtaacatttcccagtacctttagctggaaaaatgactttaaaagaatttcaatttactaaatttatgataaaagtggacattagaaagatcaaattatgacttctgtgtttaattagctttcacataaatttctcttagtattattagaaggtgtcacttattatttggaaatatatttctcacagccacaattactcttcaaaaatgtaagctggaaggtcttttgttgcattagatttagagatattgttcactgtaacagaaaaattgcatcctccttctagtagaagcagggaagaaaaacatgaggtcttctgttttccaaaagagaccgcggttgtttatttattaggaaaaaaacataaacagaaacttggatttctattatatagaaaaataactgatttatctgagagggcagctttattataagtagctttgtgtgggattaaatcaacagtaactattgcagtgacccttaaatcttgaaactcacacaatgaaagagaaatacagcccccctagtaatagaaggagtcatggattgttgaaagaagtgagccaggcgcggtggctcacgcctgtaatcccagcacttcaggaggctgaggcgggtggattatttgaggtcaggggttcgagaccagcttgcccaacatagtaagaccctgtctgtactaaaaattcaaaaattagcccggttcattggcacgcatctgtaatcccagctactcgggaggctgaggcaggggaattgcctgaacttgggaggtggaggttgcagtgagccgagatcgtgccactgtactctagtctgggtgacggagcaaacagagccagactctgtataaaaaaaaaaaagaaaaatgtggaaggctcaggagatgatgtaaatcttaattctcaaaataaatagttgtaataataagactttcattaacttgagctctcagtttccttgtccccctacactgcttttaggtgaaggaaataaataaggtgctgttggggattttgaaagcctcagggaatgagccaccgtcagcaggaactttatgccctttcctgctgacacacggcatcccagccacgctggggatcatggaaaccatattccaggtatcctgcacgtcagccagctttctgacctgtaagcaatggaaacctcctttggcagtttgaggcaccagtgagtggctctcagaaccaccaagggagtaggaccagcgttgggaacctgcctatgggaaccgcttgtgcagcagcttgttcttgtgaggacaccacaccttgaagtctgcactgctgaccttgttcctggacacgagacttccccaccagcatggcattccccaaacctggatcgtgtctggacaccttcactgccgacagcaagagcccgattggtttgtgctgtaaatggatgtgactggttgatcgtctccccacaccctagcttccaggaaggctgggaagggacttctggtatttttacttcctacagagccacaagggctctgtattcaaacaggactcaaaaagtggaggagttctcccgatacaggaggacggttgagatgtatggtgaccaaagtgtggcagcggtggctgctcccacccctccctttcgccatccagcatcactgtgttctcgtcctgcccttacgcatctccatagccccaggaagccaccgtgatgcagctgctgcttttacgtctactcaggcacttgcccttcatgcaaaggggagacaagccgaagcctctggaattaccatgaccgtcatcaaacccacgacttcctaggcgatgcctcctctttctctggttccatcactgatattctgtgatctacagatggaattgtaaaatttacaattgagggatgaagagagagaaaagaagaggaacattcgaattctaccagtgtttttggatgtctcacgtgccctaggcactgatggacactgcactgaacagataatcatgttggatctgcaaggtgctaagtgagtctttccatctgtctccaggaatgttggagtcaccgctggaagagtcttagggacccaggagatcatgatgagggtctgaggggtgtaactgcacagcttcaagtgttcgcctggctttcagcaagggattctctatcgcagtcacagaacatgcctggcttttagtctatgtcttgaaccaaaaagcaagaatctgagttcatcattcactcagtaagttcaacaaaaacagccgtgccgtgtcacgtctgggtgctttcatctgctctgtggcttggcagcccctaaactaaagccttcccacgccctctctctaaagtgtcagagcatggcgtccaggctgccagcctcatggtgctttccgcacagctactcagctctgctgtgccactcaaagcagaaacaggcaatatgtaaatgagcaggcattgccgtgcttcagtcaaactttacgaaagccagtgtttggctggtcctgatgaccagcttgctggtagacggcctgagctgagttcacactgtctgtggcccccaccccaccagtaatccattccagaacccccatttcctgacagtttgtcacctgcatcaatgcctgatgacaacatacagatccatccatttgatgccaaccatagaaacaagctcaatgtgatttttgcaaatttattttttaaatattttggaattccattttttattgagatgtagaagtcacaagagactcttgttccaaccataaccgtcggaacaatctggttaatacacagactcatcgtttctaagatccatcagagagctgaagactcaaatgtagatgaattacatttcttcctaggagaaaagagacctgtatgtggtttttcccatggcagaggagccaggagaaagaatttaccataaaaaatgataaagcaaaaagtttctgaactttttaaaaaacataaatggcagtatgttatttgcaaggtagatgagaatcccaggggagtcctaaaagtggatgcattttctctgaggcactctgaacctttagtgtgcaaaaggcaggggctcctgagggctgggaggtgagcaggaaagccgctggctcccgctcgagggtggcctggatcacccagcagagccctggctaccctccagggcagcccaaatcaccgtgggaactccactcacacttcaacaatggaggtgggatgagggcatagcacatccctctgcagcgcccttgcccttcaccatgtgtaacgtatttgccttccaaaggctgggagtgtggcagtggaatagaggaagctgggggtgagactgaagagagaatcacccagttacctaaagtgggtggaaggtctcctactgtttggaaagcagatctctcgccgtgaagcatagaagacatccagtgtcagtgttcaggcccagcatccggatcctgcccataggcttgtaaattcttttctgggggtaaatgttatttaatctttactgttcttttaaatacaatcttcgtttttcataaaacattgtgttatataatcaaaatttaaaagacctgcaaagaagcaagagaaatggactcatgttcatgagaggagatggccctagaaagagtcagtagaagagacatgctgcaattatcagagacttcgaaatagctgtgataggtgaggccagaaattcgttgaaaaggtgtacaacatctatgaagaggtggggggtattgcagaaagataaaaactatgagaaaaaacaaaatggaaatgctggaaatgaaaactagtattagaaataaaattcccatggtttaataggagactagatacagcagaggaaagactcattgaatgaacttgaagtctgaccaatagaaatgacctaagcataaaacaaggagaaaaggcatgaaaatacagtggaacagagtgtctgaggcccgtgggtctaacatacctgtagtgatcggagccccagaaggagcggtgagagaaaatggggcaagagaacaatttgaagacctatggccaggagtgaagggaagaatcaacacaaagattcaagaagctcagtcaactccaggcagagtaaatgagaagaatcacacccagatgctttgttgtccaaacaccgaaagtcagtggcagagtcaatcttaaagtccctgcagaaataaaactaagtagggggaagtaataaaaacaacactgagttctcatcagaagtgctggaagccagaatacagtggagtggtgcatgcaggctgctgaaagagctgtttcttctgcaggagatccttcagaatggaagagaaaagcagatacttagccaacctagagaatcgttcagcaaatacgtgtcacaagaaatagtaagaatgtctcaaggatgaaaataaatgatagcaaaatgaagcccaaatttttaagaagaaatgaagaatactgaaaagagtaaatacaagaaaacgttttagaatctgtcaatatgtagacatgtaaatatttttagtttgttttaaaagtattaactgtttaaaaatatgaacagctgaggtgttcgtagcatgtgtaggaataacagatgagacaacaggaagttgggccccggaaatgcactgctgcaagaatcttcattttcatagcacataacactgtgtgaagatagaatgcaataaatcattcaaaaaatacacagagggtaaagtgaaataccacaaatattctattcatgagaaaaggaggcaggaagggaggaacaaagaaagggacaagtaaagaaccaacagcaatcgcaccaataaggacgtgaaaagtaaatgaactgtggatgatgtgattgctgaggtcagaatgtctgtgtccccctccaaaacttctgtgttgaactataatccctaatgcagtagtataagacatgaggcctttagaaggtgattagatcatgagggtggagccctcacgaatgggacttccacccttataaaagaggcctaaaggaacatgttcatccactctgcaggtgcctcaatctgggacttgctagactccagagctgtgagtagccgttacctagtctaaggtatttcacagcaggcggagcagacgagcacagagggactcgtatcgccagacccagcctcgtcctgatgccttcccatgtgcaggagaggcaggcactggccacagaccatgggaaggacggcgtccagctgctgggtgatccggtgcagcacagggagggccaacctccctctcaggcttctttaaggaaatcctggctggtgccgagtttagaaagatgagttagcggtgacgagaccggggagggaagagcactctggaagctgagctgaagcccctgcaacttcagaggggtcaggaaagatgggaagaggccagggtggctagaaagggaggacgacggagggctgcaccaagcactggtccttttcccaagatcagtgggaaattgttacagggcttaaggcagggacctgtcatatttagctactggttttgaaaagatcactgggagtacatcattaaggcttctctaagccggtaacatttccacagcccccagattttaatgcaaatataaaaattcttctggaaataggagtacaaagaagtagtcaaattttgtgtcattttcctttccatttgaagagtgtcatttgcctggagacatacaacccaaaccttttctcgtcttctcagacttacctagtgtactacataagcccagtatcaggtctttggagtttgttcgttctttcacacatttctatttactatagccctatgtgcaagtaccaggttgtgctaatattatggtgtgtgaattgctgaatagtaaaatcaccagtcagcttaaatgctaaaattagtgctgttttgtgttttctgtgctgatatttggggtgtgagtctgtatatcttcacctgagatttaaatataactcatttgttcaataagcacttaatacctaattgatataatacttctgtgtcagtaagaaagttattttttggtatatacatttgtccctcaatgggggacaggtttccagactccctgtggatacctaagtctgcagatgctcaggtccctgctggaaaatggcgcagcatttgcatagaacccatgcacatcctccgtgtactttaaatcatctctaatgacttgtgatgccgaatacgatgtaaatgctgtgtaaatagttgtactgtatcattcagagaattatgacaacaagtctgtgcctgttcaggtgcagttttttcgaatatttgggattcaaggttggttaaatctaaacatgcgaaactcacagatatggaaggctgactgcttaacatttttattatataactggattttaatgtgaatccttttttctcgttcatataacttggaatttcaaaaatgctttatctttgtttctgaatgagctttagttggaatgggttaatgctgtttgtctgtgggtcctttattgcaagtatttgatccttaaatactgaggggcactcttttgcattagggatctccgtatttaagggaacactggctagcattctttggcaatatgaagattttgttaaatactccctcaatatgtatcttgaaatttcagactttttacctcaggggttttataatttggaagcagctatatcttacctctttatctccttcatgtattcttctctattaatgcttaggcctacttggcttcaggtgctgtgttgcctcctccacgtggtacaagataggaaatgaggtacttagccgtgtacattttttcctgagataccaccttgacccattataacaatttctgaactaggataatttagagagaatgttgacttatttttatttttgttccagttaatatttaggtttcaaggaatcatgaaggaaagaaattatttaaatcattgcattcagctcaaatatattcagtaaaggtccactatgtgtttggagcatacacacctttattggcgagttactttatttattcatgctctgcctctctttttcaaacataagggtgctgagagagaagagtagccataattaccctagagaagtaacagagaagagtggaatcgtgattttcttttaaaatcttgaaccattgcttattttcatagacttggctctgttgtgagtggtggcagtttttccattgggctttgtgaccaaatttgagcctgaagaaaaccacttaactccgtttccactgctgcagctgctgtctctagtgtctgcctgttgccgtcatggggttgtgggtgggtgccgggccgtacacacaaagcacaggtgtgcatcagtccaggcgcctgtgaaaaatcttctactctttgtactttttgggaatatttgggaaagacagctaagtgacatagggaaaaataccttgcatccaaggagcttgcccaagttgatttctggaattgtccagcagctggggtagattatttaatgcgggtagcaggcagggaccacagccatggatgacgaggaggagaagaaaacagaagttggtgtctctgtttggggaacagcaacagagcacatttgctggggtggaaactcctcctgaggctgccgagcagaccgtgtgagagcccagcgctggattctttcaggcttcagatgcatgttggcctctccctttgcctcattgtgtaggtggatagagctagtgccctacttgcaggtgtaaaagctcacaggctctcctttgttcctggaatcagaaccttggaactacctcaacagatttagcaaatgaaacttgcactcccgcgtccctcagaaagaaagagcaccgtgagtgacacggtgcagtgccaccatttaccttctgtgtccctgcgccgtggttagtcacctgctacaccctcttctgttgctccgtggatatgttgacatctttaaaacatttcttttagccttgtacagtggttaattttaatgatttccatatttgatgttgtttttgatcttcttttcattttgtttcctgcttttcgcattctcctccccacccctccctcttctccatcccatttttcactgtcgggtcgtatgtgtctgtgtgtgttgtgtgtgttggtttctgttgtctggtgttctctcctctcttctcgtcctcacccttctgctgctgtagcctcacaggctgtggaccctggccgagcaggtaggggactttcctgtccatcacacccgtgcctccctgcccagccccgctgccttgcccgcatccagccgtgggacagactagcagttgagtgcagagattggccgggggtctgcaggccctgtgatcatgggtgctgccggccgggcaatgtcacgttcaggcctcacgcgtagccgacgctgtcttcccggggtgcgcggtcagtggttcatttgccagtttggttcatctctgttgtacttaattcttcacctgttttccatttacttatttttaattgaccctccatggctgtattttgcattactcactgtgggccggttctctgctcagcgctggtctgtggggcggctttgctgagcagccgggggtagagctgtcactgggagcgtccgccgggaggctgactcgcatgtgctgttctttttccctgtctcagtggtgagataccagggcccagggttattgagtactatggtatgttttcatgacattgtcttttttttttcttatatataagcaatataagaaaattttgtgcctttagtacaaaaattggaattctctcctgaagaattttagtgtaattcttcaaatgaattctgaagggctcccttattttttggcaaatttattgtaggtttagtctttttccaaccaaggtattgtactgccttccccaaaaatgagtgtacaattttggtttgtaatgcagccttcgtgatgctgctcttctgtgtacagaggtcactggtcagaagtcagcatggtgtaatttttcaagcaatttatggtgccaagaaaagatttctggacccctgtgtaaaatcaacagcccagtggaatggctcagaccacaaagtcctgcccagctctccaggataaaatgccccttccctgacctgtgtcttggccggaaatgccctcctcaggccagagagccagagccccagcagagcccggaggagcaagatgctcccctcacctcttcctccctggcctgtccatccatatcacacatctgcttcactgtcctgggccctcaaaatacaccttttgttaaaggtggatgcatgtggtaaaaatttctccgcacagatgcttcatatccttccaacctgcttttgcagcgccgtcttggcagttttcagccttcctttttttggcacagtgcgtggctttgtctcctttctttcctatttttatatattggcggtcaagctgtgtgaatccagtattatcctaataagatattccttctggaatttaggttatcacactgaaagttagcaggtgccttgagaggttgctggtctaagtgtttttagttttatttttcactttaagattttacaaaagaaatgtttcctaactagtagaagcacagaccccaatctccctccatgtaaacttgagttaaccactctgttgttgcttgcagggaacctcaggacctgacccaaccactgtctacgtggacatgagagccctgagacacgacaggtactgtacacttctgggttttttctttttttcctttttttgttttgttctgcggccttgcatgcaggtctccatctagaagaagaggtgcacacgatgtttatctgcccagagtgtaactgtctcatgagtgaagtggtggagttaggcattggcttgaactttgcaattgaaaactctggccaggcatggtggctcacgcctgtaatcccaggtatttgggaggctgaggtaggcggatcacctgaggtcaggagttcgagaccagcctgggcaacatggtaaagccccgtctccactaaaaattacccaggtttggtggcgggcacttgtcatcccagctctttgggaggctgagtcaggagaattgcttgaaactgggaggcagaggttacagtgagctgagattgcacctctgcattccagcctgggtgacagagtgagatcccgtctcaaaaaaaaaaaaaaaagaaactctgttgcaggacagcagtggcaggtgtgatagcaggagtatggccagagctgctttatctgaccatctcactggaaggcaggcactcggttcttttccttcctattttatgcaccattttgcccccgtcgtagaatgtcagcatcctgcccacatttctttacatgaatggaaatgttttgtcaagatgcttgaaataggggttaggggtcaggttaccttctctatgtggcctcctaagcgccccctgagaagaaaagtggagttcttggtgagagtgtgaggactccagaaagcaggcatggggttgagcaggatgagaagccctttagaggaatctctgcccgccaaggaggacccactaagatgccagagaggaaggaaagaaggcgtcatttttactgcagacttcccccgttgaaacagatcatcttccacttggtgactgtagaggtgcccgttcattgttgcttaggtgaagtgcgtgggacatggtgccttcccttatcgccgtcagcagccgctccgtgacctgttgctgtgtgtgcctgtgcccccagggatgtctgacatgcctggaggcattttcgatcagcacaagttgggcagtggctcagctggcatctggtggggggagaccaggggtgtcccaacagcctgcatgggacggccagtggctgagagctcacacgccagggccaggagccacgcccgccctgacggttcacactcgtagatgcatgcctggccctgtggctcttccatcaggccctctggtcgacagaaccactggctgcacagttataaaatcacagaagagtggtggccacgtaggagccctcaggaggccctgcaggctgagggccagaggcaacgcctgcccccaaggccaccagctgccagggacaaagttcagtctggaacacttagaaaaatcagaaatgtagttttagattaggtaacttgtttctgggcatacagttttctaaataatcacttctgggcattaaaacaaattcacctgactccccataagaattctttggaaaataactcataattatataacttcctgaaggagtgagcagtagctcatcaataacacatgtatgcagttctgtctgtggcctggccctcaaagcgtaaccttttccctgactaggctgctagctgctttggaaagcatctgaaatggaagtgagagtacataggaacaggagctggcggtgcagttcactttcccacacaccactgcatgcctctggtcggcacccacgccgctgaccgtcgctgctagctggcctaggctctcacccttgagcagtgccgaggggagctcctcggatgccagacatcttcatgagactcagacctggcattttacatacaaagaaggaaagcaaagtctggctgtaaagtgacttcctttcaccgggccccgcccaggcacccccaaagcctccctgctgccctccagatggaccgtgtgctgggccccgcccaggcacccctgaaccctccctgctgccctccagatggaccatgtgctgggccccgcccaggcacccccaaagcctccctgctgccctccagatggaccgtgtgccgggccccgcccaggcacccccaaagcctccctgctgccctccagagggaccgtgtgccgggccccgcccaggcacccctgaaccctccctgctgccctccagatggactgtgtgccgggccccgcccaggcacccctgaaccctccctgctgccctccagatggaccgtgtgccgctctttctcccgtgccctcgggtgggacaccacgctgcccttccctcccggcttctggggctgctctcactcttctcattcctttctgtttttttctccgcgatgttctctctttgacctttctaaccaggtctgtctgtggtcccctccgtctggctgggccccttctcccttacccccccactgcagagaatctcagcggcgtcccagtcttgctctccgatgccctcaccacccactcacagtccgcagcccccagcccacctccaaggagtgtggccccaggggccttttctccagtcctccaagccagccccaaagccctctccttccttaaacctcccttaaatattcctaggtaaaaatgtcatccagctttaatctccagcatcactttcaacctttaccagcatgtaatatgcctggtgctgcagccactggcagggggctctgggtcacacaggtcagaagtcagctcctctgggacgaggtattacactctgtaacctcagtttccctcttgccttagtctgtttccatttctgtaaaggaacacctgaggctggtgatttataaagaaaagaagtgtatttggcacacagttctgcaggctgtacaggaagtgtggtgcctgcatctgcctctggtcaggcttcagggagcttcactcatggtggagggaaagaggggccacaagtgcagagatcacgtggtgggaggaggggacagactgtttttagccaccggctctcccgggagctggtagagcaagaacctgctcacccccagggaaggcctgcatctatcatgacggatctgcctgcatgactccgacttctccattaggccccacctccaaccctgggaatcacatttcagcaggagctctgggggtgctcagaacaggtgcagtaaagccagtcttcccaggcacctgtgaggacaaagtaaaggaatgctgtgaagagccagactggggcagatgctgtcactatgagctccggcagctggatggtgacagaggactcacctcttctgatccaccggcccagggctgctgaccacagagggtgagaaagtcgacagtccaaggccagcagtcgggaggcagtgaaatgagagccactaaaagcactgatcttatttctttcttgttactcttcctataaaaatgggatggtggttttctcacttgatctgcattaggctctgtcacaggattaattactgttcctgttgctttaatggcacactcacttgcgagctccaaggcacctgcccaattatcgtctaattactctggagaaggttagcttattggtatgcacatgcaatttccttgagagagaatatgaatgtgcacacgcacaagaaagacggcctacagaggaagaccaccattgtgaaagtcagttgtcgaacaggggtattagccatttctgcttggttttctgcccctgtttctgatgccctttttattcttggagccatggtgggtgggacctgcctgcatctgtgacaggtcaccatggagagcatttctgcatcatagagtgaggggacacactctccctgcttctggaacagattacagtcccacatgtgcaggaaggaaatgatgaaattgtgttgagactatttgcaagtgactgttcaattttaaaatatttgttacagtgtaattcatttaaaatgaaatcataagtctctcaatgacttccaatttggtctttccatgaatacttgagtttttcagactttagataggaaaaaaatataatatatatatatatatatatatttgtctgcatttgaagatgcggttttaaggctgggaatgggctcacaccggtaatcccagtgctttgggaggccaaggcaggagaatcactggagcccaagaggtttgagggcagcctgggcaacatagcgagactccatctctacaacattttttaaaaatgaactaggtgtggtggcatgtgcctatagtcctagctacttaaaaagctgaggtgggaggactgcttgatcctgagagttagaggctacagtaagccatgatcacaccgctgcactccagcctgggcaatggagcaagaccttgtctcaaaagaaaaaggaacagttttagcaattttttacatcttaagaacattacattggtgtaaagtcctagaatgaaaactttcttagcttcctccgggcttgtaacctgaagtcataactaaagggtattaccagaaaagcatagatactaaattaattcctactcattggttagcccaagtatcaagatcctgagagcaggggccacagaatagaagtacatcagtaaacttgagacttagcagcagaatggagggagtgaagatagagacaaagacaaacagcttaacaggagcctttcacccgatcaggtccttgtgtgtgtgtctcagtgcatgtgtgagtgtgctgtgcatacatgcatgtgtgttttgcaagtgtgtgaatagtgtctgcacatgtgaatatgagtttgtacatgtgcgagcttgcctgtgtcatgtgttgcatgggtgagtgtgatgtgggtacaagtataagtgcatatatgcatgagagtatgagtttgtgcaagtgtgttgtgtatatatgctgttgtgtgttacaagtgtacgtgtgtgcaatactgcatgtgtttcaactgcacatgcatgtgcatgagtgtagtgtgtgctgcaagtatagacacgtgcatatatgtgtcatgagtgtgttgcaagtatgttgcagttgtgtgactttcaaatgtgtacacatttatggctttgcacgtgtcgtgtgtgtgcatacaaatatgtagcagatatttgtgcacacgagtacatgcaagtatgagtgtgcatgtgtgtgttgcatgggtgggtgcctgtatgtggtacaagtatatgagggtttgcaagaatgcaagtgcactcccatgtgcatgtgtgtgcaagtgtgagtttgcatgtgtgagtgtagtgtactgttttatgtgtgtgtaagtatgttacatgtgtacgtgtgtgcatgcagatgagtttgtgctagtgtgtgggctatgtgagtattgtgtgtgtgttgcatgtgcacatgcacactgagtcttagtattgccttgtattttgtatgtggagttgttacaagtatacacacatgcatatatgtggaagtgtgtgtgtgtgtgtgtgcattcgtgtgcatacatacatgtgtacatgagaaggatttgctgggagggggccagagttctccagctggtctttagtcccttcatcatggcctgtggtcttagcagactgagagctgggctgtctgtggagctcgtgtccctttgctgaattagtcatgtgctgcatagtgctgtttctgtcaatgacagaccacagtggtccccaagacagtgtcccctaaatgagagtggttccgtaagactgtaatgaagctgaaaaattcctgtgaaatggagtttattgatgttgtggccatcataatgcaatgcgttatgtgtttgtggcaatgctagtataaacctctgctgccagttgtataaacgtatagcatgtaggatcatacacagtacgtgcataatactggactgtgataatagacacctgtgaagccggtttatgtacttacctttaatgtcgttatcttagagcatattctctatacttaacaataaaaaagttaactgtaagacagcctcagcaggtccttcaggaggaatccagcagaaagcatggttcccacagaagatgacggctctgtgcatgtcattgccctaaagaccctccagttggacaagatgtggaggtggaagccagtgatttcagtgatcctgaccccgtggaggcccagattaatgtgtgtctgtgtattagtttataacaaaaaaaaaagtttaaaaagtaaaaaactttcggccaggcgcggcggctcatgcctataatcccagcactttgggaggctgaggcgggcagatcacctgaggtcgggagttcgagaccagcctgaccaacatggaggaaccccgtctctactaaaaatacaaaatcagccgggcgtggtggcgcatgcctgtaatcccagctactagggaggctgaggcaggagaatcgcttgaacctgggaagcagaggttgtggtgagccaagatcgcgccactgcactccagtctggtcaacaagagcaaaactctgtctcaaaaaaagaaaaaaaaaaagtaaaaaacttttaatagaaaacttgatataaagataaattatttttgtacagctgtacaatatgttttaatctgtttttataagtgagtcaaaaagctttaaggaatttacaacatagaaagttacagtaaatgtaggttaatttatttaacaagggaattttcttatagatttagtgtagcttacgagtacagtgtttatgaatctacagccacgtgcggtgatgacttagctcacaagtgcagtgttgatcaatctacagcctcatgcagtgatgtcttagctcgcgagtagtttttacaaagtctacagccgcacgtggatgatgtcttagcttacgagtacagtgtttaagaatctaccgccacgtgtggtgatgtcttggctcacgagtacagtgtttatgaagtctacagccgcgtgcggtgatgtcttagcttacaagtacggtgtttacaaatctacagtcgcgtgcagtgttgtcttagctcacaagtacggtgtttacgaacctacagacacatgcgatgtctgacctcacgagtatggtgtttacgaatctacagccgtgtgaggtgatgtcttagcttacaagtacagtgtttacagagtctacagccacgtgcagtgatgttgtagccctttgtgtgaacttaccactcacccagagcagcttcccgtcctacaagctctgtttatgggtaagttccctatatgggtgcaccattttttatcttttcacagcatgttttactgtgccttttctatgtttagatacacaaatattgttgtattacaattgtatgtagtcacatgttgtccaggtgtgcagcccgggagcacttggccgtaccatacagcataggagcgtaggaggctaccccatcccagtgtgtgtaggtccactctgtggtgtttgcgtgatgacacaatggactgacagctcatttctcaggatgttgccttgtcgttaagtacatgactgtactttttacctccagcttctcagtgtttcatatgatcctcaggtgactgtcccagcagtgtacccaggagcctcaccctcactcccccgtcccttgggtaccagagctgagcctcagggtggtttggctgcaatgaatttaacaggtgcttggattaagctcaggacccattgtctggcctcagatctatcactttctggccatgtgatcctgcacacgttgccttcttgtattttactttctctgcctgtgaaatggcaaaagcagtgccactcctagagtcattaggaggattcttggtatgcgtcaggtgcttgggacaatgctggccagctgtaagtctcagtacaattatctgatacagttatacctttacatggatatacaattatgtgtatgtagtcatgcaaatgccttttttcttattagtttatagtttttcctttatttctgctctggctgtcttcaggcatgaacccaacttgagatgatcatcgggtaagggacagtagggctttcacaattccttaaatagaacttgcagtctacttgaaaacttgcagtctacttgaaaaccagtgggaaaaccgaatgaaaaataaaagaattcactttcacaccatgtcacttgtggtatttggacacaatctcctgcgaggctttgccgtcctcctggtgtctggtttgcactgctcccacttctcttgcctcccgactctccagacatcccctggccaggtgtgtgtgtgaaaggagagcagtcatggagcactgtggccaccctgcaagcgggcgaggacgcggttaccagaggcgggctcccgggtcctgcccctccaaggtgtgttttcaggagatggaagaggcaggcttgttgccatatttttgtctctccttttttagaattaccatccatatcccagagagactgtgtccatgtttaaactcattaatatttttagtctttacatcccattctctaatttcttctttcactttgccgtgtcagtgtaacgttaaaccttttagggcctcagtttatctcctaaatgagacaagcagcgaatgagcagttcccacccactgtgacccgctgcagctgccttttctcctgaccccctccaccttccccagaccccaaccatctaccgtctgcttaaggcccttgggctgaccagcatcccctccctctgacatcaccagcgtttccttgtctctgaagtcgtttctctgcatgtaaacatgacgtgataaatgctgtctaaaaacaaaaaccctcctttgacccttttcacccgcggccaccccacggccctctctcctgacagctgaacacctcagagggtctgggttcatctcctgctggctcatgagagacaaagccccatgtctccacggttccctggtggcacccggcaaggccacctacgaccccaccctaatgttccacgctcagtgccagtggatgctgctgagcctaccctcctgctggaaacttgctcttctctttggctttagggactacacactgatagttcttttgttgaaataaacagaaaagcttatttttctgtttaataaaagatgtcttttatgatttaataaaaagatacttttcaagtcctttctgtggagaaggagttgcccggctgcttagagcgagttccggtttctccacacgctcagggccgcccctggatccggtttctccacacgctcagggccgcccctgggttccggcttctccacacgctcagggccgcccctgggttccggcttctccacacgctcagggccgcgcctgggttccggcttctccacacgctcagggccgcgcctgggttccggcttctccacacgctcagggccgcgcctgggttccggcttctccacacgctcagggccgcgcctgggttccggcttctccacacgctcagggccgtgcctggtttccggtttctccacacacgcagggctgctcctggttctggtttctccacgcacttaatattgtcctcattaaatctctactctccatccctcttttctcggcccctggtacccaccattctactttgtctatgaatttgactactctaggtaggtacctcatgtaagttgagtcctgtggtatttgtcttttcgtgactggctgatgttacctagcataatgtcctcaaggttgatcgatgttgtagcattgtgtcaaaatcttcctttttaagattgaataatatttccttgtacgtatataccacacttggctcatccattgtctgccgatgttcacttgggttgcttccacctttgggctgctgtgaacatgggtttatagatactgttcaagacctggtttcagttcttctgggtatatactcagaagtggaattgctgaaccatacattagttctatttatatttctggaggaactgccatactgttttccacagccgctgcattgttttaccttcccgccagcagtgcacgtgggtctggtttctccgtgtgctcaccaacagtaggtgttttctatttttttgagagtagttatcctaatgggtgtgagatggtatctcgttgtggctttggtgtgcgttttcctagtgatggtcttgtcgaacatcttctcttgctcactggctatttgtataccttctttagagaaatgactattcaagtttttccacactttttagctggagtggtttctttgtttggtttgcatttagttttttttggctattgaattgtaagagtcccttacacattctggatattagccccttaacagatatgtgatttgcaaatcttgctttcatttcctgggttgcgttttcactccgctgattctgttcattgtgtcctttgatgaacagaagcttttaattttgatgtccagtttatcctctttgttttctgcatatacttttggtgtggtagccaagaaataaatgacatatccaacacatgactgttcctttaacagtctacagttttatctcttacatttatgtcattgatccactttgaattaaataattttaaatattttttaaaggcagggacactattcttcaaaaatgtcaacgtcatgaagataaaaaagactttggaaatcttcccaattaaggcaagccaaagaaatgacaacaaaatattaagcctgatgctagggtgagccctgcactcaaggcggagctgtagggacattactggagtaatgggaagaattggaagagaggctatagattaaatattggatcaatattaaaattactgaaactgataactgttctgtaagatagtattcctattctcaggaaatccacacttaccttgatgtatttaacttatcctcaaatggttcagaaaaaactgtgtgtgcacattgtgtaagatggggtgggcagtgcaaagtataaagcagatggaacataatattaacaagcagtgaacctgggtgttagaagtgttctttatactgttttcattcttgcaagcttactatcattttgaaattaatttgaaaaaatttttacacatgctcataaacatatcaaatctataattatttttcaagtctttctagtcttactcaaaaagggaaagttgatccacattagtcacacttcatggtggaaagtgacggaaaccaagttggaccatttcagcaagcgaagattgaagtaggagagaggtgcctgaggaactggagggttgggtggaggtgcagcccagtgacagggagggtctggaagcaaagcccagaagatcctcaggagtccccttgtcaccttgcttctctgccctgtgcacacttctgtgcagatggatcagctctctgtgctcattccacctgggagaatgctgcagccccacggtcattagacctcctctgtcagacggctgcccatcacaagctaatgggcctgaggcatgggcttggtcacccagaggcaggaggctgtgccctccatgaggccagcagtgtcgcatctcaaaagccaagaagagagcacacaccctctcctctctggcatgggctgagcagagcgatgcctccagagagggcatgtggaagggacggggaaaacctgcaaacgtgacccagctaagtgcgaggtcaccatcagtgatgagcaggggggctttgatatgacgccatgggaagggcgctcatctctaaagcccttttccaaaatgcctgtgatccgtgtctacccatgaacaatgttagacaagtcccaaccaaagggcagcctacaaaacacctcaccagtcccctcaaaaccgtcaaggtcagcaaaacagggacatttctgagagactgtcacagtccataggaactcagggagacgtgacggccaattgtcatgtggaatcctgggtaggatcctgggacaggaaggggatattagggggaaatgaggaaggctgagtaaaggatagatttaaatcgtctcactgttggcttactaattctaactaatgttggatatgtgcgcattctgagactggggcatattgtagggcagtgtgggagctctaccatcctgctcaatttttcttaaatctgaaactcctaaaaagtgtatttttaactttttataaaattaacacataattgtgcaactcatagggtatatgtttcaatacatataacatgtagttagcagatcgggatattagatcgggagcgtgcatcatttctttgggaatgtttggtatcttcctcctagctatttgaatgataaattactgttagttatagtcatcctgcggtggtacagaacactggaacgtattcttcccagccagctgtgattttgtttcctttaacaaatctctccccatccctcccttcccagcctccagtatgcactgttctactttgtatttctatgaaatcatctttctttagcttccacatatgagtgagaacgtgtagtatttaactttctattcctggcttatttcactttatttagtgtcctgcgcttccgtccatcttgctgcagatgacaggatttcattctctgttatggctgaatcctattcaatgttatataccacaccttccatatccattcatctgctgttggactcctgggtggattcatatcttgggtattgtgaatcaggctgcagtaaacagaggagtgcaaatgtctctccagtacactgatgatttcatttcctttggataggcgcccagtagtgggattgttggatcgtatggtagttctgttcgtagtttggtgtgtgtgtgtgtgtgtgtgtgtgtgtgtgtgtatgtggtggggtgggggggggttggttttgttttgttttgttttgtttttgagacagtctcactctgttacccaggctggagtgcagtggcatgatctcggctcactgcaacctctgcctccccggttcaagtgattctcctgcctcagcctcctgagtagctgggactacaggccactacgcccagttaattttttttttattattatactttaagttctagggtacatgtgcacaacgtgcaggtttgttacatatgtatacatgtgccacgttggtatgctgcacccattaactcgtcatttacattaggtatatctcctaatgctatccctcccccctccccccaccccacaacaggcctcagtgtgtgatgttccccttcctgtgtccaagtgttctcattgttcaattcccacctatgagtgagagcatgttgtgtttggttttctgtccttgtgatagtttgctgagaatgatggtttctaccttcctccatgttcctacaaagaacatgaactcatccttttttatggctgcatagtgttccatggtgtatatgtgccacattttcttaatccagtctatcattgatgggcatttgggttggttccaagtctttgctattgtgaatagtgccgcaatgaacatacgtgtggatgtgtctttatagcagcatgatttataatcctttgggtatatacccagtaatgggatggctgtgtcaaatggtatttctagttctagatccttgaggaattgccacaatgtctttcacaatggttgaactagtttacagtcccaccaacagtgtaaaagtgtccctgtttctccataccctctccagcacctgttgtttcctgactttttaatgattgccattctaactggtgtgagatggtatctcattgtggttttgatttgcatttctctgattacagcttatacaaaaattaattcaagatggattaaagacttaatgttagacctaaaaccataaaaaccctagaaggaaacctaggcaatatcattcaggacataggcatgggcaaggacttcatgtctaaaacaccaaaagcaatggcaacaaaagccagaattggcaaatgggatctaattaaactaaagagcttctgcacagcaaaagaaactaccatcagagcaaacaggcaacctacagaatgggagaaaatttttgcaatcaacccatttgacaaagggctaatatccagaatctacaaagaacttaaacaaatttacaagaaagagtcaaacaaccccatcaaaaagtgggcgaaggatatgaacagacacttctcaaaagaagacatttatgcagccaaaaaacacatgaaaaaatgcttatcatcacgtctagctaatttttgtatttttttagtagagatggggtttcaccatataggccaggctggtctcgaactcctgaccttgtgatcagcccacctcggcctcccaagggtatgtgtgttttaaggagccttcatactgctctccatagtggctgtattagtttacattcctaccaacagtgtataagagttcccttctctctgtatcctcaccagcatttgatattttttgtctttttgataatagccttctttttttttttttttttttttttttttttttttttttttttttttttttttttttttttgagatggagtctcgttctttcgcccaggtgggactgcagtggcgctatctcggctcactgcaagctccgcctcccgggttcatgccattctcctgcctcagcctcctgagtagctgggattacaggcgcccgccaccgcacccggctaatttttggtatttttaatagagacggggtttcactgtgttagccaagatggtgtcaatctcctgacctcgtgatccacccacctcggcctcccaaagtgctgggattacaggcgtaagccaccgcgcccggccaataatagccatctaactggaatgagatgatatctcattgtagttttgacttttgcctccctagtaacaataagtataagcagctgagccgtccttgctgctgctctgcctgtggagtagccattcttttatttctttattttcctaatagacttgctttcacttaagaaaaaaaaaagacttccacttctctgatgatttgtgatgttgagcatttttcatgtattttctggacatttatttcttttgagaaatgtctggatcatttgcccattttttaatcagttttctttttgttttttgggtttttctttgctgttgagttgtttgagttccttatatatcctgaatattaatcccctgtctggtgagtagtttgcaaatgtattcttttattctgtaggttgttttttcactttgtttcctttgctgtgcagaagcttttaagttatttataatcctatttgcttatttttgcttttgtggcctgtgcttttgaggtcttattcagtaagtatttttttaaaaacgaaggagttcccaaaaataaattttttttttaattcgatgcaagtgaatgtcatggaaactttatgaatggacataaattgataaacaatttatcccactctttgccacagaaacgttaatgcatttttttcttctcttttttttttttctttttttagatggggtatcactctgtcacccaggctggagtgcagtggcatgatcccagctcactgtgacctctgcctcacaaactcagttgatactcccacgtagttgggactgcgggtacacaccaccacaccttgctcatttttgcattttttgtagagatggggtctcgccacattgcctaggctggtctcaaactcctgggctcaagtgatcctcctgcctcagcctccccaagtgctaatgttacatgcacccagcatattgatgcacccagagtattgatgcatgtgattagggtcttaggtagcaggggtctgtgctcgggattagcgttcagaaatcgagcacctctgaaacttggaacccatctggccttggaagaagatggaagagggcagtttgggctgcaaggtcggctcagtccacacctgcaaatggtgtcttttatgggaagaaaacacagagctctcttccacccgagggagagaaaagggaaaaggatggacagaagagtttggattggagagggttaagtttacaattttataaatgaaaaaagtacacaaagtatgctttggtacttcatttgtgcaatgcggttaggttagatgaaaacattcctctgttttctctcgttgctcattttttgggtgattggtatctgtttctggacttccctgatccagatcttcttccccttagccttttgtggtggccaccgtgggccgtctcatgcagtgtctgtagcttttgttagggcttgagtcctgggaggacctcctgtagaaataatagtgcatttgtttttggttttgtttgtggttttggatgtgtgaacatgatgcctgttatttttaagcactgttgttccttgtgattttaatgctcttatgtgcttcactggttgcaaagtaagtggcaagatattaaaatcccaactttgacagtaacacttgcctcatcctctgtgtaccttagctgccaggaagctgcagactagactcagtcacagcatctctgttaattaacttgaagtttttgagtatttaatttcccctctatctttggggatttttaaaagcttattgttcagatggtcttattatattgggtattttaaatgcttcaaattaattttggaagaaggtgtagtttaaaatattaagtaaaagttttggttgttttttcagcggcacattcataaatgccatcctcacacggtgagcgtggctgtgctgcagctcagctttccatgaccgggtttccctgcgtcctgtttgctccccttgaaatgccacagagttggcactgaggacagcaccagctccgtctgcatctggtctgtcacgctggtttttgagattgaaggtgctgaggatgctggacccttcaggtcatgagtgaccatcaggccagtgctgagtagtggtgtgggcaggcagggtgggctcccagtggatgctctgctgacatctgcatcagatgccccaccccagggcattggtcaggggctccagctgcactggtccgaagcagttgtctttctggcgggggcagtgctgccgtatgccggcgcacttctgttggggtagagaatgctatttgtttcttggttgttttgacgtctccagagctggggtgctgatggattctctgccagctagcgggtgctgccagggggtggtggtcctaggcagagggcagctgtgctcatccgcctttgcatggctcagacaaggctccttgcccctgggtgagaatctcagttggaggaagaaagagtctcttctgtagctttgcagggaaggattagtgagaagttcaaccatggctctctttagacaaatgatgaaaaacctgattatctcagcagcaccttcccacctgttcccaggaggccagacgtgtgatgccaggaggcacgaatgaagaatgaagacctcacagacctcttgtgacagccatgcattcgttccccactcggttgcacggcgccatcagggcttcagccttccgagacgtcgcttctagcaaaacaggttgctaagtttgagtccatttgagggcagttcaaggacagggcaagttagaggctagtagcaagttccctcatgtcaactctctatctctgcttttctagcaaaagtccgaacttcaagtccacttgacagcgtaggatgaaaagacagtttattccccgcaagtccaagatttatactggactggagaagaaataaggggtgagacagaggccaggctggaagagtttattcagacacacagttaaattgtaaccttgatgtgaaagtaggtgcactgtttaaaaccaactttcacctagggaagggtgtcagcagtaatggttcgtggagccgatttgggcagcagtaatgcacgttggaggcagcaagaaaagtggcacaaagttccggatctggagctgacaggtttcctcagccctgagttgtctaaagctgactttgcagtgtgacctgagcggcaggtgctctcacagaaggtgagctctgctggacgccagcctcggcacaatggctcttggaagatgagagtcttcttacagcatgacttggtccttttggtggctcagtcacacttcccgcaggagagggccagcctggctgagcctgtatttctccctcccccatggagtcctcctgctcccctctggctcccggagtccacagacctctgcatctccctccagcagcccacctctcgtgtgccaggcaacgccttggtgttaaccttacaacctggttctaactgagaagtgttaataaccccagctacttataactcacgcaccacaagcacttcagattcatagctcatttaatttgcccaaacctggagatgtctgcatatgatccccagtttgagaaagtcagcaccgagcagcacactttgacccgggtcttaactcagcccactctgtaactgtggagaacactacttttgagaacaaccaagatcacctggtttcatttctatgagttctttgcacatggagggaatcagccctctgatgtgtatgttacaaatatatctcctagttctttaggaagacatctcttctgcccttagatacggggtagcttttttcctctcttggctgtgtggatattgttccccttggtgtagaagaaggaattcctgtgtggcatttgctagcaggatatttagctttttcatccagcaccgacctgagtgatttagcaccctgtgcctgttttcatacaaaacacacctttttcacatgaaccagagagggaattcttgatgatcttccgtgttttcaacacttcagacaaggttctcagctgagattccgtcttgcttcgcttcctgaggcttaggatcaatatgggggcagaggctggagagagtgaaggacatacggccggagggtgaggcactggccagcacacacctgcccagagcctcacctgtcttgttttcctccatgcccccttagtggctgggcacaggccaaggtaaaaacacacagggatggagataaggaagatctgggaatgctgcacagcctgggccctgcctggcagagccctggggcatttgcccatcacttttataactccagagccttgtttcctgagtgacccccttaccctgtctgaagtcatccctgtagcgacagctcccagagctgccaggtgcatctgattccggccagcgacaggatctcaaacgtcctaaagtagagatgactgaggattggccgcagaaatggagatggtgtgtcctaaacagccctcggttttggctgagtttcactccttggctggtcacctggcctttgtaggatgctgaggtgggggcctctgaccccctcctagttctttccctctcctcatcatctccaggtgcccctttctcaccgctgccccggccagcttggcctggcttctctactgctgtcttcatttggggtgaagcccacggttcgctggcttttgactccacttggccgctcagatcagggcacatctgcgggcctcctggcacggaggaaggagtcagcatcattgtcctggcatggccatgtcctgccgacatcccaagtatgtgcatgccacctctggctgtgagcttctccgtggtcagtgtccagaggagagcacatttgtgttgcaccgcaaattctaggtattctcatggcaagtcctgaattagcataatgctaccaggctcctaaaagttctttagtttcttgcaattctgtgttaaaacagccagttaaggcatttttggaggttagcgtcatcaagcctatcggcgtgttccgtaagagtttgaatcatgtgagctgtttggcagccctcatcagctgttggcatcaaggtttccatttaagacagacaccacagagttaatggttgtcatctgatctgaaatggctccagtaagtctttctccctcatcagactcctgctgatgcacacaggcaccctccccagcgtctcctctctgttctcccgcagaggagaaagtgctgctggccttccctgtttccgccacagaggatcctccccggcacgggtgcttctgtctgcagcaaccggagaagacacagcaggctggggggaggaattgtcctgtggcctcagtcactcaacagccagaggagatggtgcccctggctgcagacagccctaggtctggcaggagcagtgcagccacatgtctggcacgtggaggacgtcaggccggtgccacctaccacactgctgggtgcctcccactgtggcagcagaaacacccccattcccagaggggtgcgcaccctccgtggcctccctcgtgccacgcagagggctgtgctggactggtccctcagggcccggagacactcaggcttctttcttggtacctcctgccccttccctacccctcatcctccttcttggtacatctgtcagttacagaggaagactgctgtgtcgagtgcataagagtgggttcttggtgtgtttcaaatctcagtgagggctgggcatggtggctacacctgtaatcttggcagtttctgaggctgagacaggaggatcatctgagaccaggagcttgagaccagcctaagcaacatagtgagatctcctctctacagaaacttaaaagttatccagatgtggtagtacacacctgtagccctagcaactcaggaggctgaggtgggaggattgcttgaggccaggcggtcagactgcgatgagccatgattgtgccactgtactccaggttgagtgacagagcgagaccctgtctctttaaaaaaaaaaaaacatcactgggggatggtaggaagggtgtctcaggagcccacaggccccctgcccgcaccctgtccccaggtgggaggcatgtcgtcctgtgattcaccatcttcaagccttcaagcactttctcctttgctttattttgtttaaataaaaaaaattgccccttaggtgaatgaagagtgtgatggtccactaggcacctggtaaaaatgcaaaaccagtagtgaaggcctcaaaataaataatgcacctgggaggactgttagcgaagctctggttgtggcctgctgcgatgtccttggcagttcttaagattaaattatcattatgtattctttgaagtaagagtttcttttctgagtacctttgccgtcagggcccagcaattctctctgctcctgtggctgcgatgcacgcgctgtcttgggagggctctcggccgctgcacacctggccctgccttccacccgcaggacagccgtcggtgcttgaggaccaggcaacacagtcgtgggtgacccgcagctctttcaaggaaactctgtaatccgtgttcttttccttttctgaaaatgctaagtggactcatggttactttcagctcagagtcattttcccagttactttgcaggtttgagagatgcggcttcatctgccttctctgtggccctcgcttcgggttcagtttcctctgctgctgggctgctctttctgcagcttcgtccttgctgttggatgatgctcagaatcagctttcccggacagctgccaggctcgtgacctcgtgtgaattggtgaaggggaaaactggacagcaaacacatctaggaatattttctctttctgtttgcagagtccgcttagtggaaagaggatcccctcatagtctgcccctgatggaatcgggaaaggtaagtattataggaagaggcacgcatttctgtatccgttcgcttctgactgtatgggctttgaaattttaggaaatgtattttttagaatgttttttccaaaacaatttcttgaaagtaacatatcagtgagtatagaaactcaaaataacagtgttttaaacaagttagacttttttcctcaggtaaaagttaggaaataggcatctcctcctccatgaagccagcagaggccctggtgccttcagcctcgttctgcgcattggagcccaattaccaggggcccctcaggagctgaagcggctgcttccgctccagccatcatttccacattccagccagcaggaggagaaacagaaaaagaagagaacaaagcatgcagaccatagagaaggttcccaagctgtcctacactgaaattccattgatcagaatgtggtcacatggccacacctagctaaaggttgggaactattgagatatcaattctgaatatgtaaaggcctacctaaaaatcagggtatctattactatgaaagtagaaaagaatggttaacaagagacaaccagtagtttctgccacagtgggtgtgttttttgtttctgtttttgtttttttgtttttttactagaactaaagggcaagaaagatatttaaacacctaaataaagactcttttttttttttttttttccgtttcggccccagttgtcagattccttctccattgacataattctaagagcatctcatgttgcttctattataaagttgcctgcatggctgcaagttagaatgcttcacagagttggttccaacagtaggaatgtgctcaccatccatcctaacagtctggcggaccatagtcagcagcagaatccagagccctgaaatctcacttcagacttaagtgagatttaacagtgtgactattccaagacgttctgtgtttttaccataaaatgttttgcctttatctcaatcataaatgttagatgagctgatctgaggcaggctatattcaggatttccagaataaacctttgattccttatataagtggtatcagtggaatgtgagatatttctaaggtaaactttaagaaggaaattctggccagagccagtgtctcatgcctgtaatcccagcactttgtggggctgaggctggagggttgcttaaggctacagtaagctgtgatcatgccactccagcctgggtgacagaactagaccctgtctcaaaaaaaaaaagaaggaaatgcttagtactgacatctattacagtaaaagatgtttacctgcaggaaaaagttccccagtatcttgagttgaaaattcggtggagatgagctggagatccacacggacgttctaacgaaaacctgcagacttcaccagcagttgacccacaatctttcccttctggcaccaccagagcagctgcctactatatcattttgccaaaagcattttgggttatcttcgagtccatgcttacccctgaaaacgtcactatgtgactcccttccttcagcgattactgcaagcatcaccctccatccatgtgtgtgccatgatgtgagatgtaatattgactctatgtaaatatcttaaataacttcattgaaacaactgaaaattcccatttttcaaggtcaggctgtgttaaacattatatcatttaccatgtttttgttcaaacattattttcatgattttcaatagatttctcttagctttattgaggtatgactgacaatcaaaatgtttaattttgaggtcaccataacagcatacaatattgacagttacagtgagaatgtgattgtgaggctgtgattgtgaggctgtggttgtataatgggtcataactatgtggcatatagttttgatttaattgctttctaaacagtcttgaaaggaaatggcataaagatgagattgaggttggcttgtgtgtagtctctccctgtattcctcccattgacaagagacttttcctctcccaaatagatacttccaggggttcggattataattgccaacccagaaacaaaaggaccgctgggggactcacaccttggagaggtgagttgagtgtcctccgagatccaggttacttttctgttatgtatccttggcttgccttgacaccatcagaactgctcacatgccctccatctgccacacaccggtttgagctgagtgagttatgattgcctgggaaatagcgtgaggtaagctttatggctcaaatgagtccatgaaagctcacaattacaaaatggcacttccttagggaagtataatagattgtcctcaaataattctgaaaagatttaaacacataatgtgtatggactgagtttctttatttcttggctcttgagtttgctttccacgttcctgcttttattactgagaagtccttcaccaggaaagtggcagagacctccacaggaagtagtgtacaaacaacagcatcaggacacagtagccaagagatcatgtgtttatttcagatcagaaagcaaacagtggaacttgacacctttgcctcattgtgttcagaatgagcccgccctggctggctcttaactccctgccactgtgcccctccgcactggcgggatgcagctagagaaagacgcctcgtggagctgtgtggccttggtctcctctcttgacacctcatctcaagcaggccctggcactgctgggcgtccccagtccgagaggccacttgtctcatgcgtcctccttccgccgcattctctctggcactgagcttcctgcttctatgaggaagcagagggcactggagaagagcatgtctggagccagcctcctcccacggtggcagcacgtgtgccctccctccggttaccccggcctgccgtgccgttggacaaagccccatgtctggccaaggacaccctcactccccttatcacctgtcctgtcccatgaggcgccccccttcctgaatggctcccagcagcacatgtgggaggcgtgctaagaactggcatcttataaacagcaccagccctcctcctcctcagccctggacgcatccccagcacatgcaagagcacgtttctacacgcacgtgggtgaacacctgaccaatgagcaagccctccccagttctcacgtcccagcttgctttgcttcttgggccttgtgttttttttttttttttttggcccctcacttgacctctctcagtcacatacatgaaagatcagaactgcggagataaaattctgtgcagctctcacttaggagtttcctttaaatgtgttcctagaaacaaagctggaagcagagcctgcttctccggcacctggagggtgtcctcacgggtgctgcccgagacgtaggctgggccagggtcagaattctcttccctctgagggtggccagaactggcgaaatttccagggtgactttcttattaagaatgtgtgttttttccgctttatgaggttaattgagaaagttatataaattaaggaatgcactgtgatgctttgatgtatatacatattatgaaacagttaccacgaccgagttctattatccatcagctcacattgtgtgtgtgtgtgtgatgagaacatttaggatctattctgttatcaaatttcaattaagtgatatagtattattaactgtagtcaccgcactacattttctccccataacctgtttgccctctaactgagggtttgcacccttgcccgtcatctcccccttgccactctgaagtcccggctaaccaccgtttaccctccgcttctatgaactcagctttttagattccacatgagtgaggtggtgcagtatttgtccttctctgttctggcttctcactcagcacaacgtcttccaggtacatccatgctgttgcaaatggcagcatttcctccttttttatggctgagtaatattcagttgccttaatgagaattttctttgtgttagggaacagaggacggctgtcatttccctgatctgatggtgcactgtctctctcagtttcactttttcatttgttgtgcaggcagtgagtgcctgccatatgtgaggcactgctctggggacgtgggtgcagtactaaaccagtttctgacttcctggaacttgaccacttttcattgtcagtaaaataatggaaacagccaagcccagaatgtctccacagcaaacactccagagtctacaaggccctgcctctcctgacccttgctgtgtgggcacagctgcgtgggcatctgtggaacttcactggttttgcttttacccagccctgtccatggttctccgtaacccacgtggctatcgctttgactcaccatatcagtctttgcttacctatttccccaaatgtcagacatcaggcattttcgtttccggtttttggtgttatgtgccttcatcccttaggttttgtttttctgtgtgttgttttattgcaatatatgtccaaaagtattagctaaccaggtgaaatgagaaaagaaatctcaaagcttttcagcattgttcttgctctttagaaataatcattcgttaaagtgtaaggaatctagtgtgactttgttcatttgatgtgtatatttttaaaacctatttgttaaatcttcaactaatctgctttaattcagttccccatagggatgccttggctggttgcttggccacaaacttggtagactgcctttatttcagtatcctctgtgtgtctctcgagaaacccgaatgagattaacatcatcttggttattcagtccaaggaaacgtttactatcactgaatataatgtactgaattgtcaaagtagttgtagtctcatttccctggagataaaataatgtcatccacagtgacatttccctccgtttgcagatttgggttcacagtgcccacaatgccagcggttatttcactatttacggagacgaatccctccagtcagatcacttcaactcaagactaagttttggagacacccagaccatctgggcacgcacaggctacttggggttcctgcggagaactgagctcacagatgcaaatggaggtgagagtccaggctggcggcccccccccaacagatgggcagagaggttaggctcctgtagatacagaagcctttcccaaggtttacagcagccaaagccaggagggcacgtgtgctagctacaacccagtgtgaaaagaaccgagtttaagagcaagaggaaagcaaaatgcaaatgtgtccaacaagctgagctgtgcatcacataccctgtcctgtcctgagaaccaagagctgactgaaaaccggagaggggcatggctgctgagcatgggctgcagtgtcacccacagcaaagtgctcagagtctcagaccacagagtctcctcagcaagcctgaaggctgcctgctcccacggggtccatctgagacagaagctgtcccagtggctgcaggaacgtgcatgctgctgcttctaggactgggtctgcccctgtcagggaagaggaggccgcgaggctctcgggccctggtggccagctgtctctgcccatgcattcatcagagagtagggcctggtgctgctgatgctggtgcctggtgtggagcagccaggtggacagcattgcctttgccccatcagaggagagcagggtgaagccaggggtatttcatgacatggacatgtaaaagtgcacttgtatagttaattctttgcttattccagaatcctttctcacctccttagttctgctaaaaatagaggcaggacttggctgtttcacaacagtggcagttgaggttcctggtgagatcttgactcaccaaaacctcagggagatgagtttgcagacatcagtaaggcttccttacatacctctctaacatacctacaatggcctggcccaacaggctatgtttaggaatcatacagaaatatcctggcatgacatttgcattgtgggaaattatagactagtttgaggctactgcctgaggttcctggaagctgcaaaagctggtggcaatttatagtcctagagaaaggccaggaaagccacgtcccgctgagtcctggaagcagggataccctgaaggacgtgtccctgccacaggagaagaggcaaagctgctgtagggggcagaggccgagtcaatgtctccatctttctttgtctgatttaaattagaaaatacttatctctgtctacggccataccaccctgaacgcgcccaatctcgtctgatctcggaagctaagcagggtcgggcctggttagtacttggatgggagaaaatacttaactctgatgttattttatatgtcaatcatgcctttcaaattttccctaatatgcttactaccttataaaaatttaggacatatttccttattaaggaaagataggacctgaccacttgttgtcattgtcattattctgaggtttgcaagaaggatagaaataaatttcctggctctatgagctaaggaaatgttcatgaacaagagcaagagctatgctttcttttcccacttatacacagaattagtagcacagagaagcatgtgtgggatagagtcacagagctggtctgactgtggctgcactgtatcccgtgtgatcttgggcagacgaggcctcagccgatgggtccacggaactcagaccgctgggtgccgacttcgcccctcagttgctcccgatgaacatgcaatcaggcagttgactggatatcgaagctgagccaggaaagatcttctcccaaagcacaagtgtagagggcgcatggcggctttgcagccagcctgtggggtactggcacacgagccgagcacttgccaaggagctccgtggcagaaggaaacaaacgtccctggatccgtgagccccttcctttgcatccctgtctcacttgggggtcgtttttaatctttttttaagaaaagaaggaaacggcttgagcggcattatggggaagcttacgcaggctgtcattactccacagagcgccatgatgccctctacgtggtaggggcactggacgaagccatggagctgcggggcatgcggtaccacccaatcgacattgagacctcggtcatcagagcccataaaagcgttacggaatggtaagtcgtgagcttgcagcttgtacccaaatcaggagcagagtttgtgaagcattgagaatgtggagagcacggcggtggaggagagttttgttaaggtagggaagggggtgcgattcaacatttgactataaatctttatcttttggggttaaagcaacaaaagaacatgccacatgtagagttaatgtaccatatattacctgaaaacgatagacttctattgccgtgaaaactacttgacaacattttccaggaagccaaattgtttggtttttaatttacaaaatcatgatataggaagaaaacaaacctcacacatatgtaggcacagaaaatacttttatgactgttgacttgggaactggaagtaacatgagacatgggaaaacttcagtgagaaggagaggcagcgtttgtccagaccccagaagagacttccaaaggaagaattgcttgagttaaggctgacagtgacaaggtgtgtgcgtcgcacctgctgcctgggggcagactctgctctgggcccaggtgaggactctgaggctgggactttgtctttctctctggcccatttaatctgttgtgaagtgctgagtatgtcaatggtgctgccggagattcagcagtaggttcttctgaggtgtgggagtggattggatgctggagtgccgtaagttaagtcggccagggccggggagttttacaggcttgttcagtgcctttagattggcagtttggatgaaaagtgactcaacaccgttggctttagacttgttcattcccttgataacagaccgggtgctaactgaggggcacctggtgaaactggtctcagtctcaggtcagaaaccctgagggaggtatgttctgcactctcatgaacagctcttctgggttgaaaggatgggttctgagattgttccttcctcctcttagctagctgagatgcaataaaggctggtacttactgccatttgctgaatttgaacactaaggccttggcagaatttacaagatcaagtctgcatacctgtccgtgttcgtgtggctcaagttggctaagcccctactctcaaaagtcctcagattgtcgatttccttgacacttctctccttgagtatacagagaagacagaaactctaggaagactttggcccagaaactcggccagggcctaccttattttccgtctaaatagctacgaatatcagttacagccttccgtttttgtatttttaagaaaacaattttaattggcttgtgtgacctccctcaagcattttctgtctggtttcccgctaaaaggtgtgcatcgagggcctcgctggtgccctctgtgggcttctagaccgtggtgcttattctgtaacaaatgtcgctgctgttacctgccatgtgacccccaaactggatctgtccctcaccgggtcaggggctcacatgccccttgcccacacagtgtcctttgagtggacttttgaatgtttgagatgatccaggtacaaactgctttgctccaccttccctctcccagcctccctgcactgccccttggggccaccatcggctgctccatgctgagaaatgcggctgtgacacccagcgctgtggaatgggactctccatgttgccaaattcaagccaaacaaactttctcatttctcatcagttgttctcagcattaaatagcgtgcacagctcctgtaaaagctctgagagtcactggcaccaccccataggtccctggcagaggagatagtggagcaagcacaccctcggccagctctgttcctccagagagccaagctgattcctccggagagccaagcagatttggatactctaggactattccatacatttcaaatgccgtaataaaagtataccaaatgcgcctgagacgtctatatctgtgatatgacagattcacaatgtgggctcacatgggccatgtagagcaacattttaacatcaccaggagcagtatgacaggaattaagcgccagcacgtcctctgggaaacagctcttagcatgctccataggcatgcggcagtcacaaagcaaaatccaggagaactgttgagaatttccaggaaaattctccaattttccctttcaatttaacataggttggccatactgaataaaatatgcgtttttttcctaactgacttactctcccacttagaacaatagtgagtttcctaaaatatctcctgcctcaagctgggatagaacatgtttgtcaggtgcgtgagagcagatacgagcagccctggagcctggtctccatccagcccactctgcccgggaaccttctggcctcctcagccaagcagacctcaagtaccaggctctgtgaatgtcagggcccttaaacagttagttccaaaagccattaaatatcctttaaactgtaaagcaccgggtttttgcttctgccagttgggcagacttaatcctctggtgcctgtcctgctgaaagatgactcgatcccagataaaacatttctgagtgaatcttccatattccagaagacttttccctgcacatgggttagccatggctgtatggcagccagcccatgctcagtgctttagagagagttgttacaatgtccccacatctgcgttcaaggggctggctcagctggggcaagcagcttagctgggcacaggactggtggctcttctccacgtgtttcttatcctccggacccaagggccagcccaggtgtgtccccatccttgcaatggcacaggcacgccaggagaagcccccatatccagccctcctggagcctccaccggcattcatctccctaacacaggctgaccaggttccatgctgagcccaagccccaggactgggaaacacacccccactcaggcgcactgcacagacagaggagcaggcacccatgcccttggcctccgcacgcacggccctcagcagcagagctggactcgggtgcacagacagagaggagtaggcacccatgccctaggcgtccacacgcacggccctcagcagcagagctggactcgggcgcacagacaggagtaggcacccatgccctcggcgtccacacgcatggccctcagcagcagagctggactcggggccaccgcacagacagagaggagtaggcacccctgccctcggcctccgcacgcacggccctcagcagcagagctgggggtctggaagcaggaggcacagggctgccttgagggtacgaggctgatggcacactgcactgttcagtgagggcattggtcctccaggcagcagcaaagaggcagcactggaacacagactccgctggccaggtggagtgatgctgtgctagaaatgggaactcgggaagatggtgaaacagtcgcagaagccaccgagagagaaggctggtaggaaacaccgacaggtgctgtcgccaggaagtctgtatggggaacgattagtgggcggcagacggaggacgtggagaggccggaggagactgtcgggcagtgctcaggcaggtcagagagagccaagtggaactttgaaaccacggctattaaataaagcattaataaacatataatgatggctttcttttctgtcttttagtgctgtgtttacctggacaaatttgttggtggttgtggttgagctggatgggtcggaacaagaagccttggacctggttcccttggtgaccaacgtggtcctggaggagcactacctgatcgtcggagtggtggtcgtggtggacatcggcgtcatccccatcaactcccgtggggagaagcagcgcatgcacctgcgagacgggtttttggcagaccagctagaccccatctatgtggcctacaacatgtagtctcgtctcttggcttccatggacttttctagagatgtagacattgttctccgtgtccactgaagcgtgcagacacagggcaacactcaccagaatacagccatttgtggtgagagtggaggaggaagaggaggaggaagaggacttctcacagcagccacgattggcatgggggtgaaatgtgaatttaccactgaatttcgctcagaaggactttggattactgccttcagtttgttggaaaagcccatttcaaaactttcttttcttttctttcttttttaattattggataataagtgctttcttcgtaaatgtggtattttgttaagccgaaatagcaattaaaaaaatatcctgccctccagatgggttcttttaaacaatttatgtagtgtgacaaagaattgttttctctgttttaatgtgtcatgaaatcttaatgacatggatctgttactaatttaagccattgctagatctcatccttttaggaaagtttgaggtacgagaaaaccttccaaatagcaccttccaattagataatagcagctttctttgtcagaaatgtgctgaagaaacaaaggctggtatacggccttcgaagttagtatagaatgagaagaaattataaataaggtgtatttcggcaattatcttgcaaatatctttgtactaaactaaaaagataaaataagttaacttcctcaatatgtaattatgtacaaaacgtttaatttattttgatctctttagaactataaaagagaaaaacattcaagaatattaaagtcttgtaatgtttgctaatataaaaaagtgttgtattatcttgcgtggatagtatcacaacaaatatatatatatgaaatataaattcactaatgaacaaaggagattttaaagtttaagatgcagaacttgtcacttgcatggtgtgccccccgtactcacatacactctgctgttgccagcagtcgcagaccgcaggagccctgtctaaaagtttcttctagaaccagagaccagcaagtgaaattattgccatctcaaggatggcaaaagaattcaaagctcaatgtgcactatttttttctttgctgtgggacaacagtgaatgtgtttatgccagcgtgtgctgatgatactgaggggctttaggttggcaaatagcactgttttcttagctgcaagaattcattgcacaatgtttttcatcatttttgttaatgtcatctttttttggtccttgctacgaaaaggaatgcgattctgtggtcattcgcactgggttgcattgattccccctctgatggccaatgtggagtggacaaagtgtccggaactcacatcggtgatcgtcccctcgtcttaagacccagcccgctctgtgtgagcctctggggctccctcgctcagtgagcacagttccccgggggttcatgccagagctccggctgaagcaagaagtcctccagctgcgtcgtttgccgcctgtggacgagtgcgccccagtttctgccctggcagctcctggccacaccttctcagagctcacctgtgcacttctaaattgaattggcccacggtgtccaaccaagaaggagcatctgcactccgagaaagatgtgttctgtaactgccccagtgtgaccccgcagtggctctcggtgctagatatgcatgactaagattgatgctgggcaaaatgtagatgatctttcattatgttgtgggcagcgtctttctctgcctttgctatatgcagtcagcagtaagccttttgctaaaagagttttgtttgacttctgagatccaaggctgattgttgttaaaaaaaaaaaaaaaaaaaaagtggcacatttaaaaaaatgtgtctgcatatgtggtgcatccttccatctccacaaaccatttgattcttgaaatattgtttgacctcattgctgtgtgtgaatatttctccacatgcttcagatgcacattcctagtctctgcttcctaaggggggaaccaccacacattggggggaaaaaagacattttcctacacccacccaccttgttgaaagggaggtaggtttggggcttcaggccaggcactgactatgaaacattagctgcagtgtgcaggacagctttgaggtccagctgaagtcaggaagcaaaacaaatgtagatgtcacttcaaacataatttcaactgtcaccagatcaactctacattcaaggagtgtggacgctgcagtgcagttgtgagggcagttagcagccgcctcttctgcatcctgtcaactctgattagttagagtttaggctcaaaagagttggtggactgagattgaaatttggttgtgcaagagaaaggaaaggagacacttagtaccaccagtttcagcaataaagaagggtcattctgtattcaaaattgtactgtagataaatcattcatgagattgtaaaaaatgtttgtcttgtgaccttgtgcttttgaagtcagacaaaaccgtgtaatcaacttgcacaaaaagagggtacacagtgaacatataaacacagacctaatcaaacaggagcagattcctcatggtgcttgtttattatatatatttaatcctgcttgacactttacccaagggagatggtcccttttatcagttgaatgttagcagcgttatttcagagtgtggtgactggttagagaaactcatgtactcaaccagccacagtttcaaacaaaatttttatgtgcaaaggacagcaaccttcttgtatgttaaaccaccagtacgctttgtacatctgtgataacgcctgttttatattcaaatgaacaaataaaagcttttatttttgttgctctgaaaatagcagtttcttaattggtcccctggaaagatgtctgggacagctttaatcccgggaaggaagtgactcctacagggaaatgtatctgactctgtttacataatttgttgcattacttagtacagataatcatactttgaaaaatgtttaaattttgatgtgggcatttattgctaaaaataattcctatggcaacaaatgttttgtgaaatgttttttttaattcttttaaatatatctaaatatatttgttcacattttgctgcaa

SEQ ID NO: 6 - DNA, 167794 bp, Homo sapiens
ctctccgcgcggccggcccccagtgcaggcggagccgcgccgcgctcccaccccggccgggagctaggagccagcggccagccccgcgcagcgcagcgcagcccgcagaagcccggtcagcgcacgtgcccgcgagacctgcaaacttgtgccaccggctctgcccgtccccggggagcccgaacgccccgcagccctcacccctcccgccagtctccagccatgggtaagcgagcgcgctggctgcgcgccacggccacggtctcgcgcccccgccccgggagggcgcgcccttccgagggtcccgcccctcccccgctcaggtggcgcctcctcggccacctctgcgacgaagccgggacgctggaggtgggaggggcgcggcgcaggtgtccggaacgcccaggtgcgcttccctgttgtatcctgtggggggggtggtccccgctccggctgcggccaggctgcacccccgcacgtgcggctcgcgggagcctaagagctgggtacccgggaggggttgcagagagaacagacggcgcgtcccgggctagtgctttattttaaggggccagtagagagtcgcttcttgcctgtttcccgggacgctctccctgtcgcccgagctcccagtccagtcctgccccgccccgccccgccgtgcttctgttctccttaagcccgcgcgaaacaaacacccggttccccaagcctggggtcttccgggagctcatttcgaaaccatgacccttgaaaccaggaaagtgacaggagagactctggacagcatgggacggaggctgagtctctcctctttgtcccttgttccaactattaaaatgcggcccgggtgcaggtggaggcggtgtgctgagcgggttccaatgcaacgggggaacgactagcaacggcaaaaggctcagctccggagggttaaaatctgaaatctccaacctggcccgaggctggtgtaaggcggctgtaggattctttttgtcacttcctaacaccctgaaatgctgccgtcagcaacatgtctttaagtggggactctgtattgggaggaaaactcgtaaagagtgctgtggaaatcagcctcattccgcagcactcctgaaaacgtgtgacagctgtgcttgggaaagggtttttctcctcctgctccgttatctttctctagtgacagactccagccacaagccacaaagactgtgaagagcattcctaacgaggacgtcagtgggtttaaccattgcgagttaatggtgagggcttgggaattgcttgcccgctcctccgcttcccctaatcattcatccccctctttcacattatctttgctattaattgtgtgtgggggggcgataattttgtacggattaaaattttggtgaggagtaaagggggcacttttttgcatttcaaaggaagctcaaataattttctggtttacatttttaaaaaatttactaggtgatcaaaatatgaaaggagataaggcccaccaaatccaacaggaaaatttctttctaaaaaggcaagaactagcataagatccttctagaaagggcagaatcgagtggcctgtaactcaggttcctacttctcttaatgtcccccatgtgagcagtcaaaccattcaacctccgttttaaatgaggctcatacacaaaatgaggctcagaggatgactgctactcagcctgtgatcactttggtgataattgccaccaaagatgttacagttacgaacaagtgtggtattgaggaaagcatcaactactttttctgaaatcgttattttaatttaacgctaggcgtttggatttgtacgtggaattatcacacggggaccttctccagaacagctttcacaatactttggactgatttaggggtagggtgggcttcatttttaaacaggtgtggagttgggtgcagttctcatgaagcaaaggcccgagccagagacctgttcttaaggaagtactttgtgttttggacaattgttggctccacatttcaattgccaatttatgttaatttgtgcatacttcactggttctggcagtatccttggttttggttttagtttttacattaaaaagaaagttcccttcatgtaaaaaaggaaacatactgatttcctttggtagactcttagtaaatacaccacagggccatgaactggttttatttttccagatgtatttaattaccgtgcatcctcttatgaatgttttaattgaaatgatttaacgttgggaaaattctgaccattggcccattaagtcgggactttggttcttaatacaattagttccttaaccaggatcagttaatttactggtaaaatagatgaggtttgtagaaataaaagtcccttcagactcaaattttaaggtatttgcaatctttaacctaaaaataaaataatgagtagtggtgatatgtgtaatttcacttttcattacatcttgaaagaaaacatgggtttttcattgttaagccagtttttttatagccttaagatgtaattcacatatcatacaattcacacgtttaagtatacaagtcagtggtcttcagtatattcagatttgtgcagccatcactactatctaatgttagaacattgtcatcaaccccaaaaagaaatcttgtacccatttcgcagtcactcctcattctcttctccccccagcccctggcaagcactaacctactttctgtctctatggatttgcctcttctggagggttcaggtaaatggaatgagccaattgatgtctgaagtgtatttgactgttcagtaactttggtcgttttgcacaatgagatgttgctgtattgtgtatgcagtacgctacctaaatgagtgtgttgaaactatttctctggctgaagggttccatgtttggctgcacatattgtgaaggtgagtgagagtgcacacacacagcacacagacacacacacccttcagtgttaactctggttttatctgataggaacttgcattgcccaacagaattttgattctgttaccttgttcataggcctgaaggcatagcaattaagtgaattccatgtaataacctcttataaggcatttgtggaatatccaagctgctttaatatggcttatgtatccagagagaaatgcggattttgtttctttgcctataattgttttatttttatttatttatcttttggagacagggtctcactctgtccatgctgtactgcagtggcctgatgtaataactcactgtggcctggaactcctgggctgaagcagtcgtcccacctcagcctcccaagtagctgggactacaggcatgtgtcaccatgcccgattaagctttacagttttttttttttttttttttttgtagagatagggtatttctatggtgcccaaactggtctcaaactcctggcctcaagtgatcctccctcctctgcttcccaaagtgctgggattacaggcgtgagccactgtgagtggccaattgcctatcattttaaatggaaactgtatacgaaatgatcagatacaacaaaatattgaaataattgtttcaacccattttgtggtaaggaagtttttataaggattatgtatttaaatgtcaataatttcactaaatagcattataaaaaattttggtctagagcagttctttttaatatgtgtacagatcatctagcgatcttgttaaaaaagcagtgtctgattcagtgggcctgggtggggcctgagtttctgcatttgtaacaagctcccagtgggtgctcatgcttctggttcctggagccaggaagcaaagaaggctgttaagcagagaggccctggtgcctgccccagcttgcccactagtttgctgtgtgatcgtgggtaaatcattttctcttcataattttagttgactataaaataaaagaatttgatgaaattatttctttgggtctttacaggtcaaccaatatgtaatttagaaaaaaagaaatgagagagtaatgttatgcttgaaaaccacgagaaaacagctccctgatggtctaaacactacttgaatgcatgaagccagcatcagaagtgtcacctgtagttgggttaaatgctggcatcttcgatgtgcatgcttccagtatgattggctcttctccaagggaactggtggaggaagctataatgttctccctctttaacacttccagctttggcttctcctgacctcttttccttaaatccctttcttccccgacatccaggctcaagccaccctcagaggctgcactcagaaagaagcacgctgaagacccatacatgcaatgcttggttctggaagcttgctcaggaattcagatgcagtgggagacaaaaaggaatggaatcctgctgaataactgggcaggaagtgatcccagaatatgctagcttccctccctctgagtctaaagatctagtaaggagcccacccttggatcttggagagagctcccttttaatatcgggacacaaaccgacattttgagtaaacctcatagtcgaataccacggagtactgtttgtgacaaacaggaagtcattaattctttattatatttttgctctaccgaaagctgttgaccaaaccacctggcttctccgagaaaacccttatctgctacatccaggaccaagcagctggatggtttattgaaaatgccaaagggatcaatcataaaacgtgccacttatgtagcctaaacattttgtttaactttaaacattaatttgctgatattttattgtagagtcaaggcctttgctttgagtgcaaggacctgattggagttcctagaagtctttcttacattaaatcacagccaaaattcattggcttctgattttcagcttcagattcttacattaaagtagaatgaaaacctaaaggcattgggaaccaatctctgggcagaatccctttatatcacctaccccactccccttaaacctttaaatttgcccgtacttacttttgcaactattttctcaagtgactcatttttgttaagactctccaaagtaatcaacctggttttcaaagaaaggaaaaaactctctcgtttggcactcctattttattagtttatgtaatatcgaattaagtttcataattctagtaacaagtacaactggcataaacaggtttgggaacaaacaccactgactcttcttaagtacactacttgggggagaagcagtacatacatatattgcaaaagagcctacaacccaagttctggacaatgatcagtatggtttagaaaaagaatggaggatatggggtaaatgggtggggtcctttaggtaaacattggtaagagagcatctgctatattttgagccatcatcatccatttaataattttaacatgatggctggcttgttagtgtttttcatatgcttctttctgttcaaataccaaatttgtcaagagcagaaatcgttttattcattgttataccccaatgttcattggaatgattggcatattataggtgttacacaaatatttgtttaaaaatgaggattcatatgcattttattaaggtctgtcaacattaaaattatagatttcaaggtatttaaattaacattgatgtactgcaaactctggtaaactatgctaaaatagggtaaattacgtaaattattgttctttaataataatacttttatcacagaataacaatttcagagcttgaagttgctttagaagtaatttgattgctgccaggcatacagacacagaaacaattgaaagagcagtttggatgttctttcattagctttttttttgccttgagctttttttcttctgctgctataaaatacttttctttctctggtgaaaagtacttccttctcatcaggtttttgaagttctggaaagattggggttgaaggctttgtttccctgaaactcattattgccctgagaattaaaaggcaatggcagctttgtgtttccatcctcaccatgtgtattagggttaaatgagtacctaccacaatatcatgcaactagcatgtgccagtctctaagcctttgaattcctgtcacatgtccatcaccatggggctctcaggggagtattggacagctgctcactcagcaagcattcacagagtcctgttcagatgagccaagtactgtgctaagtcttgaagcaaaaaataaacaagactctgttctcaaataaccacagtcatttctgaaaggcagataaacaactataataaaagtacaagatcctgtaggaaaaagagtatctgtctgaggaaaaaagcggggaggtggtatttcaaagagggattccctagggaggcagttactttaaatctgagagtcttcaagcatgagcaggaagataggggtcagggtgtccaggtgtctgggagaggatggtccaggccctggatacaaatgtgtaaaagcaggagccgtggcagaggctgctgtgtgggtatgttgagttgggaatggcctcaatgtgggggagtggggagagctgaggccagattgtaaagtaccaggaaataacttggtcattaccctgttggtcacagagaatcaggaagggattttaagcaggcacatggcagctggagggaaatgacagtctccccaaggggataaaagaaacccactgagagaatcgtttgtgtctaactataaaattccagataaaagtttagaagttctgataaaggtaaaaccttgtggcttatatgaagtttccagtggtgacttagatttgaggagtgttgagaagggtggaagggattaggataacccatgaaagagaggtaggagtgagcaaggtttgttggggcaattctgaagaaactgacctggccatagcagagagtaggtatgggagagagtaggaaatacgatttggtcagggaactgaaagccagatgggagtaatgaattttagttgattacaaatggacacatataaatgaatcttacaaaaatgtttttttgtaagtccattgtttcatcccttttgagaaggaagggaagtattagctttctgggatggaaagatattggggtgatctttggcatgactacagaggggttgaggattggaacagaaccaacttccatgtctatttatttactcgattattaattttatttatttatttttctttttttcttttttcttttttttttgagaaggagtctcactctgtagcccaggctggagtgcagtggtgcgatctcggctcactgcaagctctgcctcctgggttcacgccattctctcgcctcagcctccggagtagctgggactacaggcgcccaccaccatgcccggctaattttttgtatttttagtagagatggggtttcaccatgatagcctgaccttgtgatccgcccgccttggcctcccaaagtgctgggattacaggcatgatggattattaattttaaaagtgggatttgttgttgttgttgttttgtttttgtttttttgagacagtctagttctgtcacccaggctgaagtgcagtggtgtgatctcagctcactgcaacctcagcctcttgggtccaagcgattctcctgtctcagcctccaaagtaactgggattacaggtatgcaccaccatgcctggctaattttttgtatttttagtagatacagatttcactatgttggccaggctggtcttgagctactgacttcaggtgatctgcctgcctcagcctcccaaagtgctgggattaaaggtgtgagccactgtgcccagccatttttttttccttaaatatttgcaagaatttaccagtgaagccagttgggtctggagttttctttgtagaaatgtttaagttatgaagtgtatttctttagcagaggaatattcagactttctctttgtttcaattttggtaaattgtggctttcaagggctttgtccattttatctaagttatttgttggcacaaagttgttcataatattttgtattatctgtttaatcctgttatctatagtatctgtagtgatgttcccttgttcgtttctttttttttttttgagacggagtctcgctctgttacccaggctggagtgcagtggcacgatctcggcttactgcaagcttcacctcccgggctcacgccattcttctgcctcagtctctcgagtagctgggactacaggtgcccacaaccacgcctggctaattttttgtatttttagtagagacggggtttcaccgtgttagccagggtggtctcgatctcctgacctcgtgatctgcccgcctcggcctcccaaagtgctgggattataggtgtgagccaccgtgcccggcctcccttgttcatttctagtgatgtaggtaattggtattctcattatttttcttgatcaatatttctaaaatttattttaatagcttgatacttacatgtaataattatatctgataggtaagttgaccacttaatgaaaaaggagtacattttctagtaatcaaaaatagaatttaagtatctaaaagtaagaattgcttacttggttagaaaaaaataaaatctgccaaaagaaaaagtatttaaacctgatctttggaattttactcttaatggctgtatataattcagtatatttgaacttggtataacaaggtctattataaacaatcttgagttagagtagatcttgagttgagcttagtatttgcttgggtatttatttgtttagtttttgtaggactgttaaattctattttcttctttggaccaactggagatagatactaaaataaaagaagtccttttttcttcctttctaagtatagttttagagcagggtttctcaacctcagcactattgacattttgggctgggtgattctttgttgggggagtatgagggctgtcctgcgcattatagagtgttttgcagcatctgtgttctctacatactacatgttgtaacagtcctctagttgtaacaaccaaaaatgtctccagacattgccagataacccagggagggaggaggggagcaccatattgattaccactacttaaagggtaagagggattgaaaaccttttgtttctcacaatatcataaaatctgagtagtagcattgttgagaacttggttgagcacatctgcagaatgggaggatttcttgtctaaaaggtttttctttccaaaaggaatgcttggttttttttagttgaaggaagtttttttttttttaatctttttcttacatcatcagagaatctggagatataatggggagctttgcagaccacctaagtcattcttccttggagtaaaatggtgcctaaaccatctcgataatgaggccaacctcctggggaaatagtgtgcctggctttccttggtaacttctaatgattagtgcaccttatctctgaaaggactgaatctgtgaagatccttttgcttactaaaatagttttcatcatcttttgttctcattaagtggaaagacatgaaggatctagtcacatccttagttaccttgatggcctttccaaatttagaattcatcttcttagctgtaatcaaatctaaccagattaagcccttaaggcaaccttcctgcacgttccgtccttagtcatgtcttcattacgtttgttcatgtgtttgagagatgcaggagttggaagagaaaggactgatttcccccttgtttagagatccgttttctatagccattgatctctgccattcctacatcccagcccccacaacctagactcctccctgcaaatggagactataagtcaatgttttctgagacatctgaccatacttgcaaaatagttccagcgcaaaaagaacaagaacattggaagcgagggtcagaaggagcctagaaaacctgctatattgtatgtgcattgggtcactgttttagatttagaaatgtttcacaatgtcttcccgaaaagaatgtttaaatggtggattttaagatgggtgcttaaattcaggcatctgttccttcacacaatgggcaaagaatggaaatgtaattagcaatgtaagtcaagctcttaagataatgtgatttgatgcagtactttatattttcctttttgttttctcatttggcatattctgacagtttccatggtaattaaaaagaatttgggaccttaaagggatgaatttccatcctatgaattcttaccattttgcaaagccactgtaccggtttactaaaaactgttttgagctctattatatgatgtcacaaatatttttagatgttttgtaagaggcacaaatatcgtaaactcattaaaaattgttattgaagtataatatgtgtacacgaaaagtgggcaaatcataagtgtacagcttaataagtttttataaatgtaaccagcagttatagattaataagcagaatattaccagccccttagaagccgcctcaggctgccttacagatatacctgatcaaggctaatcacccctaatttctgtcagcagagctttgcactttatataaatggaataatacagtatgagctcttgtgactggtgtggcttgcccaacatttgataacattattttgaaacaggaggatgttttctgtctggaaaagagatctgcttctaaatcattatggttaaaagcatttattaaatgctttcgtgtgtagaaccgtactaggaagtacacatatcattggttcctaccctctattttaagtggaaagcattgacacagcagctgtgagaaggactttgaaaatccttgatgaaagatgagatagatacatgaaaacatgtatacagctggagagattacaaaaataaagtgtccccattatccccttcagaaatggaaagtacattttgaggagttgtgaatgaagacaaagctgtaagtgttgcatacctattcaggatttgatcaacgtgaatgcttgctaacttcaggacttaaggatgtaatagatgttgaggcctgcctcctcccaattagtttcctgtagaaggtgaaattttaggaattgtttgaattagcagtagttagtgaatctttggctagtggatattccaaatggagtagaggtgtggacaaaggcccaaaggcctgggatgatttttggttctcatcctgaaaatggaactacataggaaattgtggtttgccagttgacttttcttctcgtttgtttggacttagacaataatactttgcctatgttccttcagtgaggaactttgtcatcttcttaaccagagtaaatgatgcagtcagcaaaatgaatgctttgtcaccacactgaactagctttaaatcgtatggtgttaccactgcttctcaagtggtggtatcaatttatactctcaccaggagtgaatgaacattccagcttctttgtatctttaccagcatttgctattgtcacattgtttattttttcaaatatctgataggtgtgaagtggtatttcattgtttttttttttatgttgaatttctctagagaggttgaaagttttgtgtaggttattggtcatttgggttttctcttccatttagatccttatttgtatttgtcttgatttgtagtagttctttatgccttctgtatactaatccttagttaaaatgtgttttcaatatcatcttcctctctatggcttatcttttaacttggttgaatacatcttttgttgtactaaatcttttttattgtaataaagtcctaattatcaatcttttcctttaattttttatgacttgtgctttttatctttgccttgttttaaaattgtttctatccccaaagtcatgaaaatgttcttctaatcctcagtattttctaaaagaaagtttttctaaaatcacgcttttcacttttcagcctttattccattgggattctattttttggtatagttttagatagaaagctatttttaaatttgtttatttcctatacagaaataccatgcacttaataattcactctttcctcccgataatatctatatctgtacttccttactatatgtgtgagtacatctatggacttcattctattccttgatctgttttggcatctctgtgctactattacactgtcttcattactatagatttagagtaagcctggctatttcttaggagaaattttccccttttgctcttatttaaaagtgacctattcttgatcctctgctttttttgtgtgttttttttttttgtttgtttgtttttttgagatggagtctcgctctgtgtcacccaggctggagtgcagtggcgcaatctgggctcactgcaagctccgcctcctgggttcacgccattgtcctgcttcagcctcccgagtagctgggactacaggcgcccgccactacgcccggctaattttttgtattttttttttagtagagacggggtttcaccgcgttagccaggatggtctcgatctcctgacctcgtgctctgcctgcctcggcctcccaaagtgcgatcctttgcttttggaatcagcgttttatgctccacaaacatacctgtcaggattttgagtggggttgcagtgaacttatagaataattttttttttttgagatggagtctcgctctgttgcccaggctggagtgcagtggtgcgatctcgggtcgctgcaaactccgcctcctgggttcacgccattctcctgcctcagcctcctgagtagctgggactacaggcgcccgccaccatgcctggctaatgtttttgtatttttagtagagatggggtttcaccatgttagccaggatggtctcgatctcctgacctcgtgatccacctgcctcggtctcccaaagtgctgggattagaggtgtgagccacggcgcctggccagaataatttcatgatagtcaatgtatttactatattaagtctttcatttgtgtatatggtatatctcttcatacatttagattttcctttgtaccccaagatgtttttgcatacctttaaaaattttatttcaaggtccctcatagtttttgtggcattttttaaaggtaaaatgtaaggtaatcccagtgctttgggaggccaaggcaggaggatcacttggggccaggagtttgagcaacatagcgagaccccatctctaccaaaaaaaaaaaaaaaaagccagacatggtggtgcctgcctgtagttccagctacttgggaaacagaggtgggaggattgcttgagctgaggattttgaggttacagtgaactatgaattgcactccagcctgggtgacagaatgacactctgtttctaaaaaataaaaaagtaaagcaattagggttaaatctaattccatgcaatgccatggttcccttccatagacctgtgacttctgaaagtccagctggatggacaaacttgttcagattagcatagaaactgtgaagggaagctgattctgagttatcacataccagcctggtcataagagctgtatatggtaactctgtgactatgtcccagaacctgctgagtagcaaacgtatgggatgcatcatgggctacatcctttgaatagaatttcatctcttcctggaagagaacagaatccatcatcactgagggaaaactcagtttctaagctgagttttagctgcttgcttgtgctatattttccaactagtagtattttcatgaaagatattgatttcattgtcatattgatgcagaatgagaagtcaaatcagttcttctactaattcaagaataaaatctgtttgccaatggaagacaaagctagtgggtaacataccacaattaattttgcttgcctgatattttctccaagagcagggagcccatgagtcctgggagtcacatgttgaatgttaaaacttccaaacagtgatagagttcacaatttagctaagaagggacctcatcaaagtccacaggagtcctgaagatgggatcctgtttttagatatttatgcagaatacaagaaaagaggaaatagagtttgagttagatattggaatatccttccgttgaaggtggttgtggccgggcatggaggctcattcctgatcccagcacttcgagaggccgaggtgggagggtcgcttgagcctagcagtttgagaccagcctaggaaacatgatgaggccctgtttctattaaactaaattttaaaaattagcctggccggtgatacgcacctttagtcccagttactcaggaggctgaggtgagaggattgcttgagcctagtagatcaaggctgcagtgagccatgattgcgccactgcactccagcctgggcgacagagtgagaccttgtctcaaaaaagaataaaaataaaaaataaaggatcgattttatccattcaccaaatacttattagactgagtgctaagcttgtaatagaaggatggttaagtcatgattttcacacccggtaagtgatttggtcccatgcaggtgaattaaggttatatgcagatgagtctgctgtgtagcaattgtactctgtgttggctagtgatgacgtgtaacagtttctgccctcaaggcactctgccttcattgaggatagtcaacaaggtaacacctgtcatgatcccatgtggaaaacgttacggataaaacaggtggaagacccacagtgccactcagtggaggtaaaatgcccgggaggagccttggagggtgaactaaagtgaaatgagatatttttacttaaaccaaccttcaccatatcataacataagaaaataaaaaagaaaataaaaatccttaatatgttaaaatgcagatttcttctataagaaaaatatgacttgatgtgcaccattacaaagaccaagtttacattcaagatgcaaattcttggttgaaagaaagaaaaaaggccagtttttattatcttagagcgatacagctaaagtaacccaggaaagatttaattggagctcttctgttcaaacattacttccatgtttggagatgttattcatgataatgaaatttccttggtcaattcaagattacctagtttccctaagacatttaatggaaaacttctcctggcagattttacatagctgctcaccctgcgaagaaggggccagcacttgggctgtagcaagagcttgatttattccggaaagcagtttgttcagctgtcaaatgagattatatgtgtggctgttagccatcacttcacagaaatattcttattcctcaacaaggcctcaaacttttgtttatttaagggcaacaaaaatcacaaatgtagattctcctaaaacatctctttggaaatgtgatttttcacagggtgctgccattccctgtctgctgatgatggctacaaccaaactggactgccagacattttctacatgtcacctgctgtccctgggcagcagtatcccccactagccagcacacttaggtatgcttaggttttttttttttttctgagacggagtttcactcttgttgtccaagctggagtgcaatggcgtgatctcagcttattgcaacctctgcgtcctgggttcaagctattctcctgcctcagcctcccaagtagctaagattacaggtgcgtaccaccacaccaggctaatttcttgtatttttagtagaaatgggtttcactgtgttagccaggctggtctcaaactcctgacctcaggtgctttgcccgcctcgacctcccaaagtgctgggattacaggcgtgagccaccgcacccggccaggtacacttaggtttgtgtaatcctgaaaggcctcaggcataaaaatccctttttaaaattaacttcttttgtcatatgtttctgtcttgggggtggtctctcaatgtagaaactctagaatttaaaattgaagtctaaatttggatgtgaaagtgaagtttattttttatcttattttagcatttagggatttgagtaaaagtggtggtatttctactctgtgattcaattgcagtttcctcagcccaacatgacaagtgacatagcattaaaaagaaaaactcatatgtgaagtagctgtgacgtagagtgggctgttgattcaaaaggtcgacctggttggaggcttgaaggcgttgggctttccgcctggcagtctctccctcgtgtacctacaggtaatgtttggaaagtcaaggactggggagaaattgagacttcagattccttaagaagcaaaggcgaggttctttttgtctcaagaagagtttgtcagttagactcatggttctcaactagggtagattctgtccccctcaagggacagttggcaatgtctggagaccttgttggttgttacagattcgggggatggggaggtgctcctggcatctagtgggtggaggccagggttgctgctaaccgtcctatagtgcacaggacagcctctcctcaacaaagagttatcaggccccaaatgtcaagagtgctgaggttaagaaacaataaggcagactgagttttgaagtgaggtagaaagcgggactctactccagagacaggctcagatgctggaccaaattgaggactaggtaaaacagggccagggtggaagcagctttctgtaagacatgcccactagtgtgccatgtcagcttaccattgccatggcaacacctgggcattacctcccctttacatggcaatgacctgatgacctaaaaggtactaccccttccctagaaatttctgcatgtaataccccttaacctccatattattaaaagtgggtataggccgggcacggtggctcacgcctgtagtcccagcactttgggaggccgaggcaggtggatcacgaggtcaggagtttgagaccagcgtgaccaacatggcgaaaccccgtctctactaaaaatacaaaaactagctgggcatggtggcacacgcctgtaatcccagctacttaggaggctgaggcaggagaattgctgcttgaactcgcgaggcggaggttgcagtgagctgagattgcgccacggcactccagcctgggtgacagagtaagactctgtctaaaaaaaaaaaaagggggggggttataaatgtggttgcaaaactgctctgagctgctactctctggccatggggtagccttgctctacaggagcagtcacagagctgtaacatctcctcttcaataaagctgttttttcctctacctctggctagcccttgaaatcttccctgggcaaagccaagaacccctgtgggctaagccccactcttctactaaagtagtgtaagaccatcattgcaaacctttaaaacatataacctgtaggaaggtttgggatttgggctggaatagggcaaaaaattctagacagcaaataaagagacccaggtatagataggagttgcccagttcaggaggtactttctgaagggcatctttcaggacaaatcttttcctgatgcagacagacgtagtactggttttcattcattactattgctgatgtgggcctacttgtgtaagtcagttgatattcattaaactcttacaaggcattctttatgataatgaaacataaatgatgatagcatatatgatataaaactgaattgtaattagctttggaaaatagtacttggaagtttctatttaagcctctttctagcaaactctcaaatattcatgtaacaaaagaagacagcataaaacattgaagtgaactgtttttttcatttacccattaatttcttttttttttttttgaggcggaatctcactctatcgcccaggctggagtatagtggcgcgatctcggctcactgcaagctctgcctccggggttcacaccattctcctgcctcagcctcccgagtagctgggactgcaggcgcccgccaccacacccggctaattttttgtatttttagtagagacggagtttcaccgtgttagccaggatggtctctatctcctgaccttgtgatctgccctcctcagcctcccaaagtgctgggattacaggcgtgagccactgcacccggccttacccattaatttcaagcaataggtttaatctttttattttcttctaagagctgctaatgaatagtacaatggctggtttacgtatcgtgtttccctggctttcccaatccttggtgaagatgttaggttcagattatgaaatagacaatatttgaccctttgtggtatacaaatatagcattttcctgtggttctaatagaagaaggtagtgatctaaatacaaccccaccacccctaccagggccgtttccagcctgatactgaagtaggacaaataaattgcctatttttctttctttttttttctttctttctttcttttttttttttttttttttttgagacagagtcttactctgttgcctaggctggagtgcagtggcccagtcttggctcactgcaacctccgcctcctgagttcaagtgattctcctgcctcagcctcccgagtagctagctgggattataggtgcgtgccaccacgcctggctagttttgtatttttagtagagatggggtttcaccatgttggccgggctggtctcgaactcctgaactcaagtggtccacctgcctaggcctcccaaagtgctgggattacaggcttgagcacctgcgcctggcctctttttcttctgaaactttgcagatgtagctatagtctcattctgaccagtcttcaaaggactctggctttagacctggggtttctctccaaaatacttaagagccagaggatgctgtccttcaacagctcctttggagaagcaaagactcatcccccagtttctctcctctgtaagtattgatttctgtgtgttctcttttctgcaggcgtatggtattcctgtttgggtaattgttaaggatgacatgggagaaattctcggttatgttcagtctgtcatttaatttatatttcataaatgcttctcagtaactaaatataggtgtataaaattgattgtaatagatatttgcaggaaagttttcacccatatatttagttgaagtcagtaaaaatgtcattttcagataattattcaatgtcaggtgcttatgtttatacagtttacttattcctaaatatatttggatctctatcttactataaattttcagttggtgcatctttaacatctttgtgagaaaaattcaatataatctcacatactacaggttgtttgaaagtcttattttttcattgtttatgtaaaactgttaaacattcatgaacattatttaaaataaagatgttggtctttgaggatgaaattaagaatgtagaaatgcataccttggtttcccagaattgagttcatcctaatatgaaacagcaagaaatcagaaccctgtttattatagtattatctttgtatttgaaagcaggtgtgtgttcttgaaaatattaaacagaagtcatagagctacatattggccagtcaggaaactctcttcttcttaccttccatcccacctccagactgtttgcctaatcccgctttgtgatgtctgttgtgctggtataacgatatttgaactctctgatgaaaactttggccgcaattgacccttccctaaagttgaagagatttctccaaataaggaaatgaagggagttaagagggtaagtcatacagtttggatgtgtatccccgcccaaatctcatatggaaatgtaatccccagcattggcaatgctgcctggtggaaggattgtgggagtggatttgtcatgaatggtttagcaccatctgccttggtactgtcctcctgatagttctcatgagctctgatcttttaaaagtgtttggcacctccctgctctctctcttggtcttgctctggccatgttaggtgcctgcttcccctttgtcttctgccgtgattgtaagtttcccgaggcctccccagaagccaagcagatgccagcatcatgctttctgtacagcctgcagaaccatgagccagttaaactttttaaaataaattacccaatctcgggtgttttctttacagcagtgtgagaatgggctaatacaataagtgagaaagaaaggaaaatttgcccaactatatatcatctttcccaggtaattgggagttttctgtgctttcattcccatgaggaaatgtctctatacatgctacagaaaagatctactcttttgtgattgtcatagtcagctacagtgatgcctctggaaaaataagactgccacagctgaagcccaagctcttaatgaccaaggtagttatttgctgtgatgttgctgcttttgttgataccatcaaaggcattatttgaggcatagcttgctttcctagccagcttcccaactgtcgttgtgcacgttcattgcccaagtgcaattgcaagtgcaggggctacagtgatgaataagacagtccttgtccttgaggaagagcccacagtctggtgggcggaaaaattataagggttataagcaaaacaatagcaatttttattgtgttcaaaaacgcactttcttctggtgacaggatagtcctaatactggtctacatttctaccacatatgaatatgtaacatgcatttctcttttcttttacatagtagctggctatcttaatgactgtattaacaattttcagattttagttatatctaaatgtcgctacttttgcaagtgaacatcctgctgaaacgtattcagttgggaagaatctggcctttttgaaagggcattttctgaatgtagcaaattaccactgatagtttaatgcaattaggaaaatggaagtgaatggcaacgaaactgattaaaaccatgagttgtgtcacagaataaaccataaatgatatgagtaactataatgccataataagacactgtcattacttggtacttccttcttcagaagcctggtaacagcatcacaggagcctgaaaatggattaagtcattgtttgaatgtggacatattctagtctcacatattttagtctcagatacgatgcttcatttaattatgtctataaatttattacctacagacattatctttagggtcaaggagacaaggtatatgttattgttcccatggtaactttgtacttaaaatggcaggctgcgcttacttgatttaaaaatatctacagtttgattgctgtaaaaacctgtgttcataatttgctcacgtccagtgactcactcctcatttaactggcatttcagcaaatggcttgatcacataaattgtttggagaactaacagaaggttattgctctagggcactaaagatattttagatttctatcatttaagattttgagttttaaaaaatagtttacatgtgtttttgccaagttaagagtgaaacaaccttagtggaatgtttcttttctttttgagacaggatctcaccctgttgcccaggctggagtgcagtagcagtgattatggctcattgcaacctcggcctcctgggctcaagcgattcccccacctcagcctcccaagtagctggaaccacagttgtgcaccaccacatctggctaatttttgtgttttttgtagagatggggttttgccatgttgtccaggctgatctcgaactcctgagctcaagctgtctgcctgcctcagcctcctaaagtgctgggattacaggcatgagccactggacctggcctcatgtttgttgataattcatgggcacagtgatgaattgtactttggtgtgatatggggcatattaagctagcagaagttataaggcagatgtgcctactggcttttcacttgaatttataacagtggacttgaaagtttcgatctatttgtatctctcctctgctgtcacagaagtcccattttagccaacctgctgccttattttttaagatggagcctccttacacacacacacacacacacacacacacacacacacacacattaataaactaatacatgttcttttcaaacaaacttaaacagtgcagacatgctgcattagtttccatccaatagcttggcgtgggtgcctgggaacagctctacctcaggaggaaggtgctgggctttgtggctgcccttaaccactgagagtctttatacgtgactattttgcagatgactggggtttccaacgcacttcaaatttgagacaagcagggaataacaatttatgtagatatatctgagcctgaattgcattgtgtatccccattggtgactccaaagtctcctactttggagacgtgagcaatgacaattctgtgttggttttttctttctgtttagatatccattccaaaaacttggggacagtgtaggaagagaactgcttccactgtgagcttctcttttatccatctctgcctttatggcactctttcattggcagagtgtgtgtgtatttctgtgttggcatctttttttgatggctcagacaacctcccttggtctctgagaaaataaaattatagctctagcctcatgaggcaggcccagagactgctgcctcaggcgcccttcctgctgtatacctcctgaggttggatagagcagctgaaaatccggccgagcctttcagagcctcttaggggatatttaagtggcagatgcacttaattattagatatgttccaaatgcaggagaatgagctttgagagagttttgaatttgggacaaaaggatgcttcttatgaatcaacttgattttcacagaaatcagaatgtgtatatcagtcaagaaatgaagggatatatacacacacatatacgtaatacatatatacatgtacatacatacctattataaaatggcagatatgcaggcagacatgcatatacaagtatgtggtgtgtatataacaaccattgtacacatatatacatattatatgcacatatacatgatacatatatacgcgcaaaaaaatttactgagtccttactatgtgtaagtcctgtttcacctgaatcaactaatgtaatcctcattgtatcacagatgtgacaaccgaggtcacatggctagggagtggcaaggccagtatttaagcccaagaattctggctccagctgtgtttctcacctcctcctgatggagggggtgcagtcagtgtcatttaaaggcatgattgatttggtttgttgggtgttggtgttcataaccacaaagggacctgctgagagagagagagaatggagaatgccatttttcctacctgttttcatcagccagtacaggagagagaataggggaacttgtggctcattttaaaatggtaccaatgatggcacaggcacaccttttttttttttttttttttttacacattttttagagacggggtatggctctgttggccaggctggagtacagtggtacagtcacagctctctgcagcctcagatcctgagctcaagtgatcctgccacttcagcctcccaagtagctggaactacaggggcacaccaccacgcccagctaatttttgtatttctggtagagatggggtcccactatgttgcccaggctggtcttgaactcctgggcttaactgatcctcctgtcttggcctcccaaagtgctgggattaccggaatgagccaccgtgcccagctgtggcacacttttgttggtgggttagatctggggaaagtagtcacaatcaattgggccagatctgatgagtaaggtggatgacaccccagaggtctgtcattttaggattcagtaaaaataatgtaaattgttgatcctctctggaggcacttccaaaggaagagtgggagcatctttggctgccaggtggcttgaaagaacagtttgctgtatggatgcttttgtaattattaataaaacacacctaatttcattacttcattatactctgttagctacaatatagatttgtttgctctaatagaaccccccaaaatgttattcagcatgccagaagtttccatacctctgatgtggaagtccaagctggcacagggacactcctccccaaaggggtcagagacctaggctctgtcttattctatcatactcaacacgtggcttccatttcatgatctaagacagctgctgcagttcctgcaatcaccttcacatccctgctcataggaagaagaaaagggagttcaggcccttctctttaaaggccattctgtggacgttgcatctgtcacttttcacatcccagtagccggaacttggtcatagaatcacacctagcttcaaaagactctggaaaatgtaatctttagctgggcagccagctaaaaatattattaccatagaagatgggggagtagatattggaaaacagtgaagagcatctgccatacttatgtataaaaaaagtaaaactagtaaaaacatatcacatgaaccttcagattttttaaaaatctcagatgttagaataatttgatttttctttcagaataatgatacactggcaattaatgttccacattaacattgcaaatgtaaaactttgaaagacccatgtagcttatggtataactattaagaaatccatgatgaggcagggtacagtggctcacatctgtgatttcagcactttgggaggccgaagtgggcagatctcttgagcccaggagttcgggaccagcctgggcaacatggcgaaaccccatctctataaaaaataaaaaaattagccaggcatgttggcacatgcctgtggtcccagctactcgggaggctgagatgggaggattgcttgagcctgggaggttgaggctgtggagagccgtgttcatgccactgcactccaacctgggcaacagaatgagaccctgtctcgaaaaattcatgatggagaaaagggagagtttttcacatagttgagagtatgaaagcatgttgagtataaattttgttattttgtgaaatgctccaaaattaagaccgaacaagacagaacaagaagatacccaactgtttatggttagcatttgaagttggttcaccctctgcttttgattcatgttttgaccagtgtaaattgagaaaggatatatttcataatatgagattatgctagtttgaagttacattgaacactgaggcctaaccctacctcaaggtcaggtgcagtgtagtgatctaaaaagaatggaggctgggcatggtggcttacgcctgcagtcccagcactttgggaggctgaggtgggcagattgcttgagcccaggagttcgaccagcctgggcaagatggtgacatcctgcctctacaaaaaaaaaaatacgaaaattagccaggcatggtggtgcatgcctgtggtcccagctgctcaggaggctaaagtgggaggatcacttgagcccaggaggtcgaggctgcagtgaaccaaggttgtgacactgcactgcagcctgggcaacaaagtgagatcctgtctcagatagatagatagacagacagacagacagggaagactgggacgtgctataattgtcttgaactgtttattcaaggtaatatctaatatcttcctatgttctaattataagcatatggctctcagctacacaaacttttgattacaaatatttaatacttttcatctaaataaaaggtaactaaagtatatgctgtattttcctcacactgacataagatggattcagtgattttgcagatgtcaagtggagttttcttcaggccaagatacggaaacaaaataaacaaactggaaatttgtaattttcttcctatagtaaccatatggggagtcatttttaaatagccaagattgtatcaagtgcagaaggcgatgattatcctagtggcacttgtaaaatgaagtgacagtttcttacaatgttccaaccttccactgaggaaaagtaggaattcctgccctccctaagctaagtgccccaactatttctttcattgcctgagcagttctctcttttgccttcacattattggctctctatttagattaacattttaattttttttttcaaatttgaaaaaatactgacctttttccagttgtatctatcaaaaggattgcttcaaaagcatcttgttccctagtcttttaccaaattattctaggcacaaacctcatattaacatcaaaatcataaagaacaaaagtaatggaggaggtcagatgatttggggtgttaaagcaagtttctgcagttgggttttagatgctattaaagcattctgtgtatgaagtgctttaaacagtaacaacaatttcatcttttattggttcagcatctcttggctgtctgaactatagagattttgcagcagtggaatatacatccgtagagaaactacacaaaaattgtactttctttagcagtgtttttggaattgaattttagaaatagaagttaatattttggattttattcttggattcactatagattaagcctattcactatagatttggtaagtttgttcacctttgtcttggcctcagttttctgttctatgaaaagaaaatagtggtaggacaaaggaaataacgccctatgtggttggagcctggggaagggcgtctggtggtaataatgtcttaaatgtcacaaatttgtgacagtatttcaggtcagccaggagattggttattggtgagtggagttcacatttgccttaccttgaaatgttttccaacactttggtagcaaactacatcctcagtgtgaagggaaatgtgtaacagtttttctttgggaaatatttttattgacttagctccattttgtgagtcacatattccagcttatagcagagcctgctgcagttagtttgccaggcaaatacccaataagatcacagagctcaagcttgtattatgtaaacctcttggtgtgttattttatttcaggagggcttgagacagactgatgagctgttacatgatcgtggaaacagagcctagttttagaagtaaatttagtttgaaaagtaattgtaaaggccaaaattgatagacctttcatggtctgtgtagctgcctttccaatatgatggtcactagctgtttaaattgaaattagttacaattaagttaaactcagttctttaaccgcagtaactacatttaaaatcttcagtggtggcatgtggcttgagactactatgttggacgacaaaatacagtatatttccatcatcaccaaaatttccttgctggacagcatttgtctgtagccacctaagaaagaattatggtatagcaaggaggaggtttgagatggaagttaagagatgactctattctaatttgggcccttaaaagttctgtgaccatatatctgaaccactctaggcctcagtgcacacatcagtactgcagtgacttctgtatacttttgtatatttatattgcaatgctaacatgaagatcggatatactagtatcattttatggtttagagagtggactttggagtcagactgccagatttaaaataccagttacttctaaattaatgtctgggccttgattttctgatctgaaaaactggagcaataaaatacctcctttgcatgattgagtgttaaatagtttcatacatgtgaagtgcatagaacaattcctggcccatggaaaatagtgttttaactattatgtatatcatccattgaagagtataaggtgctatcaaaagcttttgttacaaatgctgttttcagtttgccgttactttctgggtctttgaacctccttgtaacatgttatataggaatgtaaatgtgccacatggtagcttcttaatgcttagttgtcctgcataaattaatcccctttagaaagtaaattacttacaatttagaatggcatactcatggtctgttctttaatccacctgtataattggttcttctccaaagatattaacaagcttgacgtcgatgctgagaaattctagagcagaagagcagactctcccttcactgttatttgtgttcctctctctccaattccttagattgtaggacgaagtaaatcacaagggccagtgtcttgtttagaaaggttttgtcataccgcacaggcggcctgcatccgttttcagtggggtggtttaacttgatgaggctaatgccaagatacagtactcagagtccaccgtgtttgacatagtcatcaacggtcttccttttggacttctttttggatgaggggaaatgtgcattcgcccagtggctctcaccctgactgtacagtggagtcacctagagagctttaaaaatgccgatgcctggccccactcacagaggttctgatgtaattgtgcagggtgctgactgggcttggggatttttaaaagcttcccaaatgattctgatgtgcagccagggttgagaagtgctaggatggcctgcactgagtgatatggaaaggatactttttgaaatatggcccaaacattgccggttaagggggagccacaccaccctccagggtggaggtagctggtggcttttctccgggtcttgtccagttccacagttttatcagtaataggaatcagtgcaaagtatactgatcagacccatggataacgcggttcacctgaaaggggagactagctgttaggttacaggtgccaaaggccttattgacgggtaggagggaaagatgagtgaatctaaggggaaggcaaaccttttagttactttaaataaaaccaactgagcaggtataggatacagaaagcttagctcaacagctgcatggaagttttggttgactgacagctgcagtagttaagagtgtatacttagaaaccagtcctgtgtttgaatctggctttactgtttcctcctgggggatctggagcatgttccttaacctttctgagcttcggcctcctcttctatttagtgggaataagaaaaggcacccacttaatttcattattatgataattaaatgagatgatttatgaaaactgtgactataatacctggcccatagtcagtaccatgattataaataataagggcatgattagcatcatgttgatcttcgtcatcatccttgtaataagcctgtctgaagagcctgtggcatcagcaacgacataaattgaaatatctggcatggagcatcttcattgttcaaatataccatactaatgtaagatattaacaatatggctgagcacggtggctcacacctgtaatcccagcactttgggaggcctaggtgggcaggcggattacttgaggacaggagtttgagaccagccttgccaacatggtgaagccctctctctactaaaaatacaaaaattagctgggtatggtggtgcacacctgtaatcccagctactcaggaggcagaggcacaagaatcacttgaacctgggagatggaggttgtagtgagttaagatcatgccactgcactccagcctgggcaacagagtgagactgtctccaaaaaaaaaaaaaaaaaaaaaaggatatgaacaatagggcagattagatgtgaggtatgttatgaacaatagggcagactgggtgtgaggtatgtgggaaccctctgtaccatctttgcaataattctgtaaatctaaaaatgctttaaaggttaaaaatgttattgccaatgtagtacttggcttaagtgggaatataatatttttttgttcattttccaacaaatatttgtgtgctagctttgtgttcagtaaatctgaagtttagccctcacatgaagaacgaaaatgtttttgtgttaagtatttctgaggcagacgtttctaagatatgtatctccatatgcatgctgaaccaaatttgatccatttaaaatttctttattttgaaataattttggatacagaaaagttataaaaatagtacaaagtttctgttaaaccgttcaccaagcttcccctaaccttaacaacttacataatcttagtacaactgtcaaaactgggaaattgacactgataaaatgccagtaactatagcatttacttggatttccccagtttttctctttgctgtggcaggatccaattcaggatctcacatggcattgagttgtcccatctccttagtttcctccaacttgtgatagttcctaagtttttccttgtctttcgactttgactcttgaagagtacgagtcaggtattttgtagcatgtccctcaatttggatttgtctgacattttctcatgagtacattaaggttgtacatttgaggcaaaaatgccacagatgggatgttgtaccctttgcagtgtgtcatataagggggcacatgatgccaatatatctcactgctggtgatattaatcctgatcatttggttaaggggggcatctgcaggttttgatcaattttttttaagacaatgttttcagaatagtttcaggttcacagcaaaattaaaagcaaggtacagagatttcctatatactcactgccctcacacatgcattgcctcccccaagttttaatgtattttttataagtatctttgataatagataccactcatgtgccatatcacaatataagagtgagatgggaggaattatgccaacacattaagtggtttcaaatagctgtgcttttgactttttacatgtaatttccataattttctctctttaatctcatttgtgctctcagtaatgacttctccctattttcagagttgtgccaccagtagcaattgataaagcggagaagctgttataattgtgtgtaaagtaaaagtgaataggctataaatcaagacttgagagagtcctctggaaataaaatacattaataggtgttatttgaagcatttttttctgccaattttaagaacgaagtgcaatcttcaatagtccattttaacattaaacaaacctggatttgaatctataagtttgtttttgtttttttagagacagagtttcgctcttgttgcccaggctggagtacaatggtgtgatctcggctcactgcaacctccgcctcccgggttcaagtgattctcctgcctcactgggattacaggcatgcaccactacacttggctaattttgtatttttagtagagacggggtttcaccatgttggtcaggctggtctcgaactcctgacctcaagtgatccacccacctcggcctcccaaagtgctgggattacaggcgtgagccactgtgcccagccgaatttaactataactttaaatggttaagagtaatttgtaaagtcagacgaacctgggtttaaatcctggtattacccctcactagcaaattatttagcttttccaagccacagtctctacaaccaaaaaaccatctcttgggttgtcataaagagtaaatgaaaagatgtagggaatgtgctaggcactgtgtcagtacatgggaagtacccaatcaatgtcagttgctgtctttgatattatcccccatagggcttttgtggtcgcttaagagttgacagagcacaaaaggataaataattagctttacaccctaattaatctgtaattgtgctgtaggactaccaggagacacagaaacagaaaaagcatagagactattttgtatatttattccatcatatttatgtgtagttgagatcattctaaagttagtggtcttgcttttatgaccatcattcctgaatcaatctggagatgaccggagaacacaagagcattttgccccataactaccacataatttactagtaaaagagggatctgttgagattagcttatgaaaattgtcctttggagtcaagtttgggaatatctgatcattaaaaagagtttatgaacttgggtgatttttccttcccaataattctttgaagtactagatatttctaatgaatttgagcctaaaatatgaagatcatataggctagacatttcttttaaaacccataaaaatcctatatttgctctatgtctagaaaggtaaggtctagttaggttgtggtttgaaagatatgagttacaacatgagtgatatagagtacatccattgagtttaaaatttcatctaatcacaattatttcaaactgataatcttttaacagcctagctctatgggtagccgttaaagaaaaaatgtatcaaatctccaatacttagtgaccagtagagtcaaattcagctatcctccccacccccttcccccaatagggacatggtgtcctagaaacagccagacctatactggattccattttagtgctgagcctccaaaatgggtctttagaattaaatttggctattagcccagacttactcaaatttgtaacaagcagtgctttgtatttcagcatgctccctagcccccaactttgtaactggttaggggaggggaagtgggaggaggtgcatgaacaaaaaacaaaagcagctgctggagagaaaacccagtgaaagggggtgaagaaaaacaattcggccacaacagctgttcagattctcaaaagaagaagccttcactttacatttgatctctctaaagtttttgaaggtttcgagatgttctttatttggggagaaatgaaatgaagtctatgaagctggtggattaatgtataaatgaaattgatttaggagaccagtgactcttgaattaacacagcccttgcctctttttacaattctgaactattgtttaatattcagcatcaagatggattcagagggtttttttttttaatcccattgtgtcacgaatggaggatataactggctcagaccaaatcttctcacatccaagatcaaataggggtttttaagcttatggcagtagaataacaagtacatgtggtacaaggctaggaaactgggaaggcaggcagcagtagaaccttgatctatcttgtgggaagctcttatgatagctaattacacatattgctggtctaaaaaatcagaattacccaggcaacatggaagaggcagaatggttggctggactagaaaactccttcttggaggcggtcatcttcatgttgtactagaaaactccttcttggaggcggtcatcttcatgttgtacagatggcctacgtatgtgcaatatttacatcattgcgtttcttagcaccacgggcgagtttggcattttacaaggtagctcactctgaaaggtaattttatcatagtatttaggaaatattccacgtcagccactgagtttaagaaactgtgtgaagaactaaaattcttcatagagccacatttgagtatggaatgatttggtatgctggaggccatagcacatctttgaacatcaaataattggattttttgagcatcaaataattgaatttttcttttcttttcttttcttttttttttttttttgagacagggcctcactctgctgcccagtctgaagtgcagtagcatgatcacagctcacggcagtcttgacctcctgggctcaaacgatcctcttaccttagtctctcgagtagctgggactacaggcgtgcaccaccatgcctggctaattttttaattgtagagatgaggtctcgccatgttgcccaggctggtctcaaactcctgggctcaagcaatcctcctgccttggcctctcaaagtactgagattataggtgcgagccaccacatctggcgtgatttttcttgaaggcagatgtgggcctgaactggaggaagcctgctctgagcctcactctatcttgatcccagaaataaatttattgtatagccttaagttttagagagttcaggacacctagaggatggttgtggtgtaaactgcttgcctggtcaaaccttaaggatctgcttggactcttcaggacacataccccgagagtgtcaggcctgagccccagctggtcccagaggtttaattcctagcacacctagtttgtctaacgtaggggtctgcaaactgtgtctgcaaagagccagatagtgaatatctgttgcaagtaaacggtgttgtcgtagtacaaaagcagcactagatgatacggaagtgaatgggtgtggggctctgtgtcgatataatttgatttgtgctatagtttgctaacccctgatctggagagagggctcccaaacaagtgagtccacatgcctccaacaggactgtgggggatagaactcaggagggattgggataggaaaaaaaatctatctgtattgtcactaacctctaactgaaacagcgtttgttctcttacgaatacaggcagcaaaccagtgacttagcaatacttgtgactttggtcattaatagaaatcaaaggtaatttcatatcccattacagttattgcaggtatctcaaaatatcattaaactcatcactactttggaagtgtatgttatacctccactagcattaacagaacatatgtattctacatttatataaaattaaatgattacatatatttattatatattatgtatttcaaacttgttttttattttgatgtatttcaatttagttttctttctaatgctatgtatattttttcgtgcatttaagaacattgttctgtaaaggagatctggagggttcagctgactgcccagggagtctaagaagccctgtctaactggtgtcttcataatggggagaacctccccttcctcaaatgatcctatccctctcctcccagccactgaggggcagtcatctctagctctacggagatgcccccaccccattttcccatatcatattccacccagccttcaaagccctgcatgagtccacctagtcctttgttcctctggctccaccaccctggctgccagacacaggcattcacccccggcccgtctcatggggtgttctatttgtttagtttatgtttcagccctagtgagagtcagttctggaatccaatggatctgtgattccttgttggaaggaaccacttctcttgcgctgagtaacgcattggtgttggatgacggtgttcatgatgacgaacttatgctgtcctgaccatgcctggagactggccctgcattggagaagatccaagagtctgcgtggtaaaatgataatgaacgtgagcttaggggcagaatgctgatgtgtttattctgctaactatgtgctttgggcaagtgcctatacttattctccctgagcttcaatttcctcattggtaaattggggattatacttacctttcaggatgacatcaagagtaaataatatactgactctaagaaaagtgcctggagtggtgcctggtgcatggcaaatgctcagtacctgtgaggtagtatttgcctgggctggttgatggttgggcgctgggggttagcctggtataaatcgagattttgaggtggtcctgtgaacccaaagatgccttgagaccctgcgtgggagacagatggaaggagatgtctaagcctggtgtcaaggtgctctcaccttgcagaatcacagtgggctgtggtggaccaggagaagaccccttaacaaagtatgggagtgagtctgtctaagtcagctagcccttaatgaggtcctcctcgagtgaagctctgattctgacacccatgttaggttgtggtcatttctaggacccagggtccagccccagagattcctagatagttctaggaccatctggtggaatcaaactatggatagacccattaatatccaactgggtcctctttcgttgagtctcccgccctcttgagggagactgatctttagtaacttctttatgagactgggtcaggtgggcctcctgttgttgtctgtggtgctgcaggtcatgtgctttggtgggcaccagtaactgtcattggaattgccaaggtggtgggaataaagagagatgggcttctctgtgattgaattgaagtttggttgtgagtgtgggtcatgagccctgaccgggtaggagacagaagcctgtggttcttctcctggtttccttagggattttcagctggctcttgggcagctccttcaggtggtagctgttgtggcagaatagaagagtgctggactgaggagcagagacctgggtctcatgagatcatgagatcaaaccacttaaactctgtgtgcttaagtgacttcgttggcaatagagtaataccctccctgaagaataaatgaggcgatgttgagaaagcattttatgagcaagccattttcattaatgcaatgggggaaacatgctatgtctagcttagagggctgaaacggtcaaatgaaataatcaacgtaaatgctaaaaaaaaaaaatccagtccacatttatggaattgcctttattgacaaattgagcgagggtaaacattcgtgtatttaaggcatggagtgtttcccagttgcttttgaaggtacccattgtcacaaaggagtaaagaccttactaaatgggatcttatttgtatttctgtagcaaaggatttttgttaaagaagattcaaactcagagatggtagactgagtctgccaggaaaaccacacacttatactcctgttccatagtcaactaatattctgcttctgctacaaacttaatgatcatataggaattatgaatttagaccaacaaatgccaaaacttgaactatacaagtgtatagttttagtgtaactttgtgttgtcactttttgcttctatgtgacacttagcaattctttttttaaaataaaacaacattagaggtcatttaattgtaatgacaaataaaatcagcaggtagacttaggatttcaaagcatctctttcttggttgggaaagctccctggaggtccaacttgtagtcctaggttgagtagggatcaataggagaatttactgaaggggccctatgctcagtttcaccaagttcacagccaggttcttatgatctgcatccttcaggtacaagtgtgtgttctctactccagtagcagacttgaacccagagtccccagtacaaggaagcacatatttttggattttgccgtgtgaccttgtctggctggctggactttaggaacaactggtcctcatccctggcaggtttagggggagagtgaaaccaagtcagatgactctgaagctccttcaaacaccacgacagaaggaatggattgagcaagaataatttttatagacttggaagtttgagtcctttttttttaaaaaaaaaaacaaggaagtggggcattccagatggtaacacaagaaaccagggagatgagagcagatgaaaccttgagggagaaaatgaaattctctctgaattaggagaagcggctgctttccctcacatcttcctgtgtctgtaactagcttagtgtttgggatgcttattttctattttctctgcatttttttagctgcctcagtgaccacttgaccatttatgccgaggcagtagtggatgtttccaattcagtgctccttacctcttagaaagagaaggattatgctttcttcatgattgtgagtcagtctatgttcagatttacattcaactaatatttttcaaatattggcccagataatttcaagatatgctatctgatcctcaaaacaatcttataaatgaggctcagagaggcaaagggacattgcaagtcatacaggggtttgcatatagcctcctctctgtaagtctagaaccatctctgcagcttcctcctgcgttcaccatgttgtgtgacttttgtaaatacttgaactctatggaaactcaggaatgatgtgaaatgttattagttggaagccttgtcagagaaaaatgggctagagagttccgtttgcaggcttgagactatagttgatgggtctgattctgaattaaaacatcctttagaaaatagatcccgctttttttagagactatccaagatttaaaagttaagcagctttggaatatagcaggcagatagttctcctgtaatgcttgctttgaaaccatgaacaatgtgtgcataatcagaatcttggatttgcttaataccattttttcttgctgaaacattaggtgaatgcagaaaactgcgcccacctgaactacatgacgtcagaatacacaaaacacgcacgtggcacaacctcatatgtctacagctacctcagtttaccccgcgtgttaagagccacacctgtccatacctggtgttatgactgtccctccaatttcgggtaaccctccctccagcccttcccagtaactcaccaaccgcagcccttccgacacccaccccacagccaacttcaggcctttttctaggcgaagtgacacatttattgttgtgtttatgtatttcttaactatttaatgtgtgtaaaatggtgctactatttttattaggttgcaatctttttgtaaatgtcactgattaaatttttgagtgttgctttcctaaccccatttttcccataagccctgtgttttttattgtgcattttgcaaagagtgatgatttttaggaccacctatgaggcattaccgaacaagtgactgtgtgaagcttttggactaaaccttccatctaacttcactctattaaatgagttattttcaggataagacagtctcatctatttacaaatactttatcatataatgaagttctacttatgatttattcagaatccacacaagaaggcgtagatttgctcaaggaacaaaattaatgacattttaaaatcttacaactggagaggatgattaatgggaaaagagctaacatttcatgaaaactagctttatgccaggtcctgttggatgccttccaataatgactgcatttcattctcatgtcaacctgttcgggtggtagggaattttggcatggagagagtgaaagttgctcaatgtccgtacagctcctaagtgactgggctgcgagtcaccactgaggagcagcccatctggaggtatgatcacagcaacatgggctccagactgttcttggtccttgttgttcatcgtctttcccattccatacttgcgtgtttctgtcttctgacacaaatagactactagtgggttcctgtgggttgctgctgacaatccatccatttacccaggctacatttttgtatccatttttttcaaccttttaattttttatcaccccacaacctgggagactttttaagcattttttttcctaattgcctccctatgcaatcttttttttttttttttttttttttttgagacagagtctcgctctgtcatccaggctggagtggcaccatctcggctcactgcaacctctacctcttgggttcaagtgattctcctgtctcagcctcctgagtagctgggattacaggcgcccaccaccacgcatggctaatttttgtatttttagtagagatggggtttcaccatgttggtcaggctggtcttgaactcctgagctcaagtgatctgcccacctcagcctcccaaagagctgggattacaggcatgagccaccatgcccagcccctatgcagtcttaacaccccagatacactgcatatctgtctatgtgctgtgtgtatatttgtgctttatatgcattaaagagtaaagttgtttttgcccctcaagaagtcattttcatcctattggggtgatcttgcctgtgttgaaaaggcatgttctgtatcttcagttatttttaatatgtagatccgcttttaaaattagtatcatgctaccttagaagcatatacctgagtttgtgaagacaagcccccttgtctgggctgtgattcctagtatcttatgatgagcccgacaggatgacacagccaggtgactcacatagagctaagctctgtgagaaagcgaggcctcagaggtagcacatgatttcccttcttccagtttctctatataaagaaataaagagcacacatcaaaccaaacataaatggaaagaaatcaatggttgaatgacacatgattctggcttgtcagccctagttggcacctttcgctccaaatcatcatctttctaagatactaaattatagattccaaccaaggtgattagtgctgctcacactttaatgtgcattggcatcacccatgaatcttgttaaattgcagattctcattcaagtaggcctgggattctgcatttctgacaaactcccaggtaatacagccactgcttggtcccagaaccatactttgagcagcagtagcctaagaatacacagaggcaattaaaactagctctcaaactattttaagaatttcagaaagccgaaagcagtggttctcactcagaagcgatttgttccccaggggccatttggcaatgtcttgcagacatttttggtcgttataactagaggatgctactgacatctagtgggtggaggccagggatgctgctaaatagtctacaattcacaggacagcccccatcagaaagaattatctggcccagaatatccattgtgctgaggttggaaacccttgcctaaaggaaatcacacacttactcccagtaaagcagcatggacaaatacagataccctctctccttggcaagagtgatattcaattcaatgtgatagccccaaatagtttgtagtggtcaagctctgcagttgacattaatagattactctaactgatatggggaagtaagttaattgtaatataaagaaatgcagttaagcagattaaaaggaaaacacttttggagtcatgagctgtcagaggagatttacatgtagcaaaggagaccctgctggttgaaggatgggaatgcctgtcccttattgggcaggaattgggtgggctgaccaggctgtgtacgcctggctggcactgtttattggagtggtgttcgagcgagcccatctggacatttttggaacaaacttgggacattcctttggccttctgaatatgacttgcagctgggtagggaagtagtgcaatattatccacagattgaagattctttcaaacaacagaaataatcaagaattcactgtggaggattttcccctccagagagtaacagatagattgatgcgtagatctaggtatgcttattaacaaaccattcctgtttcatgggatgtacatgtggcagcatctggattatttaatgtgttaatatagtcagtttgtatatgaataatttaaaacagtagcaagagataaaagtagctcatctgaagaagggttgtttgagagctttttttctgtcaagtataattttactctcaggttaaatgaaatttattaagatgcaatttgctcctgggaggtatttgtgagtttaaccacagtctgtcttggaagatattatgacagtaagtaaatgtcacctggataatactgatccattcacagaagggagaaaaagtgtgttgggtcaattaaggtggtttaaaaatgtgttgactctgaagaagaaaagtatctaaagtacacaactctaacaaatctcaaggccagtgggactttacagactgagcccaattgtgttgagtctgtgtattgtatatacttaacacaagcaaacacagactttttctacaaatgaaaacatgtctgctgagcagttgactcagtcatctggaataaatgttctttatttgtgtttccatgggtaaaatcaagttaatgaactgaaccatcacaatttctcttatttaatttttaaaactctagattaccctgtcttctatctctatgtaattcctgtgttagagcaaacataggaaattgtcaatatggcagagtgcggtggctcatgcctgtaatcccagcactttgggaggccgaggcaggtggatcacctgaggtcaggagttcgagaccagcctggctagcatggtgaaaccccgtctctactaaaaatacaaaaattagctgggtgtggtggcacacacctgtagtctcagctacttgggaggctgaggcaggaaaatcacttgaacctgggaggcagaggatgcagtgagccgagatcacaccactgtgcactccagcctgggcgacagagcaagactctgtctcaatttgaaaaaaaagagagaaattgtcaatatggggccatgttttacctacaaaactagcaatttcatgttgttctgtctaatattacttaggaacattttaattcttgcattaaaaagtagcttttataagcatgagggttaatatctaggcataatgtgttttctgaacagctggctctgtttttcgtctctgtgcaggatatgatttcacaccagtaacccttcaacttggggtgacacctttcataggagtcatggtagttctttctgttatttttctagccatatggaggtctcatttctcttaattcttaaaatgatggactacctgtcttctagctgtatattatttacttttttgttcataagcaccatacttaagatttttttcttttatttttaaggagaaaaaaaggctgcagtgagctatgattatgacactacactcacccaggatggagtgcagtgtcatgatcatagctcactgcagcctcgacctcctgggctcaagagatcctcctgcctcagcctcccaaatagctgggactacaagtgtatgccaccacacacggttaattaaaaaaaaaaaaaaaaagtttttctagcaacagtgtctcactatgttgcccaggctggttttgaactcctgggctcaagtggtcctcccatctgggcctcgcaaaatgttggcattacaggagtgagccaccatgcccagtcccatatttaagatttttctaaagccctaattttaagattttcaaaaatgctaattgtatcctactgtttctgccccaagaaccagacacctagatctcaagatatggacaggtatttattggaaagaaatgaggattttgaggtcatagaagtgtctaaaacatcaagatttattaaaatgattttttacagctgatgttctaacattcattattgtttcctatgatagagatacaaattgagtcacttttcaaacatactttactgttgaatacctataaaaatctcatggaactagcagtccttagtatacagtcaggaaaattctgttttacactagtcactttccagaaaggtttattaataactggctatataattctttccccagaatatgttgttctttgtggattttttcaccccccacccccagcttttggtctattccaaaatacacacgggcttgacctaagaattttgctaaaggaattattctcctctagggaaatgaagcagcatgtttcaacacaagcttagaaatcttaaaacaactaaaaatgaaaaaaaaaagtaccaggtcgttattatgttctgcaaaaattagatttacgggttttactgtagccattgtcaatgccttactgagggataggatcatagcagaaagatgctaaggagcttatggtccccctgggctgttgtgattatgtggatatatttagaagctacaaagaaagcagagcatcagctgagatgccccagtagacactctcaaattcagatctctcccattatgagaaaaaccctcaaaagaaaatattcacttggcaaggaatgaagagcttttttactcaccaaaatgatgtcgtaatgtttcagggagaacagtgactgcgacttacttattattgtcatttatatctcctagggctgaacagttgtcagagaggataagagatagggggagtgtatgggaggcctgctttggttctctgcttatataaacctccacattttagcagatttatgtttcatccttaaaatgagttaaaaacagcagacccttttgttgcagatgcaagatataacatgtaaagtggttccatagcaaattgctatttagaaaagaacccaacgttatttttaaccaactgtttgatctcctgtattctttcttatgtggttttatgaatttttgtttcacttgtaaataatcggtagcaaatgagtgtgtgaggctatgatttaatttgtaacaaggtacaataaaatacctcagcctgtgactcaactattttaagaggacaaatatgctaaataggaatattcgtttctaaccctatagtaaatgaaatgtacctaagatccatggctgaaaaaacctgccttatacaaattcacataagagagatcaaatgtggtgaaggttgcttgataaacttctattgtctagcttgtctgatgagctagatttcacagtattatgtccagatttaccacaataatactgcatagtttttttcaagtcttcgatctaagaggttctagtttgaagaggaggggttctgtgtcattcatacagtggctgtgatgcacatccgtttgatctgtgggctcatttaaaggcttagtggactgaaatgttttggggtcacctggaggggatcagtgtgtctgggctttgcttccctgtcttccttacgtatgtggaaacggtgagtgttgttccctgagatgtcctagagagacaaccttttcccaagtgacagtgagtttccgtcttggaatcagctttgcttatcccagggaggatccaggcctggcgccagcaagttctccccatgaggtctctgaggatgtggagagaaggaatgccctgcagagtttcagcctgttactctaaacctccaggcatgtttaagaccccttgggagaagaggagggagacctccatccgtttacaacatctctgcacagaaggcaaattctcttctcttgcatagtaccctaatggcaaaggcatacatgcaccaggctcaattacttttagtgaagaaaataaaccagatctgtggaaggcttcccttcagtgacttggggaactctagtttatgagtgaaagtaaagatacgagctagtaggtgacttttggtgtatgagcccttatttgtggggtattaaaaaccatgggctatccagtaactcagtaactcaggacacacacagcattttgtggtccctgatgtctttcttcgttttggctgctgctttggccattcagtcaaatttgaccattggttttcattaagattggccctcagatacagagcagggaaaagaaatgaaatttaagcttgtacatgatataaattgtcatcaactccattaatgtgttggtcagagagaaggcggaagccaatatttgacaggaagcatgtttttttttttttgtagattcagtgtgaccaccacaccgtctcgtgcttgtaggtaatttaatttaacctaggaggaaaatctagtcatttgagaaactaagataattaattatatgcttttaagatggagttcttagatgtgagatcttggagatccctgagaccatgtttaagaaatgctacatttgtactgaaaatctttgacttgatattaagttatgataaacacaactgccaattcaggtatgtaatttagggatgaaatctgatcataaaatggccgtctagatcagagtttggcaaagcatgacccatggaccaaatctggcccgctgtttttgaacagctcacaagctaacaatggtttttaaatgtttattatgtatttgtttttgagtcatggtcttgctcaagtcacccaggatggggtacaatggtgcaatcatagctcactgtaaccttcaacttctgggctcaagcaatcccaagtagctgggactgcaggtatgcaccaccatacccggtgaaggtattttatttttgtagagacatgggatcttgcccaggctggtcttgaattcctgacctcagtactcctgcctcggcctcccaaagtgctgagattacaggtaaagattttgttatttgcaaagagcttttcagaggagggactaaaatgataattcaccctgtatttactgggtaaacagtattaagaccccagattttgccagtagcagtggcatgtgcctgtagtcccagctactttgggaggccaagacaggagaatcacttgagcccaggagtttgaatccagcctgggtgacagtgagaccccatctattaaaacaaaacaaaaaacagattttgtctgaagaagtgagtattcttggacttctcaaaatgtcagtttggagacagttttggtaggccacttggtatataagcatggacagaaattgattgtgtgtgttgtattaggttggtgcaaaagtaattgtggcttttaccattaaaagtaatggcaaaacccgcaaatattatgatctatgttagtccatgtgagagcatatttatggagaatactgacatgatttgtcaagttagtagacaaataatgactgaacactcaaaggcaacatgattatcctccagctgtgcctaggagattcttgataccattttactatgtcaatattcagctacgtggacaaccgctattgttttgaacgctcgcttttccttgagaaagggatttccagaaaaagaaattctgtcatagcaccaagagctatgctggacaggaggttcaaatgttcatttttctggccctgaaatgaaatgcttcttaggtacacaatttgctgtccaggtctagagccgagcccagcaagaaacatgcccagtgcatggtaggcagaattttctgcctgtggactttcacaaggctgcattgtgggaacagaagctgctcagattgttcattgttctgtgactcctatttggcagccagtggagaattcattatgcagtgactggcatacttttcttctgttttttccctgccctgagtacagcagtgcatccgtgctctctgtaaccccttgcttcaccccttactgttctaatcttcccctccttgccttcctccagcctcactgctttgcaaaacctagagacaagcagacttaaatcatatgaactgattaggggatcaatttcccccaatgctgaggaaacacactttgttctcacatttgggtgggtgagcctgccaccaaatattaaacacccacggacacatagcagtgcgtcggttccccttttggggactgcaagctcagacaaatgtccacaatggcgaacatgccacatttctccctctgtgtttccgcccccaaaagtgtggcctcctgggctgagaggaagaaaattgagaagcagctctttcaaaattaccatttgcagggtttgttgttgttgttgttgttgtttggtttttttttggtttctatctgacttgctttgtaaagctggaagaaaagattagcatgactccgaaagcactattttttatgaattccagagcagcagttctcaacctttaaaatgtatttgaatcacctgggggtctggttaatatgcagattctgatttgttgggtctggggtggggccagatttctaatgaccttccgggtaatgctgagactactgggccatggaccaccacatttgaatagcaagtattaggttggtgcaaaaataattgtggtttttgcccttttttttgaaagtaatggcaaaaactgaaattacttttgcatcaatctaaacactagttcagtggctctcaaccttggctgcacgttgggatcacctggggagctttaaaaactactgatgccagagccccaccctcagagattctggtttaactggtctggagtgtgatctgagcctagggagttttttaaacgcctcagatggtctcaatatgcaccattgtggttatattgcagctttacaggtgtaagaatcggatttgttctcttaaaagggaagataagtcttctttttggtcctaggtcaatctgagctgagttcttcagcccttgaagaaagagcatccttctaactcaccagttctcaaccaggggacatctggcagatgcgtttggttgtcacaactggagttgggggtgctactggaattaagtggatagagtccaggggtgctactaaacatcctacagtgcaacagctccccacagcaaagaatgaaagggccccaagtatcgatggtgctgagacagaaaccctggtatagcttacctcactcctgccctcaaaaggctgggaagttcaacacttccttcttcaatgactattgagagtaactaactaatagtgttacaacaaaggggtcccaatccagatcccaagagagggttcttggatctcatgcaagaaagaattcagggcgagtccatagagtaaagtgaaagcaagtttattaagaaagtgaaggaataaaagaatggctactccatagagccattttatggttgtttcttgattacatgctaaacaaggagtggattattcatgcctcccctttctagaccatatagggtaactttctgacgttgccatggtatttgtaaactgtcatggcgctggtgggagtgtagcagtgaggacaaccagaggtcactctcatcaccgtcttggttttggtgagttttagccagcttctttactgcaacctgttttatcagcaaggtctttatgacctgtatcttgtgccgacctcgtatctcatcccgtgacatagaatgccttaaccatctgagaatgcagcccagtaggtctcagcctcattttacccagctcctatttaagatggagttgctctggttcacatgcctctgacaatagcacgtagctaatagcatttctttcatgtctaattctgttttacaacacactactgtcgcaagtattctgaactggaaagtcagtcttcctcccctgtaaaattaggctattgaaatacaagcttccaaagtccttttcagttaaaaaaaaaattatgtgattggcagggggaatggggagtagttatttcatggttacagattttctgcttctggtgataaaaaaaaaaaagttctggaaatgggtggtgagagttacataactttgtgaatgtcgttaatgccactgaactgtaaagttcatgttatgtatagtttaccacaattttttttaaaaaaaaccatgattctgagatcattggttgaaccataaaccatatgcttgcctgcatctaatgtgaaaccatccctgctccatgttcttagcatcctaggttcgtttccttcttggcactcaccgtggcttgaaatcacatggatttatgtgattatttgagtatgcctttccccactaaactgtcagcttcatgaaggtaagaaccaagtctgttttattcttcatggtactcccaatgcccagcacagttttcctgggatttagtaggcattccacagatatttgttgggtaggtggttttactactagtacatatgttaacctccctaggaacaggaattagccattatccacacatttgtatttagtatcatctgtctcctagccctttgctactggaggaattgtggaatggagaggttatggctaagtactattttatgatgttattctctgggaattggcttagattagaatcacctggagtagttttataattattaatggccacatcacaaggattcaggttcttcaggttctgttgatctgcggtggggttgggcatcagtagtttataaaggtctccagttaattccaacgtgcatcaagacggaaaaccaccgtgtaactccttgcttctcaaaatgtcccaggacaaaggccccaggtaaattgtttgtatattcaagcctgagaaacctacaggttcctttctagttaaaagcccattgttctagttggcctagagagctgttgactccgcaatgaaggaaagtgttgtatatttctggaggcagagagaggtctgcaatgcaaaaatagtttacagagaaagcggtattgttaccatcagaatcagttgtgattctattttagatcattggcttcagaggaaaaaggcaaaaaaacattttttttctacttcatttctagtcttggtttttcaccaccaaacaaaacaggaaaaaaaagggggtgggggttggtggtggcgagggactgcaggaaccaaatggatagaataaaatagtcttgtctcatgcagaagaaaaataaaagacaagttacatctttttctgctagagaaaagaatgtatttcctgtttgccctcgccgagagcctgggcataatgcggcagtgtgcacagagccgctgaacaaagaatacagaaatggctgagaggacagagtttgaaccgccaaatactggctcagttagaaaccatgtgacagatgcagcttctgatttcatttactagggcgaaacagaaatgtgtaagtgtttctctatatcctcggaggctttgagtgaaagaaaatggaaggtaattaattttcccttccagagttttgcatgtacattggaagatctgttatgattgaaagccttttaaataccaagcttgttaaccaaatggcttctgcaagaaagtgggctttataataagccctggctgcataaagaaatgttcccaaaccatgacgttttccgttggtgtttataacattccatagattatgtgagatgctattcgaatcactgaaaaatagttgggtactgaaagtgtctttagggatcatctaattcagtggttctcaatctgtttttctgtcctcaacacacccatagaatataaaattctgcaattagcgccagctgtatgtctttttaagctgggtgggtcatagcagaatcaggaggggtggagaagagcccattttataacaaaaaatcctcagtagttctgagatgcccatatcccactggttctcaaacttcactgtacattggaatcagctgaggagctttgcaagcgactgctctctgggttccatttgcagaaattctgatttaatttttctagggtgcagcctagtgagagactatgaaactctacccaggtgattctaagtgcagccaactttaagtctaatttccttaaaaaccaccactcttttctccctccattgcaaatggctgtattttgaatacttacagaggggagaggttgtatgtttcctcctgtcccatttatttgcatctttgtctctttgatctggagtccttggtcaggaatccaggctcagttatctaatgtctgtgggaaaacgcagcccacttaattataacttcaaggaggaaagtaagcccaggaggctcaaatctgtgactggtctgtggtaaaaacagactggtgggcttctgagactttcctgtggacgctgttgcctctgcagccactggaagagatgtggtgtcctcttgttaccagtgtgtcttgtgtaatcaagatggtatgccatgctattcactccaacatgcttttctgtatcttcccccaagatgtccctacaggccctcctgaaggagaaacccaaagtgattaacttaactcttccctctttagtcctcatcatttgaggttatcttttgtcattgttaccagcagggaaaacacaaagcatttatcagtggacagattggcatggataggatggcagttaatgtcgttcaaagatgaaggctcgggccaggcacagtgactcacgcctgtaatcccagcactttgggaggccgaggtgggcagatcacttgaggtcaggaattcgagactagcctggccaacatggcaaaaccctacctctactaaaaatacaaaaaaattagctggctatggtggcatgcacttgtagtcccagctactcgggaggctgagggaggagaatcactggaaccctggagacagaggttgcagtgagccatgatcatgctactgcactccagcctgggtgatagagtgagactccatctccaaaacaaaaagatgaaggctgtgttagagggggcatttgtagactggtacccaacatcatacatcaaacactgagaacaagagtttctagatttttttttttttttttttttttagtagtgacttaaggtagagagaggtggcacttaggagatgtcattctctttggtttgatgttgatggtcagtcctgttcagggctggggaagtgaccatgtcagcagaagaacgactgcttagggttttgtggcctcttttcatgtaggctaagagaggaaatgtcttgaaattcgggtatagaggtgtggaatgactgggattatatagggactctatcccttccatgccctgtaatgtccatagtgctgggaacttataaatactgcctttgtgtggaagcgtttttcaggtactcaagtaaagtaactctatcctgatactcacagtactataaacataaagatgaaaaaatgcaggatttaggggaaatgttttcagatttcactggagaaaaatgtagtagcctacaaagatagcaattgagttcctaaaggcatttgggttaaattaatcattgattaaacgtgaaacttcagagagattttgctttctgattcattagcttagatttgaatacatttgcatccctgcatatgtagaaagctaattcagtgaggtctttttgcagcacataatgaaaaaaatgaatgtgttttatgcttaggtgttgtagaatcaggagaaagtggtagataggtcaaaattttatttctgttgctaacttaacatattacaagtatatcgcaaaagcatacgtatacattttgtgcttcttaggcattcgttctttgtgttttagcttaacaaaaagatatgtcagtttttcatttggagccattataacattggaaagcagtaggagtgaaaaactaaaaccactcgaaactcaaacataaaatactatcagacttcctctctaaggcagccttgtttccctggcacgcaccctttgcttctccgctcattcttgcggtcactgactgccttgactgtacttcataggcaccatccatcacgcttgtctgcagcagtgacttaagatggaggggggtgggaccacaagatgcctggcccttggtggggcggggacggggggttgttgttcatacaaaagacctttgcatccttccgaagcgggtggcacctccctgccatcacttgggcatcctccaccagcctctgaagatttcactgaggaggaggggccagaagtagcagggtataggatggaggccagggccacctctaggagtcctggcccgctcaccccaatcagactttacatgccttctttcactattgagaaactgtaagggttaattttggggatgtcatttttgaatgcttctatttgccaggggcaaactgattaaaaggaaaaaaagagagagattgagcttaaacttcctgaacatctatttgaacagctaagaattcctttttctaaggtggcaagtaagataattaatggaatatttggtgcttatgttatctaatatgttagtttgggatgaaataaagtcacaatgaaattttattttttatatgatacctatatactttatagtaaaccaatcctccgtgtatacttgataattttacttatgcacagtttaggactttgtaagaaaagtggtacagatagttgttttcaaatgtcctgttctgggaatgcagagttggggaacaagatgccttcctgtactaagaaattactggatgtctccctcgatgaggtgacatatgaagaatatatagagatgcccaacaaatgttattttctacccctttttctgggtttttcgttttctctcctataaattttgggcaggccgtgtgctctgttgggtcgtgtcatttgagtccatcactacataggaccttctctcaatatttcaaatacttacacaagctagaggttgtatgtttccttctgtcacatttatttgcatctttgtctcttttatctggagtccttggtcaggaacccaggtttaattatctgatgtctatgggaaaactcaacccacttaatgacatgctgcattattttgtagctctcaggggaaaatgtggcaagaaaatggagactgcttattatttcttcttacgccatggttccagaatcttttcatgagagtaaataaaagtgaggtaaaatctgcagaatccttaggttagagagtttgcattatcgattgataggtccttaaaaacattttctctttatttcagaacaatggtttatgacaaccccattcactactcttgaaactgatgaggaacatcagattatgtaatcttgtgcatttggctaagtcagaggaggcctggtgaattcatttgtcattcagagtctagaggaatctaatatttgtttccagataaaaacctgactgagaaagtatatatttctgacatggagaactatgctagatattttatataatatgaactattctagagtattctagaccagcactgtctgatagaaatgtgagccacatatgtaacttttttaaggttagcagcctattgaaaattatttgaatggataaaatcaggtgaaattaactttttaaaatttatttattttttgaaatggagtctcactctgtcgcccaggctggagcgcagtggtgggatctcggctcaccgcaacctctgcctcccgggttcaagccattctcctgtctcagtccccctgagtagctgggattacaggcgtgtgccaccacgcctggctaatttttgtactttttagtagagacagagttttaccatgttggccatgctggtcttgaactcctgaccttgtgatctgcccgccttggcctcccaaagtgctgggattacaggcatgagctaccacgcctggccgtgaaattaatttaacaatatgtttaaaatttttttttttttggtttagagacagggtctcacgctatcgcccaggctggaatgcagtggtgcaatcatagctcactgcagcctcagactcctgagttcaagcgatcctccttagtagctaggactacaggtgtgtaccaccacgcctgactaattttttttttttttttttaagagacgaagtctcgttatgttccccaggctggtgtcaaactcctgggctcaagtgattctcccaccttgacctctccaaagtgctgagattataggcttgtatgccactgtgcctggccctaacaatacatgtcatttaacccagtatttccaaaatgttatttcaacatgtgaccaatataaaaaattactgagttgttttacattatttttgaagtccaatgtaaattttacacttagagcacttctcatttgggattagccccaatcatatgcccactggtgacatgtggccagcggctaccatgttggacaacacagctttggaccttcattcctaaacccaggcactgagagattgataaccaatcaagactcctgctccaatttagaaaggggacttaaacattgagaaaaggagctctctgaaaaaaaaaatatgaaagactccttcaaatagttgatattagaaactaaaccactttccacataaaatctgtgtttttgtctgaagagcgcagtggggaactagcaatttgtaaaatgtttctatgtgaattggaagaacattctgccttcagattgtgcttctggaaaaccagatcaggatgacattgagaggcagatgattgtattgtagcttttaagagaataagctctgtagcttcaatgcctggattcacagccaagctctgctatttaggttggtgcaaaagcatttgcagttttggccattgcttttgatggctaaagccgcaattgcttttgcgccaacctaatacttgctcgctttgtgatctttggcagattcctcttcatgtgtacttttcctcacctgaagactcaggacagtaatagtaactatctcctagggtcatgaggattaaataaactaaaacaaaggcctcagattggtacttagcagtgagctattctattacagcattagctattaaatcatcatcatcgtcactgaaaattgtgctcttatatctcattctttttttttttggtgacagggtcttgctctgtcacccaggccggggtgcagtgatgcaatcatggctcactgcagcctcagtttcctgagttcaagcgatcctccttagtagctaggactacaggtgtgtaccaccacgcctgactaattttttttttttttttttaagagacgaagtctcgttatgttccccaggctggtgtcaaactcctgggctcaagtgattctcccaccttgacctctccaaagtgctgagattataggcttgtatgccactgtgcctggccctaacaatacatgtcatttaacccagtatttccaaaatgttatttcaacatgtgaccaatataaaaaattactgagttgttttacattatttttgaagtccaatgtaaattttacacttagagcacttctcatttgggattagccccaatcatatgcccactggtgacatgtggccagcggctaccatgttggacaacacagctttggaccttcattcctaaacccaggcactgagagattgataaccaatcaagactcctgctccaatttagaaaggggacttaaacattgagaaaaggagctctctgaaaaaaaaaatatgaaagactccttcaaatagttgatattagaaactaaaccactttccacataaaatctgtgtttttgtctgaagagcgcagtggggaactagcaatttgtaaaatgtttctatgtgaattggaagaacattctgccttcagattgtgcttctggaaaaccagatcaggatgacattgagaggcagatgattgtattgtagcttttaagagaataagctctgtagcttcaatgcctggattcacagccaagctctgctatttaggttggtgcaaaagcatttgcagttttggccattgcttttgatggctaaagccgcaattgcttttgcgccaacctaatacttgctcgctttgtgatctttggcagattcctcttcatgtgtacttttcctcacctgaagactcaggacagtaatagtaactatctcctagggtcatgaggattaaataaactaaaacaaaggcctcagattggtacttagcagtgagctattctattacagcattagctattaaatcatcatcatcgtcactgaaaattgtgctcttatatctcattctttttttttttggtgacagggtcttgctctgtcacccaggccggggtgcagtgatgcaatcatggctcactgcagcctcagtttcctgggcccaagcgattctcccacctcagcctcccaagtagctgggactagagacatgcgccaccatgccacgctattttttaaaaatattttgtagagatggggtctcgctgtgttgcccaggctggtctcgagctcctgggctaaagcagtcctcccaccttggccttccaaaatgttgggattacaggcgtgagccacgtgcccagttctgtatttcactttcacactctctatgctccacttagtgtttcagttgcctgtttcagttgctgggcctatagtggtgggcaaggtagacaagattcctgttctcacatcttacattttagggatgggaaataggcaataaacaagacaggagaacaggcaaatgaacaaggtatttccagagtgtgagcagagtgttcagagagtctctagaacaggttaacatgaccatgagaagctggaggtgatgtttgagccaagacatgcatgacttggtgcaaatttggggcagagcatcaagcccagggaacggcaggttgcaaaggccccatggagaaaccggtgtaacgtatttgaacacctgaaagctggctcctgtgtttggagtgtaagaagggggtaaagattggagatgaggtcaataagcaggcaggggctggaacctcaaaggccttgcagagcttgataaagagtttgaaattttattctaagagcctcgaaaggtttaaggcagggaagtaatagaacctgatttgccttttttttttttttttgagatggagccttgctctgtctcccaggctggagtgcagtggcacaatcttggctcactgcaagctctgcctcccgggttcacaccattctcccgcctcagcctcccgagtagctggaactacaggtgcccaccaccacgcccggctaattttttgtatttttagtagagacggggtttcaccatgttagccagggatggtctcaatctcctgacctggtgacccgcccgcctcggcctcccaaagtgctgggattacaggcgtgagccaccgcgcccggcctgatttgcctttttaaatggtcactctggcttcaggagatttaatgggagcaggagagagacgaccactactatctgctttcaagaatgtaagattggacatagctctctgtcccctgctttgagcatagctgattcctctacaacaaccccatcactggccttgtgttgtgaaagagatcattttctgcttgtataggagagtagagagacctttacgctaacgtggcctgccatttcagactatgacataaccatgcacatgctcgcacattcctagaagaatccgtgtgttagcaaaaggattgttgtgttctttgcgaagcaagagcaaagaatccctcacagaagctgaaaattgccactgatgagtcaaatggccatgctctggtcttcataaacaaaaggcaggctctgattcctccaagtgcagctaattttcaggtagtactaatgggtttatactagcggttctcaaagtgtgcttcctggacgagcaacatcagcatcacctgggaacttgctagaaatgcaaatcctcaggtcccaccccaggagacatactgaactctgaagtgggcccagcaatgtgttttaacaagccctccagctgatgcacctcagaatttggggaatccctgttttttgctgctagagatgattgctcagagtaaaaagcactactaaacatggctgaggagcagagtgatactcctttcattgtaatctttttaatgtaaatgctgagtatttgggtagcttttggaatcaagtgtttgaaccacgccttttgtgtttgaagctattcatgttttatttaggttcttttgttggatgctgctgtatggtataatatttacaaggtttctgggctggcttctccttactggaattttcagaattgatgtaattacatcctccctgagtcgaatttaacagtctaaattggaagaagcctctggctgtcctgatagaaagttcccactgaaaacaaccagcagcattgtatttgaatctttgttgtccacaggtagactgtctatactacagcttcccttcagtgagtttttaacccctgggtggctcatgctgccagccaatctgttcttatgtggatcttcaccgtaagttatgacctgcttacggaaagcagacagatttttagtttagatacatcataaaaggtatatctacttgttgggggagggagggaaataaacattccaaatacagtactgttgtcaaagccaaggatgttctactgtggggctgttcttatatccctgctgtatctgtttcctgtggccgctctaagacactaccacaaatttagtggcttaaaacaatgcaaatttgttatagtcctggaggtcagaagtctgacgcaggtctcactgggctaaaatccaggtgtagatgaactgtgtttctttctagaagccctaggggagaatccatttccttgccctttccaccttctagaggctacatgcattttttggcttgtggccattttcctacatcttcaaagccaggaactgtgggttaagtttttctcacatcgcatcacttggacctcttctgcctctctcttgtacacttaagtaccctgtgataacgttgggtctacctggatgattcaggataatctttggtcatctgattagcaaccttaattctatctgcaaccttaatcccccgtttgccatgtcatgtaattcacaggttccaaggattaggatgtggacatcttggggtggggggtatgatgctgcctaccacagcaggccactaaacttccttacagcctcagtttccttatctgcataatgacattagtaaaaaattattgaaggctctccttgagcattacaggagatacatgtgaaattatttggcacagagctgcccttcagtagatgctggtggcctaacactattttatgttcacaaagtgtctacatagattcttttaaaaattatttgaatgcttgcttctcactcccagacccctctgctctgttctttggtaccccttcccccaccttcccattgggtggtctccctgacccatgctgataggaataattagagcatatgcaagtggaaagggtaggggagaggaaaaaaaaaaaaaaccttcttgtctctaatcagttactattttcccccatactttaaactctgaatagaatattcgtaagagtttgggagattcctttgatttttttttttaacagctttattaaggtataattttccatttgttgttctctaccttgctagagttacttctgacctcgtcaaatcctgattcaatcaaaccaactgtcattaactatttggggggataattgttgaaatttgaatataggcagatcttggatgatattaagaaacattaactcttgtatgagtgataatagtgttgtgcttatgtaagaaaatgcttattttttcaagatacttactgagatatttagttgtgaaatgtcagaaggacttaaactaggggaaaaaaaaggcgaagcaaatatggtgaatttttttttttttttttttttttttttggcagagtctggctctaatgcccaggctggggtgtagtggcatgatcacagctcactgcagcctcaacctccctaggctcaggtgatcctcccacctcagcctcccaagtagctttgactacagaaatgtaccaccatgcctggctaattttcaggggttttttttgtaaagatgggattttgccatgttgctcaggctggtcttgaactcctgggctcaagcgatctgcctgccttggcctccaaagtgctgggattacagatgtatgccactgtgcctggttcatttttttaaaatattagatacaatcaagtgatgcaaaggacccaggtggccagatgtatagtttctggaacaacttctttttcttaatacttcacttaaatgacttggttctctgtgaactttaccaattctagtccactcactcccaaactctgctctgttgacatagctcatgctttatcagatgtcctaaggaaactctacttcactatccttgtcaagtttacatgctcccacaccttttggtggaacataatttacattttagagaacactgggatcttgttaggtttgtttcgtcccatatcacaatccactcttcaactgctagatgatgcatcccacttctagaaagagagccttacttagtgggactgagagctgctctaatcatctgcagttctagctgttacgcgtttcccagtggatcttgagctgccttggggtggtgaggggctgttttgtgggagtgtaaggtcagggaagtgtcctctcctgccctgtgacccaggccttgcaatgatactgaaatacacagctggaaattgtgtgatccaaaaaatggtcttgtctgtgcacttgcatgaactacagccctgcccccaaattcgggagttgagatggtgttcccaaattactccagtgagttgtctgttattccaggaggtgacacagcatcatggtatgtgcatgatgtcacctcagacgttgccagacaacaagcccactcaagtcggacatacagcactttataatggaggctgggttccaccgagaacagccattctcttgtctgctgtccccagtgattataggcagatgtgctgtgacttgagcttgcacaggcttaaagttccttctgccttcagagtcagcagtcagccatcttcacaaatggaagattgttccagaccaccattgaccatctggctggatccatcccaccatctgccctgcacagtggcctctcatttcctaatgtttctcataaacagcttaaagttccctgtgacattatctactgcagcagggcttttggtaccactcctgggcatgccaggaacatagggcctatgggtattcatcagagaacatttgtatgtcaaaaattttaacaaatgagacttccattttgaagataatgatgcagacatgttgtacgttcacttatgtgtcttccttgataaccagtcaacaatttatcagtgatcctttatggacatattaatacacttattggtgatctggaagtagtgtaggacctaatctgtaatcttaaactgtgcagagccttgaggatggccattgtttgttggttatggtgtcctccttgatctttgatgaaagaaagattgccttaggtgcttatatcaagttaatctcatctctgtgacaattgaaattaccattggttctcttctttccacataacacatcgttgtaactcagcatgtctttttcatcgttgttcttgtggaattcttttaatttaatttattgtggtaaaatatgtccaacataaaactgatcattgtaaccattttaaagtgtacaattcagtagcatttagtacattcacaatgttgtacaaacatcactatctagttctaggacatttttgtcatccaaagaaaaccctataccattaagcagtcactccccatctccttcccccacctctggcaaccactaatctgctttctgtctctatggatttgcttatcctggacatttcatataaatagaatcacacaacatgtggcctaccgtgtctggcttctttcactgagcataatgttgtcaacattcatccatgtcgtagcatgtgccaggagttcattcctttgtatcgttgactgctattccattgtacagatagatcacatttcatgtatccattcctcagttgatgggcatttgggctgtttttaccttgtggctattgtgaagagtgctcctgtgaccatgtgtgtacaagtgtttgagcacctgttttcaattcgtttgggtatgtagctagaagtggaattgttgggtcagacagtaattggatgtttaacttcttgaggagctacccgtgcggccttttgctcatgccagtcctcctctgccatatgatgtctgttctctttcaaacctatgttaggactcgcctccaccttgattccttttcctgatagtcccctgcagcttcccataattcatgcatccttactagtccctatgagcacccctcattcagctctgcctggagaaacttcacttttgcctcctcatatattcatctggggttaccctacttcttttggctttgaggatgtttttcccactaactgcatgcaactgtcaccatctcaaggatggagatggatactcgttctctgtgctcaaaggcacttgtcactatttttgcctttctattgttgggctattctagtaacagctggaaattacagaaataggttttgattttattgctcatcaaggtcaggtttccactgaaatacaggcatcatagggcctatcctgtttgaaatattaaaatgtcagaagattcaaacaggccaaagagggagagtttgaagcgggggtgggggggggattggtatgtgtatggagtataaataaagaggttcaaaataacaataatagcattaatgcaaccttcttgagtttgacctcgtttagtcttcacaacgaccatgtgagatggagatttagtgtgcatggctcaaagccacacatcccttatgtggcaaaatcagtatgtttgactccagagtctgtgtttttttgtttttgtttttgtcttttgtttgtttgtttttggagatggagtcttactctgtcacccaggctggagtgcagtggcacgatctcagctcactgcaacctctgcctcccaggttcaagcaattctcctgccctggcttcccaagtacctgggattacagggatgtgccaccatgcccagctaatttttttttttttttttgtatttttagtagagatggggtttcaccatgttggccaggctggtcttgaactcttgacctcaagtgatccacccatctcagcctcccaaagtgctgagattataggcgtgggccactgcgcctaccctgggcctcccactttaaaagttgctcaccagttcttgtatccctagcaccttccagaatgtgttgagtatagtcagtgctcagtgaatatttattgaatctaattgtcaaggaatatgccatttgctgtgttaattttccccaatatagtttttgttgttacatttttctccttaagccctagaaaagtgtaggctttttaaaaaatgaaaatgtttcattttatttcaagaaaggagccttaatctttatttgtatctatttacaaactgttaaagattttgactgcctcctaatgtctttcttaatctcacactttttgaataaaaagtgttaatatatccgttgtaaattgctggcagctcaatttgaaatatctttttgcacaatatgtactattaagtattctcgtgttattgctcagggtaagaaaagatgactgtttttttgccatttaaagcagtcgtctttttttaatgctgtatttaatttttaaaagacaaagtacagcttaatgaaacaggaacttgctgtttcaatgtgaaggacatgatactccagacacattctaaaaggaaatacatttttaaatataaatgtttggtgtttaatcattcattaggcaaaaatggagacatttgagttgtctggatcccttgagcacattttcatggcacttacatgtaatgaagcagctggcccaggatatattcataatcagtgtcactggagggcttaccatatgccaggcttggttctaattgcttaatgtggattgacccatttaatcccaaaataaccctacaaagttgatgtagtcatccctcttttaaaattgagattaaatttgcatagcataaaatgaaccattttaaggtcaacaatttagtgacatttagtctattcaccacattgggcaaccaccagctctatttccaaaacattttgatcaccctcaaaggaaccccataatccctcgtttaagaatcgggaaacagagacatggagataagcccctttccttaagttacccaactgggaagtgatggagccatgtttgagcccggacactgggactcaaggccactctctgtcgctctctgaagatctatactttagtcccactgccaccttacccacctcctaccaacctccagtgtagtgggggcaaagcacttcacttctaacctcaggttcttgaagtgaaaagcagtaagataatgtgctggttgccaagatctcagggctgcaaaaaaaaaaaaattccttacgctattctccatgggaatcaggccaaagcttttcttcatcaaatttcccgaccccatttctgcagaacaaacagcacaccaggcagggactcccctctgtttcttgatatcccacttccacatttatctattatcatcactctctcattcatgtttcagaagattcccacctcttcactagggtcgagactagcataaaacaaaagagatgaccagggtgcgaaatggaagggggcactccctctcagggtcctgtaagccgagtaagtactctctggcctcacgtagtcctggtcctgccccacacctcctccaagatcatgttcagttgctactccctctcattccttgcctccctctaaagaattctaggatccttttcacttctgactccttgtcctgtctctgaccatttatgtccctcctctctggagatgctcctgctctgttcgccctctaaattgtcttttttttttttcttactctatatccagctgggtcatctcgtccgctctgtgtgctactgtctttgtgttaactctcatacctgcagttctctttcaccctcagcctaggtgaccatatgtcctggttggcctggaaagtcccagtgtatgcttgttgtcttggaatcattattggcagtgcctcttgtcactctcaaaagtgatatgtaggcttggcatggtggctcacgcctgtaatcccagcactttgggaggccaaggcaggaggattgcttgagcccaggagtttgagaccagcctgggcaacatagtgaaaccccgtatctacaaaaaataaaaaaatagcccggtgtggtggcacatgcctgtagtcctagctacgtggaaggctgaaggtgggaggatcatgagcctggtaggttgaagctgcagtgagctaaaatcacgccactgcattccagcctgagtgacagagtgagaccctgtctaaaaaaaaaaaaaaaaaaaaaaaaaaagtgatgtcacatattgcagccttctccccagcactcctattctgctagcacgtttctcaggcatacaaaatgcaacagatcagaaataaaacttctcagggtcttgcctaaaggctgcaccacctcaattttctctatcttgactaattatatccacaaggaaagctgttggctcttcataaactcaatctcagttctccaaggctgaaggaagaccaccacacctggaagaacagctggacccagcagtctgcacctctgttccctgtcacccttccttggaatcaagggctactgctcatttaattctctagcccagcacttcccagcagctctttccgccatgacagaaatgctctatatttgtgttgtccgatttggcagccactagcacatgtggctattgagcacatgaaatagggcttgtgcagctgaggaactgacttaacaaagtacaagtagctagtggctactatatgttatagagcagctctacctcagtacttctcaaactttaacatgcatacaaaacacctggatctcactgaaaggtgcaatctgcttcagtacatctgcaacaagacctgagcgtccccattgtagtaggcttccaggtgaaactgacactgctggtctaagggccacactttgaggagaaaggcgctaatctaactcgattctcatccctggctcacatgagccacacgggggaaggtttaaaaatgtgtcagatgcccagggcctttcccaagccaattaaatcaggacctcagagagtaacctgggcattgacatgttttgaaagctcctcaggtgattctaatgtaagatgagcccagactgagctgctcaaataagactttactaaagatttagggttaagaagatggaattaaccagtgaatacaagtcagttagccactgggatttctgtgtggcacctactcatcttcagcctgaagtccctaatagagtctctgtatctgccttctcccccagatctcctgaaactggcagagaatgaaacagctctaacttcttttttttttgttttgttttgttttgttttgttttgttttgtttttgtttttgttttagagatagggtctcgctctgtcaccgaggctggagtgcagtggtgtgatcatggctcactgcagcttcaacctcctgggcccaagtgatctacttcaacctcccaagtagctgagactgcaggtgtgcaccactgcacctacctagtttttatttttttttgtagagacagggtcttgctatgttacccagcctggtctaacttctttaaatagatctggaaggtgccagacttagcctcacagttgtaaaagatttctgtctttgcaaagggctgttctagataatgtggcttttctgacatattgcatacatactctttgaattactttatacttttcttcacacacatgttcattgtatactttttaaaaagcaaatacagagaccagagctgtttaatagctgaggacctccctggactcagattctccctgaagcagtgttaggggctctgttttctgtgttcatataaccctcagtccataccttgttggaatggttgttattgctttatgatttctctatttgtacttctttctagactgagagctccttcaaagtagggccactgccctatttctctctgcctgtctatcccggccactatcagaacctcctggggaattcctccctcagacctactggttcagaatcttaagtggatgagccctggaatgtgtatgtttaaaaggcttcacagatgatctttattttcagacaggaatgaacatcattgccttagagactgacattatatctggaacatggtaaacattaaataactatttgttgagtgcatgaaaatcagtcttaaattcgacttgtggcatctcgaggcagatgccaccttagccaagtgatcaaggttaatgtcatgagtaacctgcatcaataccatttgccccccatgcaatgcattgcaaaggatacagtattactactctggtttccttccaagtgatgcataaccccagctgaatcatgaggaaacagcagacaaacccaaattgagggatattctacaaaatttgtgaccaatactcttcaaaagagtcaaggtcatgaaaaacaagtaaagactggggaatttgcacagattgaaggagaccaaggagacaggacaactaaatgccgcacaagattctgaattgtatcctggaatggaaaagggacattagtgggaaaactggtgaaatccaaataagttctgtgctttagttaacagcattgtgccaaggctaatttcttagttttgataaatgttctgtagttatgtaagatgttaacataaggagaagctcagtgaaggatgtattggaactctttgtaatatttttgcaacactgctgaaagtctgaatttatctcaaaaccaacaaaaggttaaatttaaaaaatgaatggaagataattgaaatgtcactgaacaagggcattctggaaggagagtaaagaagtccaaggggagaccattggttcgacaatcggaaccaaactggaccatcatagattacaagttgatgcccctatggttttgtcaaaactccctcatgtttttatagctattttgaggtataatttacataccatacggttcacccatttaaagtgtataattcactgtgttttagaatatttacagggttgcaccaccatcatcacaatctaattttggaacgtttttgtcccctttaaaaaaaaaaaaaacaacctatatccatttgctgtcactcaatatcccaccccaccagctgctgccaagcaaccattttttcctttctgtctctataggttttcctattctggacatttattttaaattgaatcatatgtgatattttgtgtctggcttctttcacttagcatgatgtttctgaggtttatccatgtggtagcatgtgtcagtacttcattcctatttgtggcccaataacattctgttgtatgaatacggaccacatttatttattcattcatcagtcgatgaacacctaataccttttggactattattctgatgggtttggttgaatactagggtagactgcccttccagcctcccatgctctatgcatccattgctccagaagatagactcttaggataaagagttgacaccatctccaagcatcccaaacagcattgtgtacttatatacatgattagccactttggaatgtctttagtgttaaggcaagaaatgtccttagagtcccagagagggaaaaaatgtgggttatgttatgtccaaatccataaccaccacttcagggagttgtgcagtgaattgctttattgaataagtgtgagaaaggaaagatattagttgtccaagaatgctattgccaaactttgtggaaacagagtattttctgtggaaacagcatacattttattctgtgccatggaatttcccctcatttgacccaaggggtaaagaaaaactcttatgcaaccatcccattttaaaagttattcttttatatgtaggctggttaataaccaacaacagacaattttatctaagatgactaagatcttgcatttcgcttttagtgagagctgatttacatatctaattcatgttctattagcagagttatgggaatataaggaaatgcaagaaaaacccaggacttggatcagattttaaagtcctacagttatatacagttgtgaagatgtccttcaaaatccagaaaccaaacagactctgtcatcttactttttgctgaggtgttggccttttatttttgaaatctagcaattttcacttcttgttatctaaaagttattaatacaaagcatttcctcccgtcatttacataactcttttccagcagtatgcacacgtacacacacacacacacacacacaatttaaatgtctatgagcaacttttgactttctggaaaattctttccccagcttgaaactttctccatattctggtgtttcacctgaatgtgaaatgaagacatttcacagaatctaagagttcagaaagaggcaccgtgctagatactcatgtgcatagtttctggtcttctcactggcccttccagtaacttgtggttattctagaagtccatgtccagaacagaacactgagcaacagatatcatctgggatccatgtttttggtctaattggccttttgggtgaacacatcatttgggctcaagttgatgattgtatcaagtaagccttttcagtctcttctgtgctgccactgagcctgttccaccaccaccttccctcacccccatcttgaaatcatgcatttggttgctgagacccaagtgtaggatacaaccgtttgttcccatgaccttttcaggtcctcctcatctttctggtttgtcttcctttcagcatctggtaattttgttgttgaatgggttggcctcacttcctagcttcatgttacctgcagacttggtcacgaagatgtgtataacttcatgtgagccattgataagcagggcaaaatagggaaagtgccacccccacaccatgcctgtcactggagactgctcggcagtttcatactttattacccctgagatctgttgtgaatcagcctcactaaaggtcttcccctctacattcccttgtgaacaagaatagctggaaagcccttacaaatgccttgcctgccaggcacagcggctcacgcttgtagtcccagcactttgggaggctgaggtgggtggatcgcttgagcccaggagtttgagaccagctggggcaacgtggcaaaaccccatctctacagaagatacaaaaattagccaggcgtagtggcacacacttgtagccccagctgcttgggaggctgaggtgggaggatttcttgagcccaggagattgaggctacagtgagctgtgattgctccactgcactccagcctgggtgacagagtgagaccctgtctcaaaacaaaaataaatgcctcttcatgattcccatggtttgtgtctagagatttccctcagcctaagaatctaaccgtaccaagtgaaagcaagagaggctgatcttgcatgtaatagtcactgaatgttctaagtgcttgcagaatattcttcaattgtctcttctagactcttgactaggatgtatatcagattcaccaatctgtggtttttgaagcatgttttttccttttcccttttgaaaactgcaaatgcatctctctgactccattcgtattacaggggaagatttagttattttatcttcaagttctccaagtatctgggtataatttgtcttcactataatgctaaaattcatttagaatatcttctaatcaatttgggacctcagttctctcttcattagatttttttcgtctactcttccctggctgaagctcattgtttttttaaaaatagatatatattttaaatttttaaatatttaattgacatgtaataattgtacatatttatggggtacaatgtgatatttctgtacattaatgcattgtgtaatgatcaaatcagggtaattggtatatccatcacttcaaacatttatcacttctttgtggtgaaaatattcaaattcctgtcttctagcttttttgaaatatgtgttgttaactatagtcattccagtgtgcattagagcaccagaacttattcctcctaactggtgatgttgtacccattgagtgacctcttcctacttttttgagacggagtttcactcttgttgcccagactggagtgcaatggcgcgatctcagctcaccgcaacctccgcctcccaggttcaagtgattctcctgcctcagcctccctagtagctgggattacaggcatgtgccaccacgcccggctaattttgtatttttagtagagacggggtttctccatgttggtcaggctggtctcaaactcccgacctcaggtgatccgccagcctcagcctctcaaagtgctgggattacaggcgtgagccactgcgcccggcttgacctcttcctacttctaactcccctcaccataaccctccatagcccctagtaacttctatccaattctctacttttatgagctcaacttttaaaaattccacatacaagcaggatcatgaggtatttgtctttctgggcctggcttatttatttcacttaatatgatgtcctccaggtgtatccgtgttgtcaaaaatgacaggatttattgttttttttatggctgaatagtagtctgtgtttttatccaagcagtcagaagcaaagtgcagaagagaatggggtttttttctttcattttttatttttactttttctttttgagacagggtcttgctctgtcacccaggctggagagcagtggtacaatctcagctcactgcagccttgacctcttggactcaagtgatcctcctgcctcagcctcctgagtagctgggactataggtgtgcaccaccatgcccagctaatatttttctttgttttttttttcttttcttttctttctttctttcttttttttttttttttttttgaagagatggatttttaccgtgtggtccagtgatctgccggcctcaggctcccaaagtgctgagactacaggcatgaaccaccgtgcctggctgagaatggggttttctttgcctattgtaatggaaacataaatccgtgaatttggcccgtgacctctttgctgttttttatcacaatgtcatgaactgctttgcagtttacaaagtgcccgcatgtgcatgtgatctttacaaccaccttgtgagctagtgagtttactacctgtattttagaaacaaagaagcagagttgaacttgcatttagtgacatggagggttgggtgacttttccaagttgtggagcctgttcatgaccaagttggatgcctcccagctttttcactatgcaatctttgccacatttatcacatacagtagtccccctttattcacggtttcactctccatggtgtcagttacctgtggtcaacagtggtccaaaataggtaagtacagaacaataagataagaaagagagactacattcacataactttgattacagtatattgttatagttgatctattattagttattgttgctaatttctcactgtgcctaatttataaatgaaactttattgtatgtatatacagggaaaaacactgtatatagggtttgttactatctgcagttttaggcatccactgggggtcttggaatgtatacctcatggataagtggggacctgtactttactatacgttggaagcacacctttctgactttctcccctgaaatccttgtttactctttaattcatgccattctctgtctttcatacacagtatgtgggaagggtgatgcccataagccactctaacttcctgcactccctttcatttctctgtggggctcaccgatgagtgagtatatttccagaacatcatttctgacatcatccaaatcctctaaagcagccttcctttaaaaactccaaccctggaatctaatctgcatttttggaacgtttgcaatatgctgaagtcagagctactccctttgctgtgccccacgtgcctgggcaccagcccctcggctccaccacctgatgtgcaagtcatgtcagtgtcctcccaagattcctttcacttccccaacttggtgcccaagggggatctgcactgggtctagtgcagcatcccccctaacgtgctttctacaagagggaattggcagcaatgctaggcaaggcgattcagaatcagcgactctacttttttgctgaataagacactgcagatctatttcgctgatttatttacattattctgcatgtccttggagagatggcagaaggttaagggacagcatcgattctttcagattcctcaaggctcttgcagatttcccatggtcctttgtactacaaagtgggagaatcaagcatcagatgaccttttcaatgttactctgttggttcaatctgtaacaactttttctcttgtcttcaccaacctctcactgctttccacaaaaaatgaaccatggcctgctattatttgttttcaattctgaatataataagatatcataaattgctttcacgaaagtactgatttgattatcacttatgatacaaattatgaaactgcaacatgagtgttttctctctgattcctttcaccatttcactgcagacttgaaaagggaccagaatggaccaaaaagaaattatttctttgttgttttgccaaagacctttcctttcaaaatgcacacatcctggagttttgaaaactgctataattatcacaaggcagtctttctgtgggaagaaagtgagtgaatttcccattaggagatcatggttaaaataatctctcggctctgggaccaaatggaactagaaagtgtgttcaaaagctgcattcatttcagaagggagaaagaacaacctttctcataatgagccttgggaagcagccagcgtggaaaaaggtcacacaattgccactttggtatctgaataactactcttagcttacttttgcttgtggtgtgatagcttttgtggttttctctggggctgaatccctgctgtcttcaagcatagttttcactgagtctgtcttggaaaccactgtgcgtgtggcattgtcatctaccatttttataggagacagaaacagttactctgacccaagtgactgaaatgcagctcagtaaattttttttcccaatagtcttagcatgtggataggacatttgttcttatccagaaatgaaatgtgttaagattgtgtgaaattatctgtatcttttgctgctcatttttcaaagattgccccggagggtgttttggtgaaattatttatggaatatgtaaaaatgttcaagaccctttatcagaacagaactgaggaggatgctgttcctgaagattctgcctactgcctatccaagatgcaaaatattagtggtattgaagagagatgagaggggagattattttaaggttatgtgtctttctacaattataccaatttttaaagtgtatttccagctgggcatggtggctcatacctgtaatcccagcactttgggagaccaaggtgggaggattgcctaaaccttggaatttgagaccagcctgggcaatgtagcaaaaccccatctctacagaaaaaaaaaaaaatcacaaaagttagccgggcatggtggcatgtacctgtagtcccagctactggggaggctggggtgggagggtcacttgagcccaggaagtcaaggctgtagtgagccgtgattgtgccactgcactccagcctgggtggtagagaccctgtatcaaaaaataaaaataaaaaatagtaaagaatatttccacaaatcagaagtgaaagagacagctcttggagaagggttcatattcataatacttttctcattgcttattttccaaaagctctaaaatggacttctatgtattaccactgcttcatattgcccacctacccaccttgttgctcctgtcatctaatgttatgaaaatagtgtttgggatttaaagcggaagccatgggttgatttttaagaagtcacagaagccaagactgctgagcactctggtgtcatcagaatgaacattccctgactccagtgagtatcctgacgtgtgtagttaactctcacaaactcaggcacgtgaatgatctcagcagaagagagagaagggccagtggtttaccccattgtctctcccctctttcaacatgggtcttgactaccttgcttccaggaagcaagggtgacagctgaaaaccaaccggaagcgttatttttgttgttgttgttttttgttgtagttgttgttgctgttgcttttgagcctccaaagaccaagatccacttaatagaccgtggcatttttgcctcatctactgacttaagaacttaatccatgaccctgtcactacaccccctgcacccccacccacgcacatttacatgctcactcgtacactcattcacactcacctctacctttagatttaacccactgagctgtactgagccagatgaactggactgttgattcttaccatttctggatcgtgggttcctgaagaatctggtgagaagttgtaaaccctcttccctgaaaagtgtctatacaaatgtgtgcagatttggcttatgattctggagggattcatggccaggaaatccatgttaggggatttacttttcactatataccctttgtttctgttgtgaggttgttactgtctgtgtatattacttctgttaattgaatctgtctaggttactttttcaattaacaaattaattagaagactaagagcctaaaagagatttttcttatctgattaagttcagtattgaatcctgagagtccatttgaaagcatagtattcgtcggctttttcaattgcaaaatatttatcgtgattgccaagaaatattgctgagagccaaaataataatagaggaaatgatctacagttgaatttttatctgaattattttgaacatagaaaatgaatttttgtaaataaaaaaataatagatgttggtgtggatgcagtgaaagggaacacttctacactgctggtgggaatgtaaactagtacaaccactatagaaatagtggggagattgcttaaagaactaaaagtagatctaccatttgatccagcaattccactactagctgtctacccagggggaaaaaaaatcatatgaaaaagatacttgcacgtgcatgtttatagcagcacagtttgcaattgcaaaagtatggaaccagcccaagtgcccatcaatcaacgagtggataaagaaaatgaggtgtgtgtgtatatatatatgtatgtgtgtatatgtatatatgtatattatatatatatgtatgtgtatatatatgtgtgtatatgtatgtgtatatatgtgtgtatatgtatatatatgtatgtgtatatatatgtatatatgtgtgtgtgtgtgtgtgtgtgtgtgtgtgtgtgtgtgtatgcacattcattctgtggaatactcagccatataaaggaactaaacaatggcattcgtggcaacctggatggaattggaggcaattattctaaatgaagtaactcaggaatggaaaaccaaacattgcatgttctcagttgtatgtgggagctaagttatgaggatgcaaaggcataagaatgatacactgggatttggggactcggggggaaaggctgggggtggcaagggataaaagactacacattgggtacagtgtacactgcttgggctatgggtgcaccaaaatctcagaaatcaccactaaagaagttattcatgtaaccaaacactacctgttccccaaaaacctattgaaataaaaaataaaatattaaaatgaatttttgtgttaatggtctcatattcaggtgggaaaaatcttcttacagttgccaaaaatggttacctggtagtatgaaaagggtaagagttgataatcctcgagaataaggataccttcctacagtgttttcagcatagcttattttgtgtgattctttgagagcaaaaaaaaaaaaaaaaaccccacgttttgggattgtagtgactgctttgccttgattgggctcctcatgggagccatttcttatactgaatctttcaccataccaaagagtgttataaccttcatgtacattttaaatgacagtcatattttacccttcccaacagggtttatgtaacatctttgtgcagtatgcttaaaatccacaaaactaaaatatctcaaaggagaaaagagaggttagtgatgaataaaaattgtagtgaagattgtcttgttttttccttctaaaattccttcctgtgtaaaagccgcctggccaactgatagtttttctttcaactcactgtgaaatatttttcttagcttgcatgttagcaccaagtgatgtatccattgtcactactgtgtgatatcagttgctgaggtgataaaacatggatttcttttttaacctggtactggaatggaggatggggaagaaaagagagtcaagaaaaggaatgatgcaactgacaggcatacattagtgaggtgccctattcatttatttcagtagctgtacatccttactttccagcactattgaatactctgtgggtggtaggatcgtgtgggggaaagagcatagttataatagctgacatttattgaacatttgctattctaagcacattatttatattaactcatctaatccctatgacaactatatggattagctgggttcaaatccggactcctccacttcctagctgtataaacttgtgcaacttcacttttttttttagatgaacaaaaactatccatctcttagggtagatgttagcattaattgagatggtagttctattgcatatataatcatgtctggtatataaaagaactcaaatgatgtaaaaaaaaatctctgtacacaaagacttcatggcagcatgattcataatagctccaaactgaagacagcccaaatgtccttcaactggtaaatagatttaaaaaagaattgtggtatattcatagtatggaatactactcagcaatgaaaaaaaggacatggatacacacaaaaacatggaaaaatctcaaacattatgttaagtgaagaaatagaaacacaaacatactgtgtgatttcatttatgtaacattctagaaaagcctaactgtggcaacaaaaagtagatcagtggttgccagaggttggggaaggagatcagctgcagaaaggtactaggaaactttgtaaagtgggggaactgttctgtatgttgattgtggtgattacaaaactgcatatgattactaaatttcgtaaaattgtacacttaaaaatgggtgaagcttaatgtatgtaaattatacctcaaagctagaaaaacacttgctgcaaattgtaaggttgtataacattagactttctcatattttagaacagttgaatgggttttatgcagctcgggttttcagagctacttagattatctcaaaggaaacttaatgcaggtgctattgagcacgcttcatacacatgcctatgaaaggtacaatggatgatgccaaagggacctgtgatagtctgtattagagaaattgtagagaaattgcagacagtttatatacactaaaccatcaagaaatcccatgagaattgaggatatgtgtcgcaggtgagtattggggcaggtcagaaagaagggagataatttagtagggataggggtggtcagggaaggcctctgacagaaataagacttgaaagtgttggataagttttctggaaataatttgagcagagatgtggcagttacaatacatacttaaaaatggctggactggagtatgttggaaagactcgaggactttgaggtctgtcagcttcacaaataaggttgcagagtgttcccagttctctagcctggagcttgtgtgtactggttcttaccctgattatgtcctcttccaattctgagtttagtgacgtttcatttattgcctgagattggccacgctgggaatatttaaagcgtgcaaattgacaatcattttggaaatctgtctcccccaacttcctacccaccccaccagccagttgtcaaccatttaccagcacactactgattgtaatcctgagaattatgaacttcagagaggggaacgaacagaagatccagaggtggctggagaggtgtagagagagccagaggggaaaaagatactcgtaagggagatgacaaggcacaaatattcaatgctgaaagagaagtaggatttttgttgttgtttccaagagaactgaagcagtaggatgccttatcacaagcacacatgtaaaaagcacctctcatacaagtcttttcagaccttcagtaaacagtgctcctccttgcctcaacttgtctgatatatacacagcactttgatggtcaatgcatgcagtgcagaattaggtcctcccttctctgtgcttcctggtattctttcagtttctggcacatggaaggcagtcgtagtggctgaatgaatgaaatcatgaactaatccttattgcggtattgctcatactgtatgcttgcaatacaaaaccttgcttacttgtttatctacctcattgaagtgcaaacttcagaagaaccaggaattttgtatcttgttgtaccctagcacttgccactgcacagttggtgctcaagaaatgcttattgaaataatgaaattaggcaatttcagttttagataacatgcaattaccaaaagatcaaatagcattctgttccatgaaacaaacccatgtcctttcttaaaacattcaaaagaggtgctattgagttatgtaaaacatgctagtctctattgtgggagggcattagtctgccaatatctcagtttctttttaacagtacagaaattgaagcaacttactatcaaagtttcttccagatctaagatgctatgattctaagaggaaagaaaattcagaccttgtgggcttaaaaccaggggtcctttattgctttctgttaaggtggaaagttatatatgacatagacattttctgtacttttggcttctttatatggattctatctatataagtgataagtgattaagtgaggttggctagtaattattgcctcactctattcaatttctcttctgtcttatctgtggtaggctgaacaatggcccccctagatgtccaggtcataagccatgaaacctgtgaatatgttcccttatgtggcaaaagagactttgcagatgtgattaagttaaggatctcaaaatggggagattactctggattatctcagtgggcccaatgtcatcacagcatccttataagaaggaggcaggagagttagaaggagatgtgaggatggaagcagagattagaaagataaagatcggaaagatgttatgttgctgactttgaagatggagaaaggggccacaagccacagattataagaggcgagtagaagctgaaaaaagcaaggaaatggattctcctttagagcttccgtaagaactcagtcccccagtttgggcaatatggcaaatccctgtctctacaaaatatacaaaaagtagctgggcatggtggcgcatgcctgtaatcccagctacttgggaggctgcggcagggggattgcatgagcccaggaggtcaaggctgcagtgagctatgatcgcacctctgcactccagcctgggtgacagagtgagaacctgtcaaaaaaaaaaaataataaaaaaaaaaataaaggtgcagacaccttgacttcagcctagcagaactgattttgaacttctggcctcaagaactttcagagaataaatttgcattgttttaagcgattaaatccgtggtcattcgttacaacagccataggaaactaataaaacatctcttctgaagatttaaaaatagcattctttgctttccaaatttcactgtgcataggaccacctggggatcttgttaaaatgcagattctgattcaggggggtctgaggatggtcatgaagatttacaattgtcttgagatcccagatgctgctgctgctgctggttgtagcccacactttgaatgggaaagctctggaggaggtattcattgtctgggcttctctttcctttattgcctttggtcatcattactaaaatattgtatcctgttgggactctttggtttctgtgagcatgtagagaattagaaagccacaaagacttggagtagagccaacatggggaggattttaaaaagctgcaattgttcaacctgaagaaaagacagaagatgatttaataatgatatgtaagaaaccagagagttaatatgtgggaaatggtgattaactgcccctcatctttactttacaggataaaatagcaagaagaatttgggcttaagaactccatactggcagggaggtggtggttctctttgactgttagaattgtacagctgcaagggccctgggatccatctagttgtacccactcattttgtagatgaaactgaagctgagagtgacctttggaaggtcacaagcaaatgacagaatctgtactagaactggtggcttggccatgttcactgcaccaccgcagtggaggctgtgccatggggtttagataattggtagttgctcatcactttgaagtgatttaaaattggggctgtcccagggagccttctagggtggcagaagtgttctgtatcttgctcttgggttcagttatacaggtgtatgcatgtgtgtgtgtaaaactcatcaagttgtaaacttgacctttgcatacttgaccgtacactgattattcagcaattttgaaattttttgctagcatttagaaaatgaaaatgctgaactcttcgttgtagccaaacactggaaatgatccaaatgtccttcaaattagactagatacataaactgtggcaaatttatagaatggatttctatatagcagtgagagtaaatgaactgtaccatacagcaacatagatgagtctcacaagcatgttggtgactgaaagaagccagacacaaaagagaacattccataggattctatctatataaaagtcgaaactgagcaaacttaacatggccttaaaagtcaggggagccgggcgcggtggctcacgcctataatcgcaacactttgagagaccaaggtgggcagatcacttgaagccaggagtttgagaccagcctggccagcattgtgaaacctcatctctactaaaaatacaaaaattagccaggtatggtggcacgtgcctgtaatgccagctgcttgggaggctgaggcaggagaatcgcttgaacctgggaggtggaggttgcagtgaaccgagatcgcaccactgcactccagcctgggtgacagagcgagactctgtgtcaaaaaaaaaaggggagtggctaactatgagggaagtattagggacacaaggggggctctacctggctacatggttatatccactttgtgaaaatgaagcacaatgtattcatttgcacattttctttatgtacatttcaattaaaagttaaaattggttgagagaggttgggagaagaacttctcacaaacctctgtatactattaagctttgaagaatttaggttttttaaagctttttaaattgacaaataataattgttcatatccatagagtacatagtgatgtttcaatgcatataatgtttagcagtcagatcagggtaattagcatatccctcatctcaaacatttatttccttttgttaggaatgttcaatatcttcttagctatttgaaatgatatattgttaactctagccatcccagagtggtatagaacactaaaacttattcctcctgtctagctgtaattttggtttcattacttattttttaaaagcacaggtggaggtaattgcattagaaaacatgtactttcatagaatccctggaagataacttgctgtggagagaaaccttcagttaaggagtctgtatatttaaatctcagttctaagccaaaagccatctcttctcttgtcagctttctctctgagctagtacagtctttctttcatgaaaatctatgaagccagcaccatcctcagatcctttttggccctttgtagttctacagaatgggggcattttttaaaagaagcagcttgaaataaatagtaattttgttaggagacaatgttgtcatgccaggcacacttccctgcagcagtgcctggagtgccacagttggtttcaaatggtgtgaagcggttccagacaagcagccgaccaaacagaacttgtcaccccaagccagaattcccccaaagccatatctgcttcctgccactggtggtatagtttcaaaccagctggctagcctacctgagataatttcatcatgtgaggttgtacagaaaagggttgacttgaccaatctgagactatcttggacaaggccagcttgcaaggttggcccttggctggcatcgggaacttggtggtaagcagttccctgcagtgataagaactttccctaagtgataaggctggttcaggatggctagactgtgctaacactatggcttatgctgaacacctttccttccttcctggagtctggaatttcaatatgtttaggcagagggtgcctccatgaccagcctgcctttctaaccagcttttctgggcagaactgtcacacatattattgtgacttcattggtaggggcaaagtgtgcccatgcgatatctcctgggaagagagagcataaggaagtctgcatgtggattcttccagactccacgtgtgtctttttccctttttttttttttttttttttttgaggtggtgtctcaccctgtcgcccagggagtaacctcagctcactgcaacctctgcctcccaggttcaagtgattcttatgcctcaacctcccgagtagctgggattacaggcatgcaccactacgtctggctaatttttgtatttttagtagagatggggtttcaccatgttggccaggctggtcccgaactcctgacctcaagtgattcacccacctcagccttccaaagtgttgggattacaggcatgagccactgtgcccagcttgtgtctttttcctttatgatccttgtatccttgttaagttgctgtaataaatattggctctaagtacaactatatactaagtcccatggatccttctgtcgaatctcagaacatggggtggtctttgggacgcaggtacctaagtgaatatttaaagtagttttcagcttttttcctgatgaaaataaggtgagaagatactcctgggtgcttctggtgggagtacgaacatggaacaacccttgtcgaggacatgttgtcagtttctagcagatcatacattcattgaccctttgatccaggattcccacttctggaaatttatcctgtagctgtaacaatacctgtacaaaatgatacacataaaaggtttttggctgggcatggtggcgtgcacctgtagtcttagctacttgggaggctgaggcgggaggatcacttgagcccaggagtttgaaggtcaaggctgcagtgagccatggtcatgccactgcactccaacctgggtgacagagtgaaacccagtctttaaaaaaaaaaaaaaaaagtttttgttgtactcttcccccagcctttatttgtaatagcaaaagaccagaaactagtattgtcctgtatggggctgctgagtctctgagggtacattcacactaggaatgactgcagctagaatagaacgaagaagttgtatgtgattaatagaaagttttctcatgtgaattaaatcaaaagcagggtacagaacagttaagtctagtactgtgtgctccttttctgggcgaagggtgtgtgatgctctgaataactattaaaagtggtgacctgtagggggcaagttagacagtgaatgaaggcagaaatgagaactctgtgtatacttccttatattgctttcatttttgtgtcaattacctattaagttttttttaattgaaaatgaaaagagctgagaggaggcagtctgcttgaggtgaatcaaaatcaaggtattataagtgaaataaaaattttacatacttaattttctctttgtttacatcaggtatggcccatgagtcagccacctgtttttgtaaataaaaaaatcttggaacacagtcatgtccattgttttacatatgctccttggctgcttttttgctacggtggcagagttgagtcattgcaaaagagaccagatggcccacaaaacctaaaatattgactattctggccgtttacaaaaaagtttgatgaccctgcacctgtagtgtttagttatggcttatatcagtgttgatgccctgcctaaggatatcaggatggattggaatttgattcatctgtagtaggtaaggccaatggtagtcatttgaaagatgccattttttataaactctgagcaaactcatgttacgtgattgctggggggtcaggggagggggattttactctacaaagacacattagtctatttctaaaacctgccaagagaaattttaagaagcaatgaatgatctcttctctaaagtgtggtgcctctgagacaatctaccttcctggcaatgataccctagctaaatgttgtctttgaagatttatatcatcagaatcatggaaactggacctctccaggagaaactgaggtctgcactgtgcaagatgggatcattgtccctcgatttcagctggttttttttttttcattgcatgcctgaggtgactttacccatccttccagaacaaaatggattattctttgagatgtctggtgattatcataaaccattatcatatggttctgtgatataggaccgtaagcaaggcatttgaataatcatgattttatatgagtaatgatgatagctactgttcactgagggcctactgtgtgtcaggcagcgtgtaaggtgttttatgtgtattacatctatttaatcttcccctcaaccttcagggattgatatgatcattttcactctacaggtaaggaaaccaaggcttagagtttaagttactgaagaggtgatgttgctggtaagtggcagaggtgaaattagaacccagctctggctcagaatctatattctgttccatacttcagtgacttggaatgggaattagttacgaggtagaaccccattcagattaactaactttttttttttttttttttttggagatggagtctcgctctgttgcccaggttggagtgcaatggcacaatctcagctcactgcagcctctgcctcctgggttcaagcgattctcctgcctcagcctcccgagtagctgggactacaggcatgcaccaccgcgcccagctaatttttgtatttttagtagagatggagtttcaccagttggccaggctggtcttgaactcctgacctcaagtgatttgcccaccttggcctcccaaagtgctgggattacaggcacgagcccccatgcctggcctagattaactttttttcaaagaagtgagttcaatatagttttaatttattggtaaaatgaatcattacaaatattttaaataacgataccaataaaaacaatgcttttattcattgcatgtcctaaagactacatgtagtttcattgacgtcttccattgactttgtgaaagatatttagtattctcattttttcaaagaagctggatattaaagagcttaagtatattgcccatactcacatgtatggttcaaccaaggtccagactcccatcccctggaacctgttctgtctactgtgctacatggatttaaggcttgaattagtaacttggcagactgactgtccaagagacaaacatgctgttcaaagtatttgtcctagtccatttgtattgctataaaggaacgcctgaggctgggtaatttataagaaaagaggtttatttgactcacagttctggagactgtacaagaagcatggcaccagcatctgcatccagtaaaggcctcaggaagcttccactcatggcagaagggaaaggagctatcacatagagtgtgagagaggaagcaagagaaagaggggaaggaggtgccaggctctttttaacaaccagctctctcaggagctaacagaggaagaacccactcactcccttccactcagagaggacattaatgtattcatgagggattcacctccgtgactcaaacacctctcattgggccccatctccaatattggcatcagatttcaaaatgagatttggaggggacaaacatccaaactatagtagtgttcctatattttattattttttgagacagagtcttgctctgtcacccaggctggagcgcagtgatgccatctcggctcactgcagcctctcctttgtaggttcaagcgattctcctgcctcagcctcctgagttggtgggactacaggtgcgtgccaccatgcctggctaatttttgtatttttagtaaagatgaggtttcaccatgttggccaggctggtatcgaactcctgacctcaggtgacccgccccctcagcctcccaaaatgctgagattacagggatgagccaccacaccgggcctatattttattactctcccccccacccccaaaataacatatattaaaaatgttgcttttggccaactccctgattctgtttctattccctttttgccatcaattatggtagttatgttctaacaaattgatttttactttcttgtgctgatgactttagcaactcctatgtgaaggtaattgctagttttattgtcttaacattatgctaactgttagtgtaatccagagtaatcaatggtatccagcctggagctgattatgttcaattgtttcaccaatcatttgtctgtatttatgatacacccatgtacacatctggcctccaggcaatggcaatgactgtgtgtatgaaagaatcaagtgaatgtaatgtaaggcagtgtgtgattatgtcaaaatggatgggacagggtgttggtgccgtaagagttcacagaaagctaaagtggtaagaaaatgccttgtggaaaccctgatgattctatcttcttggcgtcagcctacttttgaattcagcctacctttctcaaattctgtttctacctggtccaagtcaccatcatctctgatgtggattactatgcttactccctatttcttccacatttatttttttaaacaattgtatttgggtataatttacatattataaaatttaccagagtatttccatcactcagtaaaattcgatgagcttatttacagttagttcctattcccatctctagtcccaggttccttgaggaaccatgcatcaagttttcatctctactgtgtgcctgttttggacattttatgtaaatgggcttacatatgttcttttgtgtctggcttttttctctgagcatggtatttttcaggttcatccatattgtaccatgtattagtactttgtttttattgccagaaaatgttccacagtgtggattgaccatattttgtttatccatgtaccagttgatggatgcttagattctgtgaacattcatgtacaagtttttgtgtggacagaagtttttatttctcttgagtatatacctaggagcagaattatcatatgataactctttaactttttgagaaacttccgtattgtttcccaaagtagctgcatcattttatattcagtgtatgagggttcctggttttccacatcctcactaacacttgttattgtcttttttcttatagccattctagtttgtgtaaagttgtatttcattccctctttcagtctctaaacaaccggcagaataattttttattgtttttttacaaatgcatatctgctatcttacaccctgactgaatctctttaatggcttccatcacatgtaaaataaagtctaaataaattctttgacctgttgtcacaggtcgggttccctaggaagtacactctgagatggagaggtttgttgaggattgctttcagggtaaacacctgtaggggcatgaaagaagcaggactgagcagagggagaagttgggctgcagcatcatcccaaccaaggtctcagcttatcctattggaaccttcagaggtgggaaggctctgcaaggttggctggacaaaggatctgggtctttatgcacccatattgaccagtcactgagtgccagatgcccctgagccagggacatgaccatgggcaagacggctttcttcagtagagtacaatcactaggaggaagtcctcagccacaagctgtcatctgtcaactttgccagcagctgggggtatcagtatatcagtccggaaggaggggaatctgggtgatatattacagcatccactatacctgagctgagagccatcacattctggtcttctcgacttatctcttaatacttcctttcttgctgtctgggctctagccacactgctttaaatttctttatgttctcaagtttcttccaaccttaggatctttgcacatactattcctattggtttatggccataccaatttaaacacctccaatcttatctagaaagtgagagcattttaaaaatcagtgtttaaatcgtatttgtaaagttgcttgaaaaaggactaggctattaggctagtgttaaagctgtcatttggagggcctttttagctttattataaattccaatattgggaattgctcatttgacatgatgtataggagccattttctaatggaccagcattaatccacttatagctgagtggccaacagattagcaagcacttccattttctataaagaaatggatattgtaaaggcctgggtgatgctgaggaggaggctcaataggatcatatttcttgtattcaaactgcaaaaatataagtaggattaatgttatgttagagtttagatggaggtattaatacattgcatttagaaataatacactgaaatctataaagaacaagagtatttgtttaaagtagactttggagagaaactcattggtaaatcttgaaatttggtctctaaataattaaaagttgtttggattttttaaaaaattgccatgtttccctcttaactgattttctgccaaattttcctgttcagcactcagaacttgggcagcagttggtgtgtaagggatgtttgcacacatataagatggtgttttttccttcatctctaatgatttcataaggtctcagttctatatgacatttggattttgaatttataataccatgtttatatatttaacatggacacatggcaagtgctgggaattaaagctaaatatagacttgttgactgaacaatcaaactatctgcttgtcttagtccattagtagtagtttcactggtatggttgatagaaagcactcaccctcctcatacgtgcatgagacgaggccaagaagtgattcctgtgtaaattggcagccatgacagtaatgatgtttgcctaaaacatgtgtcagtaataggaaagatgattaggcaaagaagaaaaagtttaaaaaaaaaaaaaaaaaaaagctggcgcagtggctcacgcctgtaatcccagcactttgggaggccgaggcgggtggatcataaggtcaggagatcgagtccatcctggctaacatggtgaaaccccgtctctactaaaaaaaatacaaaaatttagtctggcattgtggcgggcgcctgtagtaccagctacttgggaggctgaggcaggggaatggcgtgaacccagagggcggagcttgcagtgagctgagatcacgccactgcactccagcctgggcgacagagcaagactccatctcaaaaaaatgaaataaaaaataaaaaaaaagatggtcgagggagagatgcgtatttgctctgagtgttcagagatttccttacacttctctatatagataagaaaacaaatatgagcccacagtgggtataaagcaacctttttctaagaagtggactggaaataagtctggtttttggttcaaggagggcctgggaagtatccagcatgatgtccgggaacacagatcagaagtagacaactgagcctagaaatgctggggttgagtgggagatgggatggatgcatgagtaggtgggtgcgtgggtgggaattcagaatttcgtagaggaaatggaagtagggaaaagggacagcactcaggtgggaaactcagaggtttagctgtcactgggagacagccaaatgggagaggaagggaaaggtggaaaatgagaaagagagaaaggaatgcagaatggagaacggggttttggcattcttttctgtccttacttgttctacctgtgataaagaacccatcagtttggacacagtgtcccttcatggcctggcaagaatcctcagtaggacacaacctcctacgtgggagtggtgattcagaggaaacacatggtgaggataattaatttggaggttgaccatgttctgtgtgggtgtttacctctttcagaacatgtagctgaaagttcagcgtgtactattgaaaagctttcttgcaacgttgctggctgtccttggtcttgagactaaagcatcccatagaagtggtggaacgctaaagattgaaacaaaccactgaaaattgatttataaatatataactagttgtaagctgaagactaaagcatcccatagaagtggtagaatgctaaagattgaaacaaaccactgaaaattgatttataaatatataactagttgtaagctgaaatctaaataactttttaagttaaatatatatacaaaaatattagaagaaggagaattttcactctcaactcattcttgcatagaaaaataaaatctatcatctctgtatattagaagcattttgtttttggaagaggttgttggaataggttatatggaaggccatttcattcaaatgaacaaaaattacgtgagatggaaattggcaaatttatcccaagtaaatactgaaaaacctggaagcctttcaggtgctcagatttccactatagaaaagaaaacattctggccaggtgcagtggctcatgcctgtaatcccggcactttgggaggcccaggtaggtggatcacctgaggtcaggagtttgagaccagcgtggccaacctggtgaaacctcatctctactaaaaatacaaaaattagcagggcatggtgacgtatgcctgtagtcccagctactcgggaggctgaggcatgggaatcgcttgaacccaggagatggaggttgccgtgagccaagatcacaccactgcactccagcctgggcaacagagcgagactccgtctcaaaaaaaaaaaaaaagaaaaagaaaaaacgttctgaaaataaataaaaagaaacattctggcacatattagaaggtaccagagtaagagaggcaagataaatcccagctttgttggtcatactgcatatcaaaaacaatgaattgtcttttctgttttcttatttttgtttagagcatagtcagtggttcaagaactctaagccatagatagctcagacactaggaaagatgttggctgactttgagggggaaccacttgtagctatagacaaccagaaaatgctgtggtccataccatgaaatattttgtcttactgaagtttgaagatccttccagatcccggcattgatctggagaatgatattctccacatacttgggctccaagtctttgtgtccagggcttggcaattaccttattgtatccagtggaataataattttgatgctatttgttcaaataattctgaatgtactaaatggatgacattgttaaatgggacatttggctgttacaggatgtgtgtgtgattgattaaagcaaattttaactgtcagaagatgaaggcactaaaagtttttgccatctaacaagcatcagtcagatatgaaaataggtgtttccagtcacttttattaataacataatcaacatttgtgctaaactagagttctttcaaaatggaatttggcaatgccaaaatagccaaaactacaaagctaccgtgtggtactggcctaagaatggacatatagatcaataggatatcattgagagtccagaaataacccttatgtttatagtcaattgattttcatcaaggatactaagacaattcagtggggaaagaatactcttttcaataaatggtgctgggacaattggatatccacatgtaaaagaatgaagttgcacccctacctcatatacacaaaaattaactcacgatggatcatagacctagatgtaaaaactaaaattataaaactgttagaagaaaacacaggagtaaatcttcatgaccttggtttagacagtggtttcttagatgcaacaatagcaacaaaggaaaagaatagatacattggactttatcagaattaaaaactattgagctgcaaaggacaccatcaagaaagtaaaaagagaactcacagaatgggagaaaatatttaaaatcatatatctaagagacttgcatccagaatatattaaaattaataataagacaacccaaaataaaaataaaggatgtgataggcatttctctaaaaaatttacaaatatccaataagcttatgaaagatgttcaacatcattagttgggaaatgcaaattgaaaccacaatgagatatcacttcacacccactatcatggctgaaatcaaaagacagtaaatacatgttggtgaggatgtggagaaactgaaaccctcacatgctactagtgggaacgtaaaatggtacagctgctttggaaaacataatggcagtttctctaatggttaaatataggattaccatatgacccaacaattctactttcaggtatatacccaaaagaaatgaaaacttgtgttcacacaaaagcttgtacatgagtgttcatagtagtagtgttcataatagccaacaggtggaaacaactcaaatgtccatcaactgatgagtggatcaacaaaatgtggtatatcctgcaatgcagtatgattcagcaataaaaagaaaggaaatactaacacatgctacagcatcaatgacccttgaaaacattaagtaaaagactccagtcacaaaggactacatatccatgtgtccagaaaaggcaagtttatggagaaagtagaaagtttatggagaaagctcctaatggttgctttgaaccagagttgaggggtgagggtagggtagggaggaatacagattgactgctaatgggatcttttagtagggactgaagtgttcaaaattagatcgtgttaacagttgcgatcatatattttgaacaagtggaaaggggggaatatattaaaaattgtacacttaaaatggtgaattgtatggtatgtcaatgataataaaggtgtttgttaaaaaaatgagttttggcttcatcgtaatcagtgaaagaaatatgttgagtaaatattaatacattattttatgctgtgtccattgactcatattttaatctgggaaatatgcatctttaattactgccattgtgtgcttaaggctgatgtgtttgggtagcttttaaaaaattttttttcttttaaaaaattttttgtagacatgggggcctcactatgttgcccaggctgctcctgaactcctggcctcaagcaatcctcccatctcagcctcccagagcactaagttataggcatgagccaccaggtctggccacagatctttttgacaatggaaatggttgttctttgatcaggtcaataaaataattactgctggcagagggatgtgcctcctgttcaatgtggaggtcattaggggcccctgggcttcataaaccacagggggaaattgagaactacttagtgtttctatgcactgagctcctaccgacgtaatgtgttaggtgtctaaatttgcactttatgatatatttcgccaaattttctctccctggcaatgaagtgatgtttacttaacagtttcttaaaagagatggtactctgtgatccatttttatttatgataggaaaattacacttttattttaaaagccaaaggtcatagccattgcagatattctagtaattattatttgagaaatcagttctcactgaatgcaatgacaattttctaaacctagaataggtgctgtggcgtggtaccagaggagtaacatatgtggcccttgttccatgagagatcaaagtcgttttggaatgtaaaacttaaacacatgaatattttggagaaaaagaatgtcatattgtagtaaattggggggacatagacctatgacatggtgagaatcgattcattgaggtttcccacaagctgtagcccttgagttgcaccttgaagatgaatagaatagaattagaacaaatcgaaagggaggaagagtgagaaggaaactggtccaagaagcagaggtgagaaggtacatggggtagccaagagaaacatggtgggtgagcatggcagagagtccagcaatccatgaaggtcggtgatagccagcccatctattaagcaggggttccattgtagattggttgaacaactccatgaaagtgttagttctggacagataagccttggcctgtgatttgaagtgggagaacatagaagtagaaaaccaggtagattgccattacctccacccaagtctgaggccaggaggagaggctgaagaaaggggtgagggtggatttaaactactgacaaacacctcccaccaccgcccccacacatgtatatttggtgactaatcaaatgtggggaaaccctagctaactcatgtattttagagagaacatgcctacgatatgtaaaggcattctgtagatcttggatgactgctccagactctaaggtgatgtgaaaatatattatgacaaccatcatacagacatccagagggatggaagtgagataacttcccatagcgacctagctggcaaatggcagagctgaggttctgaagtcttgaaatgaagatgttggaagggtagtgatgcctttgatgggaaggacagccttgggaaggatgacggaggcatctgctggggagtgggaagatgaactcaacttatcatactgagtttaggaggatgtgaaatatttaagtgaaagtatgtgtacgtataaatgtgtatatgtgcatggatacatatgtatatgttatgtatatataaatgtgtatgtgtgggcacatgtgcgttcatgcatgtacatatgtttattcatatatgaacgtctaaagtatgcaggtatgccttatgcatgtatatatgagacatgcacatacacccatgcatgcatatatgcaatcacatactttcacttaaatattttacatcctcctaaattcaaaatattctaagctgaattcatcttctctgtccctatccgacacctcctttgtgcttcccttcatacgtgtgtatatgtgcatatatgtaaatgtgtatatacctacatacacacacacacacatttgtgtgtctgtgtggtaaatgagccattagagcttagaaaagaaatcatggcctaaaatttagaattgagagtttggagccgggaggaatcatgtgaatctattataaagggtaatgtccggggagaggagagagaggagccttttgaacattcacagatagatcacagggagaaatggagatgtagccacaacaaaggaagattcgctgggggtggaggaattccttcttacttgggcaactgctctagggagtgctagcttccaagtaggagcccaagaagtatcatctgatgtttgtcagtatttttaaaaatatatttattgcgcttctactatacaccagtcaacaagtgaggggatggggacaccaggaaatgtcaggcgcgtggtgtcagccttcccggagcccgcaggcagggaggtcgtgctaaaattgctagcatagcacactgaggtgagctgtggcttcccagtacagagcagcttagattgctgtaggtgggtggctggaggcaggggttacagaagagagcatcagagctgagcctggagggttggtggcatgctgcttagtcaggtactcctcttggaggacaggaatgaggtattgcatgtaaattccttagctaaatgaaatatgtctttaaaacttttcgtccaagtattacatgccttctcaagctatcattttaataaggtccacattgccaattgttttcatttgtggattgtacttttggtgttgtatctaaacacctttgtcaaaagccagttgactacatttctgtgggtctatttcagggcgttctattctgttctactaatccatgtacgtccatttatcactaccacactgccttgatctgcatagctttatagttgtcttgaaatccagtagtctgagtcctctttgttctttttcagaataaccttggctatcctagattcttttcctttccgataagaactttagaatcagcttgtcagtatctacaataaggcttgtcaggattttgacctgattgcattaaatctataaatgaaattgaaaatgaaaccctcattttgaacatcagttttccagttgggctttaattcctagaagacctggaattaggagaggcccaaattgagacatgatccaggccaatgaaacatcacttaacagggaaagaggggtgtgtgtgtgcggtacatgagaaagcgagatggaaatcagaaccagaaagaggctgagccaggatcaatgactggagactcggtcccacaggcatggatgttggtcccagtgtggtgtatcgctgaaaagagtcaaactctgtaaaaatatttaaagaagtttattcggagccaaatatgagtgaccacggcccaaggcacagtctcaagaggtcctgagaacatatgtctaaggtgattgggtaatagcttgattttaaacattttaggtagacaagttataggcagacatcaatcaatacatgtaagattggttcagtccagaaaggtgggacatcttgaagttggtggggcagagtccagaccataggtgcatttaaagatttcctgattggcagttggttgaaacggttaagctctgccttgaagggttgaaatcagcaaaaagaaatgatagtagttaagataaggggggttgtggaagccaaggttcttcttatatagatgaagcttccaggtagcaggcttcagagagattagatggtaaacatctcaaagtattatgggacctacaaatattctgtttggtccgttctgagatctcagttttaatgtgaatgctggtcagttgtgccttatttccaaattgggaggagggtatcatgaggcatcttggtctgaactagtttttcagatttactttggagtccccttggcaggaggggtccagtcaataggttgggggcttagaattttatttttggtttacaggaggatgggcagagctgagcacctaggcctgagggagagggacaatgtctaggcctctaataaaggcaataggctacagtagttctgcagggaccatgtgtaggatgccaagcacatggtcccttgccatcaggttcagctgcctccccttcctccctttgggcaggggaaggcaggaatgcatgggccttccagagcctagctcagcccccagctggtgcctggttccaccttggcccttaggagagctctgacactctgaatgtcactggccttgtcttaggggccttagaaaccaatgagtgataattaaggaactggagcttgtatgaagaaggtgccactttaagtgtccctgatggttttgagttgccactaaagagctcagagccctttcaaagaattcagtctgagccagatgaatcttaatttctcaccctcaaattgagatgcagtcctttggagaattaatatttagtggcatggaacacaaatcatttcttttgctggactcttaaagatgtactagattgattttgtttttatgacctttcaaaaacatcgcagtctgttttgctagctccagcctgttgaagttttagaactcatctttagcaacatcaaaggtgacagggacagcctttgagaaaggtacgcatgaagtgattgctggcatcccatagtcaagtctcaggataaagcatccatattgcctttttttttttttcttttttttcctttttactagtggagataggaaacctataaataagcatggcagaggtgtcccctctgaagattgccccttactaagtatttacagtaactggatttctttattttgtcagtttctccaggaagaaaggtgatgtcatgctccatagcaagatgagagaaggagtttagggtttgtaatttttttttaatcaaagaatttaattgcaatttaatgacgagagagaggatgtttattacacggtggtccaataaatactttctaataagtttttaagccatttgagggaaggcttgctacaacaaaattgacaatcaggcaagccgctttgaaggaagcaaatccatgaattttcagacactgttgctaagcgcagctttgctttcccctctgcttccccccccccccccccccaccaacttgctttgaaaaagcaaagcttaaaagcctctattgtgtggagggggggaatatgctaatttgcagcacatttcccatcagactctttttttggcctgtcatagctgagatatgaatgatgataaagagaggagaaggtggcattatgagggttcggggttttgttattgtgcagagagaaaggggatgaatagggtggcacctccagtcacccgtgaagcccccctgggtctgcgggctgcctggagttgagtgggttctcatgggtctgttctgcccttcccccaggcactgccacaatctactggtgactcagcggccccctcgggggaaggccgtgtgtgtaaaatgaataaacacgccagggtggggaacttctacaggggactaggaaaggggacttctacctcctagataagtcgtaacaaagaaaaagagaaatcagtgttttgacatggcagtaacaactttatgagatatcaaggttgtgattgaagggatatctagatacatatcccttcaaagctgtcatgtcgtggtttcatacaatttgggttgcgtttatttttgtcaagtcttcagcttattcagttggctctcttgccggataactggatatgtagttaaatttttatgcattaaacattgatttttatggggcaaagttagctagcatttctgaacaatgagacaacagtattggatgcttactcctgtgttcaacaatatgaaaaacatgttttccttcttgctctgagtggttgattttttttgcaggaaagcgcattgattttgttcctcgtgagcactccttagctcagttttttaaatgtatgaattttataactgaagaataatgcatgcattagcaaacagctattaagacctgcaaaagtgcttccaaattgaaatttcgcatgagtcattggaggcaatttgtatatgtcaggtacacacgtagtgtgttctgtatagttcatgaaagtgaatcgtttgaagctagaaaaggaatgttaattgcattctaggtttgtgttgagtacttagtcgatactgatggtagtatgctttaggtgtgaaacaaaaatataggatgtctttactgcaatagtaaggtgcttttaaaaataaatacataaataaataaacatagcatctttgcttctcttgactctaaattctgaacagctaaagcatgacaaatctttgcactgtaaaaatgggacgttatttatatccacagaacttcattggatagaaactagggttagagctcattcatttacctctacaaataggtagctcacttatccagatgcatgcaggtattaaatgattaagcctctgtagatttttttcttccttaaattaaggtctggagtcttctgtttggtgagtctttcactggtatggtaagcatgctttagcattagaatcacacaacccatttaagttaccattaatttttttctgattgaagttgtagcagatcaaggatatcatcgtgaaggagcagatcagccacctgtatgagtgatttaaagtgcaaactgctactggttgtaagctcaagacttgtctcattcaaactctggcaggtcacaaaacgtttaacacatcttgcttattaacctcaacaggtggtgtaagattagcatttgagagccacgtgttctgaagaccatcctgcatttgtttgagtcagctttggcatgcggctaagctgtcactctgttcatatcttcagaaactagaagctaatacattgtcttgccaagcatttttcacatctagcactgatggtgtacctctgtgttttactataaaatgtaaaagttgaatgaagttgggagttaagcagactctgaaagtgagacttcttgtcactgatttgaaactcagggatgcactagcccctcttagttcttgatgtttcaggcaaaaccctgatgatggtgccatgactggaaaaaaatcctgtatagacagctttttaaaaggtacacgtaagactagcttttatctacatgttgtatttaatacttaatctagccaggaactcttctcatctgtttactacatcctcatttaatcttcccagtcacttgaaggtggatatgactaaatattacagtgtacaggtgaggctctgaggcaccaaggagttaagaaacttgctcccattgtagagttgaagaaaaactcctagctttttcactggggtctaggacaccccccaaaaaactgaaattcctaaaagtgtatcagatagagaacttctgattatttctcaagtacccattcagatagtatttcttctaggaagccgtgcttgccacacatcctctgccccttccagcttttattggccattcttgctggcagagttaagcttgactacatacttgcccccatggttccactcatccttccatgggttgtatgagtttgggaaggctgaggaccagatggctcttgttggccatttagcaacaccaataatagttgtcccgggctagatgctgggtctatactggtgaatgaatgagacatggacccaacattcatgtactcatgcacggtttagtctgctgagatgctctgtggttctagctgccatgacagtggcaccacccccacacacagggaaacaggtaaatatttgctgaataaaaaaattaatgtttgtgtccctctgttcacatgagcccattagctcctccagtgagaagcagtctccactctttttatatccacagtacctgacacaatccttggcacatggctggtacttgataaatatccattaagtaaacagatgagttattaactgacagctaagatgtttcgaactggtatgtcttaatacgatgacaagtatccatttattcttatgtaccactgttgctgccttccactgagaagctttcctgagaatgagtgggatctcaggttgagagctagaaattgcttataatccaaggttctcccctgtgagtgggtggagcaggtgaccattatccatctactatactctgacagagacaggttgacaagctccatcccagagttttattgccttcatgaaaaaaatttttaagccctactctggcctcgcctatcaatcatcacaactactttttattgactgttccttggtcttgagcaaagcccatggcatgcattcgcttacttaattgtatggcatggtttgtcagtggcttttcattaaaaagataaattgacattaacaagcattgatttccaaagatttatgttgtcttctctattgtgctctctcttggcccagtaagattttacttttaaaaggcattttgtaaaaatacaggaatgtggcttggcaaagatgtatatctttaggaagaattatctctgcctagtgaatatattgtagatttggcatttgagccttatcctaacagaatatttgctttgctaactatacatcaggtgaaaaaagagcatgtttgggtgggaatcaagagacttgaattctttagtcctatccatcctgattacagactggaaaaggaaagatgagctggatggttttaaaatttccctcctgttttagaattctgggcacataatgtttatttcaaataagaccggataatcagaagaattgaacaaaattcttctcgttgtagtttctgggaagaaatcctaggttgtttgactccagtgccttcatcttaaatgtctgtgtggtaaaatgaaggtacatagcctgccctctcagggccctgggtgacattgtcaccttcatggcatgaaccaaagacaaagcccaatggcagagcactagaaaccttcctctctgaattgaaagccatcacttagttaccacttagaaagcacgttagcccgttctgattccacttgagtgtatgactaactgacctcaaattgtttgtacattgaaagcacagatgaacacagttttgtttttgttttttaatagggtctctctttgtcacccaggctggagtgcaatagtgtgatcatggctaactgcagccttaaactcctgggttcaagagatcctcacccctcagcctcctgaataggactacaggtgcatgccaccaagcctagctaattttttttctagtttttttttttttttttttaagagatagagtcttgctctgttgcccaggctgggctcgaactcctgggctcaagagatcctcccacctcagcctcccaaagtgctgggattacaggagtgagccacagtgcctggctgacacaatttttaaagtgtaccattatgttgctaacattgcactatcttattctcaaatatatggaaagaggttttatcaaatagcttgtgaggtcagcatagacaatagcattcacttgatctagtaatcctatctaaaaatagaaaatacatttgtttcggcaatacagtatgtcattgatgtagaaattatgaatgtacaattacaggataaattaaaactgcccagcccttaagttattatgggttaatgcgagtggatatttgtcatctgctgtatgaatgtcagcgtcatacacagatttttagggaatgctgaatgtcagacagctcacaaagaagcaaagatcataactcactataacctcaaactcctgggctcaagtgatcctcttggctcagctcttgagtagctaagactacaggcctgagccaccaagcccaactgttcctcagattttgacctttcctctgagatgatctaaatctgcagattctgtgctatgaaaacattgtgtgctttttaatgacttaaaatattattggtagattccatgagatcactgagatttactcttcattggttgccctttctacccaataggatattttatgtttgacctggcagggatcattatttcaagttgtcccaatgcttttcaattttcaaaggccactgactatttagtggattaaaggacctaaatgacttcatcctacttctaatttccatcctagaaggtaaacagatgagacaattgaacagaagattgcatttgaataatgtgaatatattttaaaatgtgtggccttgtcttagtgtgaattatcatcagcaatagaccaaatgaaatagctccaatttttgtgcagtttgtgttttataccaaccgtggaccacccaagcagctgacccaacaaggcactggttttctgtagactttagtctgagggccattgacttacatatctataagtcctgggtactttcctgaactagcaaaagcaagaatgctaacatcagaaagtaaatttcggatacttcaacaagccacatgttggtaaatttcaaatattttgtctaactgcgtgttggatagtcacgttcttctgtaaattaatggttttcagtctttggtgtatctcagaatcacctggtgtgaggctgctgggtctaggatgttcatctcccttcatttgagtaggtagcttcatgaaagtcacacttgcagtagagtcaaaggaaggtgacaactacatgctcactcagatcacctgaatccaccctgccagttagagggctggcaaatatattcctcctagtctatcaatagcctgtttttttaattgtaaaaagtacataaatatattgttttaattatatttaacaaattgtaattcccagttcatgaaaagatcttaaccaatcttaaaactctctatcagatttctgttgagggtggggaaatacattcgaatgttaagtttggtttttcaatttttatatatttgatagcactaaattttatccattttgtttctaaaatacatctccaagcagataacagagcctgaattttattataaaatatctttgtaatggttttattggtttatcttttcattttttgctcttagcaatctgaagataataatttcagtgtaactgctttgagaggttgaagggcacaggttagtaagatcaaggctgagaaaaacttaattgcaccatatactttcaaagaaacagttttgacatcttgccccaaagaacgccaggagcccagtggaatccatcccagggttggatgatgtttagaggtcagtaagagcaggtgcacagtcacttgacctgtacagtcagaggatggcttaggtcaataggagtggtgatggagctggggccatgcctgctgggttgtagggcttcctacctgatgttcttttttccttataaccatcctgctgaactggtcacttaagacctagcgtatcttagagccaggacaagctctataagcatcttgtccatggcctcgtgactggcaagtgacagagccaagattagaaccttagaaccgagacctcccaattcccatcccaaccatcagagccaaccatctcaatagatttttgagaccctaaatgtttagacagggcctgattgtaaataaaccagtttccatgtgggtcccccaagccatttgtgtgtgtgtgtgtgtgtgtgtgtgtgtgtgtgtgtgtgtgtgtgtgtactgagctcttctacatccctttactcaccatatattggaccgtaagcctgtgcctgccttgtactatagtatccatagcttatttatgaaatgtcattgagccagtaaggggaaggtaccagtgacctgccacagcagcaaaagaacagactcctatagaatcatcacatacacccttaatcccactgaaattgcattagcatgccaccacatggccacagcgacccctgccccctttcccttgcagtgacaatttactggatcaggccttgcagtgaggggccagcttctgaacttgcagagccaggtacaaaatgaaaatgcaggccagttgttcaaaaggcaggaaaaaagggccattcacgatactaaaataaaaacgtttccctttcttccagtttctctctcgatttgtcaagacatttttgtttgcaacttaatgtcattttaaattattagtgtgaatcttaccaaccatccttcaattgtacagtgcaaattttagatgcaagtttaagaccatttgccatgtatgtgggatcactgacacacaatttgtattttgtagctagtacatacgtgtattttatacgaactagaacagtggaaatgctgcacaaagttaactcaattgttttgattttacttattgatattagcacatcctcaacactccctccctgtggcttgctagtaagtaaggaagaactgaaaggaaaaggaactcggttgccctatctttccctttccttctggattattttcagtttaagtgcttggccaatacagggaagtaacaggagtaaggaaggatatggtcaggttccttggtcattcatgtctcttagaactccagtaccttctttctgcatttgaagcaagttgagcttagaacagaaagtgtgacctttaggactgttcacaccagtgcttacttagtcatagatggaacatgcttaccttttacggactttgagtccttattgaactccccatgcaccagggattcacaagaattctgagctcatgggacatcatgaatgtggtatgcaaatgaggtggcaaggagcacgtagctcctttgctcacatgcgtgcatcatggtcccgttggacttcacttgaaaacacaggttcgaagataaaatgattaagaatttcaagacagtgccatcagagtattaaaccaagcttcaggcccttctgagggcaaggctctatgcacatcacatgcccctgaagctgaccctgcttgcctgattctctgacatgaagaaagaaattccactgtgctttaaaaaaaaaaaaaaaaaaaaaattcaggacagatttaatttggacttgagtacccaggtgttagcaatatcctacagattccagaaaacaatttagtccattgttgaaagagtacccttgaaggcatgtctttttttaatcccattatcttattcatctcagttccttttatttatttgcaacttagtcaatctcaggtctcacatccaaattggacctcctcagggaggaccatgctacaatttgaggacagagcacaggtctggggtgggaccgggtggagtggggagtgcccctagaaatccaggccaggcaagggcacagaaatgaacttttcagggtcagggaaagatctagaaggacgtgaaatcaccagctagtctttcctctctctacctctccctgggacctgtatgatggtggtgggagcataaaggactttgaaaatagaaatagcattttgtaagtgtcatgtaggaggtatcatgctgaggtgctgcatgcagtgttacactcctaacaatagccttatgggggaagttctcttatgagtccttttggtagacaatgaagctgaaactcaggaaggtcacatggtatcataaggctggtaagcattggagtggggctggcagggatgctggacaaggttgcagacatgagagccttcctgagttgcggaagtgtgtggccccatgttttatcagagtttgaaggggaactccagattactaggttttggggagatagttgcaagtgatggaatagccattctgagtgaagctttctttggtggtgacctggaatctctgagttcaacagttgatgctgctgatcacctagtcacctggggccttattgagcttttgttcctgccatcattgctgcctgactcttggtttccctactctggcatccagtggcctgagtcaaggttcagctcagcttctgaccagcttcttgaccaccttggccaagtccgtgtacagctccctttggtcttcgtttcttcatccatgcaagggggatggatactgtcatgaaggcaaaaatgaaagaacttgggttaaagttattgtagtagtgctggtgctgaggagaccctcagctttgagtgttggcttctgtccattcctcctgagctactgtcacatctcatgtgggtgcagtgggtcctctggacacagcgttgagcccagtccatgggttcctcatatagccagcaccttggcctgtagcaaataaaaacaaaccacttgaaaggaactcgccaagtatccctgatagctggcactcacagtttgtttgtgtgatgactttgcgtattagtcattttcctgttgcttataacaagatacctgaaattgggaaacttacaaagaaaaaaaaattatttcttacagttacggaggctgagaagtgcaaggtccagggggctgcatctggtgagggccttcttgctgatggggacagtcccaaggtggtacagagcatcacatggcaagggggctgagtgtgctaactcaggtctctcttcctcttcttatgaaaccaccagtaccctcccatgataatccattcatccattaacacattaatttattaatcatgaatgattaattatcatgacccaatcacctcttaaaggactcacctttcagtactgccacattggggattaagtttccaacacatgaaatttggggatacgttcaaaccataacagttggtgatagttgcagaggagcatgtacaaagattagaaaaatataaccaacccctgggtttgttggatgctttctgttgctcagatcattgtgacatgagcactgtaggaggggtggatttgaaggggtctggttccccaagaggtatgtgggcatctgtgtgcctgcatgagaaagcacctttcctggcagcccgacaggtagaaactcattaatccacacattgactctatttcagggaaagatgacgtcaactcctgcatgttgaaggcagggagtggctgaaacagcatcaaggcgtgaaggcttccctgagccaccctgagttctcagaagggttcttaaagaagtcacgtcatctttatcgctacttctgctgcacttatcccataattttccaacttctgttgtgagaacttttacagcccaagtgtcctgtgatttaaccttcaatttggtaatgtctgtcttcctttagcaaagcaggctgaaggtgttgagatccgcctaccttgggaagctttccatggtggcacagtattgaaggttaggcctcatccaagttggcacaagcctttgtctccaacctgggtgggaggaaggtcaaggcagatgagtgtcctttcagtgcagggaactgccatccagggaggcttgcatttataactgagagacagcggggtgagttagaatgctaagaagggggaaatgggctgggcgtggtcacacctgtaatgccagctatttgggaggctgagacaggcagatggcttgagcccaggagtttgaggctgcagtgatccatgatcgcaccactgcaccccagcctgggtgataaagtgagacctggactctaaaagaaaaaaaaaaaaaaaaaaaaaaaggaagtcggtagttcaccaaggaggctttctaaaggagatggactttagcccgtgcctttcaggaggggacttggagctggggagatggggagacagtgcgattgggattttggcagatgatataaggcaaatcctcagcagagcaccccgggttccaccagctttgtggttgagttgcagactctttgagtgagagaataacccagccccggtggtttctgctgaaccgagaaggaactgctccagaaacatgacagggattccaataacggcggttaaacagctaacaaagaggagtctggaaggctggcccttgttcatgttggctggaacatgctgggtagatgagttaattgggggccctcacagggaatgctcattgtgccactcttaatgagagaatccaagtgccccatgggatgtaataattaggaagcatgttgtcagtagatcagctgtctgtctcctgatgtatgccttgtgtacacaggaagaaatagaagctttcctttaaaaaaaaaacaaaaaaacaaaaaacagggtctcactctgtcacccaggctggagtgcagtagtgtgatcatagctcactgcagcctccaactcctgggctcatgcgatcttctcacatcggccttctgagtaactggaactataggtgtgccccgctacacttggctatcttgtatgtatgtatgtatgtatgtgtgtatgtatgtatgtattttaatagaggcagggtctttctatgttgcccaggctggtcttgaactcctaggctcaagcaatcctctgccttgacctcccaaagtgctgggattacaggcatgagccacactgtacccggccagaaactttcttaaagctagtttaaaaaccgatcatttggtcctcatttcccattttggctttgtttcttcagtgtggctctgtcatgttggggcccattcccctcaggatgctgagacgtaaggtaagggtattccttgtctccttcactctacctccctagggtctctgtgcccctggaaactcagccctactcaggtccccgggcagtctagactcagggcaatccacctacctcactaagacccaagatcatcgtgccttccgttttgtcacccataaaacagagctgatgctttctccttcttagggctatgaggtgaactaaatcaagacacaaatgtacccttctcaatgctggacaggttgcccttttaacctctccatccctaccacctcttctaagatgaaattccttaaatcttggagttggatgacttttccttttccctctatttcctcttcctcacttccatttcagaaggagaagcatcacatcctgccacccacagctggccctcttcctctcctgtgatctccattcatcatctgtccatcttcaccggcatcttttgaaacctgtctttcagtggccgtcactgccttttcagcataagacatgtttgggcctctcttcctgactgtgtttttctccttaagctgcctgcatctttctctggccttcccctcaccaccaaatttctttagaaagtgggctgcccctgcttcctcttcttcacctcccaaccgaacttctgtagcccccctgtaaagtggtttccattccaggctttgcactgatgctggcaaggacatcggaattttccatttcagtggcctttgccaagtcctcgccttctggttgccttgactgtggggacaccccctccttcttaaaattccctcctcctctgtgacagggccctgtcctggatctttgccaacatcttgtgcgtccttcgagggtggttctcccactagagatcccctgaattaggaggcacctgaaaggttttctcctctgtaccttctgccttggcatcccacccactcctgtgatgataataggttcctctctgctggtggtaacgctcaagtcttcatttccaaactctgcttaggttgagcagctgcacagacaccacccacatggcttccaaacttgatagtccttctcactctccttatctggtgtgggtaggattgtgtcccccacccccctcaaaaaatatgttgaagtcctaactcctgctacctatgaatgtggccttatttggaagtagggtctttgtaggcataatcgagttaagatgaggtcatactcaatgagggtaggccccagtccaatgtgactggtgtccttataagaagagacacagacatacacacacagagaggacaccatgtgatgacggaggcagagatggagtgatgcatctgcaagccaaggaacgtcaggattgcaggctgaaaaaaggatcttcccctagagcattcagagaaaacatggaaaacacggccccgcccacaccttgactttggacttctcagctccagaactgtgagagaataatttctgttgtttaaagccacccactttgtggtactttgttctggcagccccagaaaaccaatacatcacccgatctctccagttccctatgggactcactatccttttagggatccaagctgaaagtctcaggatcaaccctgaatctctccctcttgccttaatacccagcttttcatttctgcctcaggtgagtatgcagtccccacctcttccctaatcaagtatggtcgccctgactctgccctcttcagtctcctatctgtccatccagctgccctctggacaattttcctaaaacagctctgattgtgtcaccatcatcgtagcacactttgtctgtttccctcctgcctccagcagttggctgcatattggaattacctggggagatttgaaagctctcatgcccaccacacaaccccatctgtcaaatcagaatctctggaggtgatgccccagcatcaatattttaaaaacttcccctatgattccagtgcacagctaggcctgagaaccatttgctgatagaatatcacaatagccagacaaagcttacggaagaaaagatagctctaaggcaatggttctcaactggggatgatattaccctccaggagacacttggcagtgtttagaaacattttaggtcatcagaaccggggtggtgctcctgggcatctactgagtagaggccagggatgctgttacacatccacaatgcccaggacagcctcacaataatgatccagccccaaacatcactagtgccaaggtggagcaatcctgatttaagagcgaggagaggagcagcaataccgaccttgactttgggacagacagatgcagtagacaccagtgctgaggaggcacatgccccctcatgccgcagtactgcctgtgctgtgcccatttggcagcccagtatgttgaaacttttcatgcagcaccagtttccatcacaggaagcctcagcctgctggtgccaaacttattctcttgctctccttttgaaaatgaggttcagtggaagctgggtgcggtggctcatgcctaatcgcagcactttgggaggctgaggcaggcggatcacttgaggtcaggagtttgagaccagcctggccaacatggcaaaaacccttctctactaaaaatacaaaagttagctgggcatggtggcacacgcctatagtcccagctatttgggaggctgtggcaggagaatcgcttgaactcgagaggcagaggttgcagggagccgagatcatgccactgcactccagcctgggaaacagatcaggactctgtcaaaaaaaaaaaaaaaaaaaccaggttcagtggaatgtttttgtcaggagagaaagggtcattacaactcaagttggcttttgccaaactcagcaatcactgttttggtggctcctgaggctcctaatgaggacactgacagtcgttaaataaacaagtgattaagttgagaagagactggctaacagaggttccatgtgtgctcattgtcatcgatgttagccagtttcatgacagtgacctgcctgggctccacctctaccattaaagagaaacactagcaatgacggcttatagttcacgtagctttaccatttataagcattttcctatacaccaaccagtttgatttgtcttttcaagtcttagctttatgcagtgtcatttcctataaaggaaagtatagcaaatatacaagaggtactcagaaaatacaagaagaaaaaaactaaaaagagtaagggatcaaaagatatttttttaaaaacccacattggatgaaaaatgagaaatttaattccggtaatggaggacaaagtctttgccaaattgataaagctttgggaaattctgattatggaaaggacccaaatgtagacagtcacattctaaattcctggctccatgctatgtgtccagtttctgtgtttttaaatgtatgcagcatttttaacatcacagaattattaatatgttgaatatcgttgctactttatataaaaagtatcttttctgtctactatttaagaattcttgctgtatttatcattctgttttctccaagtagacagagggccgatgtatttgataccagaacacatctttgattttgtcatggggagcagtgtgaaaataggagtcacaagaccaggcgtggtgactcatgtctgtaatcccagcactttgggaagccaaggtgggcagatcacctgaggtcaggagtttgagaacgtctggccaatatggtgaaaccccacctctactaaaaatacaaaaaaaaaaaaaaattagctgggcgtggtggccccacgcctgtagtcccagcgactggggaggctgaagcaggagaatcgcttgaacctgggaggcagaggttacagtgagccgagattgcaccactgtactccagcctgggcaacagcgcgagactccgtctcagaaaaagaaaaaaaaaaaataggagtcacttaacacaaacttattttaagcacaatttatttataatttagaaaaaagaaaaattgctgtgtaatggggcttgaagagaaaaagaaataaaatttgttgagggaggtgtagagcttgttctgggtattgatttcctttgaggggcaataaggaaggattatgccagggtgtttcttgttgcttaaatgttccatgaaacaccaaaattgcagaggtattagtagttagaaagaatgtggaaacatccctccttctgattaatgactgccccctgaggagtccttcaaaagccagaagaaacctaaaatatcatcctagaaagttggaaggaggcatttgacaaagtctttgctagctatgtgactaggataaggatgtgtcagtatatcattatgcaacttgatgaattctcggtcagctgaacagtcatagtcatattagcatagaatagtgattcgggtcaggcacgatggctcatgcctgtaatcccagcactttgggaggctgaggcaggcagatcacctgaggtcaggagctcaagaccagcctgaccaacgtggagaaacgccgtctctactaaaagtacaaaattagccagggtggtggtgcatgcctgtaatcccagctacttgggaggctgaggcaggagaatcacttgaacccgggaggcggaggttgcagtgagccgagatcacgccattgcactccagcctaggcaacaagagcaaaactccgtctcaaaaaagaaaaagaaaaaaaaagtgatttgatttctggcctttaataagtgcttaatgaatcttggatgaataaacgaatgaatgaacaaagaaatgaaagaatgaaccagccaactgaccaggacgatgtccatagaggtctacatgggattccctcaccttggtcttgttgtgttcaacatttctatcaatgatttgaatcccagacacacaaagcatatttactatacttggaaacagaacaaatctgggaagatcattaatgtaatagatcacagaagaaaaatccaatatgatcttgccaggttaaaaacagggccaagatgtacaggcatcagccaaagccctatgtatgagtttaacatgtcaactggaccttgggagcctcctattttgagggtgatcgtgaaagagactgggaagtgttatatccttccccatcattcagccttctcacagaagttccaaaggctatttggtggtaaaactcctttctgcttgctagtcctcatcctttttcctccttttatggtatttgacactattctacactgttaacttgatgcccttcacagaacctttctcgaatttcatgattccactttggtcttatttccctcgttttctaatttgtccttctttgtttcttttaccctctttttaaagtttttcctttacctttacatttaaaaggtagtgtaccctaagctctaatcttggcatacttgaaatctgtatctctccctggttgtttaacattgatttaaaatagattttgttgagaacccgctatgtgcccagaagtgttccaagagctcttagaatacagtggagaataagacaacaatttctgcctttaaggagcctgtattctaggaggatgggaagtgatgaacaaataagtgaataacagtgttgagtcgtggttaaagctatgatgaaactcaaatccagattaaggggaccaggaatgtcagggctgctattttagacaagagtcagggagagtcccctgagaagatggcatttgagcagaactgggcttcttgtactcccagggctgcctccacactgaagactcccggatgctgctctctggccagctcctctcttctggagccatattcctgaatgcctcttagtccctgcaggatgtcctaagagcaccttcaaccacgcttgataatctcccctaccaaacttcttccttctctttggttccccatattggttcccagcatgaccatctcctcactcacccaagctagaaactctagcctccccttcaaatcctcctccacccctactcatacagatccaatccaatgacatctgggtcctcacttcctccccgtgccatagttcaggttcacactatctcttactggtactgttgcaggagactcctgactagtttgccagcctctagtctcatactccacccaccctgtcttccacgttaccaatagaatgacctttgtaaagcacgatcagctctgctcttgagccttctatctctacctactgcctctagggctagcaaggtgttcaacctacctggttcccaacctactggctcagccatctcccttcagtccctctgtcagaaaaatcacttcctgaccctttgacagtaccctctttttcctctcatatgcccttcagtttttcctagaactctttccgttcctctttcctgcttttcccttccctaccctacccagcaggtttctaagcattactgcaatagccaactcaactctgcaaagcttttttcaaattctcttccccctccatccattttctttgttgtgatgccatagtgcttgtggcaggcaggagcaccctgttttagaagagttttctgtgtcccattagccgtgggttacctggagacaggcatcgtcacttgtgcatgtctgtgctgcttgtagatgttggcactagggaggttacttcatgcatgtttactgagctggctgcaattatacagaagacttacaaacatataagtcaaaccacgtgaaactgctgttcttcttggtcaatatcagcaatttcatatgtttattctaatctgttttgttcagtattttgtattcctgttttggctttcagaagtgttcttaccttcaaccagactgccttagagcatggggctcaaagaaatattttcagctctggaagacattttccatcctacttctacatatagaacttttctggccaaaaatggatgcatatctcagaaatgtaataagcaatactcttctctcttcctcttgacaattgtttttcaaatggtttatcataaacatcagtgagatcttgaggctgttataaagtgatataatggtaatttctagaattgtaatacattatcctagtgaaaagaaaatgatgaagttgtgaatcaggcaaaagtgatgaattgctcatttccatgtagtttttcaggtggaaagtagatgcaggtatcaactggaggatgtgtgaatattttgtctaatggttttgatctcgatatagaactagagttgttcttaaattaagaatgtctttcatattctgccttttcaccagcatcactattaaaataatattcttaagcaacagccaaaaaattattaggatctgctggttctataatcagatgtttttgctggacactttaaaaaccaataacagctaatcacagtgtcctcttttgtgctgaattgaattttgttttggttttaattctcatttgaactgctgggaaagcaagcctgttacataccaacacttgccacctttctatatttgaatggacctaagtagtctttgcaaaaaatgtctaagactgtcctatccggacacaccatagggttttcccatggaaataattatatcacaaacgaatcttttttctaaagtctgtggttttaggctgccatacttctcaatcccctgaccaggagacaataaaattggctggggccttaatttgagggaatacatatttgattgtgggcgtggtcttctaagacaatggtaaagggaaaagcaagatgtaaaattaaacgttgaaacaagctaaactggttttcaaaatcttctcgactgtaacacatctagaagttctaaatataagaaggtttgagggattatctaaaaccaaggtattaaaagatcaggtttttagaagattttgattcagtaccttatacttttttttcaaggagttgagcaagaaaccatcaaaacttaggagagtgattttaggagagggtggtctccaacttgtctttatgtttgcttccaagataagtgttaagcccaaccaactagcagactattcatgatctgggaatcctatcagtggtcatccctgtatttgacttgagtctctctaattttttatagggacggcgaaggccagttggtcagccaaatgcataaaaaatggtgcagaaattagtgatgcttggaaacatggctcataatcatgataaaggcttatatgttggtatgggttgagaatgttggcctcatggtatctgggtatgcaagaaggcaaatcattattggtatactagcctttatgttgaatatttagagagctcttgaaaacaccccttcgatttggagtgaggaattctaatgagtaaaactccatgtagaaataaccatatccgattaaaaaactattttgattttcattccaagaaactaccaaaatgtcagctcgatatacttgtgaacatgttatgcttatttttaaataaggaagggtgcctttttacaaattaggcttgagtttctcttactatcatatatattaactatagacaagggagtgggttctaataacaaattgctacattgctatcgttaaatccgtgtttgagttttcttccctctaatgtattttctccccctctttaatttatatttttaaaaagcaatgtacttatctagaaattgtatgaaagacaaatatttaagaaagtaaatagagactatgggcacgtcctttgaatatgttttgccagggtcgaggggtaaatgaaataaactgatacatcataaatggaccacacaggaaagaaagtgtcatgcctatgcaaagacatgcattctccttagagacgacatatattgctgtcgaccaacaaagtcacgtggtgggagggggctcttttctttctccttcacatcccctcctctgatgtcacaaatctattttttcctgggagaattaattagcattcattgggtgtacttggctagaagaaatgaggtggggagaaagagagagagagagagagatcgagattgagatcttaagaaagagagcaaggaggaagagcccggtggggagcaggtccttctcccccacccccctacccccaactcccactggagccgcattgagactgtaggcaccaccgggcgccgaatggctgttttctaactgggatcctcggtgacgtatggctgcctgccccttggcagctgtctttatggaccagtaggcagagcgaaattgacgctgacaagacttttgcatcttggaagggactgtaatctactgtagtgaagaacagagcctctcaatcagacgggtgtaaataagagacggaggggagtccaaaagaaaaggaagaggaggaaaaacaagtgtgtgttggggggaacagggggaaaagcatttttggtggatggtatgaagccagccatggaaactgcagccgaggaaaatactgaacaaagccaagagagaaaaggtacccagcgctctgacaatagcctgtttaaagcttttcactggggggtgcttaaaaagggttagctgggttttgtctctcttttaaaatggctctgagacaatccctatggcatggtcttgctttcagggttgatttttttcctgtgggctgatgttaagttaatagagcagcctttcttcaatccattcctgttccaaatctttctaccgacgtgatatttcatagagggatgtctatagtttgtcaccttgggctgatgcattggggaaactgtctttttttattaatataattaatcgtaacttaggtcttgtgtcctgcatgttatattccaggaacgtggaatgtgtagttttctgctaatgctgaggaggaactggaggggcatgcatgttaattctgctttggttccgctaatgctgtagtgatttgggcattctctaattttcttattctaatatgattgctctttcttgtatcaggccctgactacgacatgtaataatcatttacagttggagcttcagagaggggacatcagctctgtcacccagtgctgatggaaaggcagggcgggggatcttctgctaattatgacttggagactggggggaagaaaattgataaaggtcctatttcttaaagagaatcttagaacgtaccacaattttcatatacagaatggttttttggagaataaagtgtttttgcagtaagaaaatggcagaaaggaactaaaattaatctcttttttctaaataatgactgatttcaagtttgatgtcccatagaatcggctcagccactgttaggttaatggatctcactgcattgtaattttccctcactcaaagtcatagactgtcataaatgcccaaaaacatattctgtaaccgcagtggctctaatataaaaagccatcatgctaaggttatttctcacagcccttgcgtccactgatagtcactaaagagtaattcgccagtacggggacaaaacttcgttttatttataaagatacaggctgaaccatatgaaattgctgatagtcaaccattttaaacctacaaaaacggcaattacatgtacttcagcttcacagtatgctggggtaaagactgcttgtttttatataaaatttctttggtacacaataatattttatcctaaacagagcaattttactttttaaattaatttttttaggtatcacacaatacacataacataaaatttaccattttaagtatacgattcagtggcattaagtacatagcaccttaattttaaaatcgtttgtttagttcaatcctcttaccaaatctacacctccccaccaaaaacccagcctgtattttcttgtgtgtctttaaaaaaaaaaaatcttcatcaatgaccaaatagctataagagaagctcttgggaatatttatcaagatgaagaagtgagatcaaagttttttccatgatgactagagactaagttgattgcatgttgtcggggtatgataatgtaatagcattgtcccaaggaagcctatcacgattttatcctaaaatgatgattttacttagtacatacttttaatttttattaatgtggtattcaaccatggcagataaaaccgttttggtctttgcaaaaaaatcccttttttaaatttctctctgaaaggaagcaaaggtcatataaccaatataaaatcattactacacaactgtgtatcttatcacttagtcttatggactgctattattttatgtcaattaaatcttatttaataacagatctacaggttgctagtacatccctgacaacccgtatatgaaaagtcattagttgtgattttagagacaaaattagaagcaaaagataatttgtgaaggaactttaaaaattacctaaatgtataaacactagctgcttgttaaataattcaaaaatatcacactaccagaagctagtgtgacatgtatggtacatgcttgaataagaatacaagccaggggatttgtttttcctgatctacagcaagaggggttgtgattgttgtgtgacccaccataattgttgatctggagggtggcttatctaatctgcatttagatgaacaagttcatatgctggctacacaaaatcaaagcccacacaagacactttgtagtttcccaatttgctcacccatcatcattaaggtacacataggataaaatgatagccacaaatgtttctgcgtgattgtcacatcagtattccttcagatttaactttaagtttattaaaaaattatttttccattgaaattaacatttgaaaacttgacataattatttatagaatgtgttatataattcttgagctggtggatccgttttttatgtttttcttttaagcctttcagcaaaggattttattcattaaatttaatcctgtaaattttgtcactttacgcagagttttttatgcacatatatattttttttcctgtgtttctcctttcccatctgttttcagtggttggtgatggagtgatgcctgtctcttaatttggggcattattgcccaatggctaatacccaatagcatgtgaattaatatctttggataattattgcagtgtctattaagaactaagaatgtaaattaaacttagctttataaattgaccttgcttttctagttgggatctttcctgggagtttcagcgggacaacacaacccagctattgtgattcactaactcctacaaagagagctctttctttaaacttaatcacaatgactttgtttctactttagacaaaattaatccatgtccttaaaaaaggaaagcatttgtgttttttcagtctgatagttttcatcacagcatgctaccagataccaaaattcacaagagtatttagtagatatttagggatttttaaggaaaacaagcagattttcttagatggatgtaagaaatgccaaattattacaaatgatagtttttaaattaaaagcattaaagtgtgaagattgagtaagcagattcactgacatggaataagcagaggaaatgaataagacagaatcaaaagaaatagatcatggaacccaataataaaaagatggagagtcggtttccattgatttcagtggagtattacttgttgtcatttcatttgtgaaaataaatgcatctgaaattgctgagagtggataatcactgagtagaaaaacaattgaatcataacaactttgtatgctctattatgggggaaaaatctatctgttatgaaaattattttcattatatgtaggtaattgaattctactgaaacaattatagtcaggttagttaacttcctatgaatcgttgctgaaataaattacaggcatcaaattaaattcctaaccacacaggaagaaaaatatagtgaatgggaaacaatgtgtaatttaaaataaattacaggatatagtcaaagtaagaaatgaatttaaattattgacttccttaaaaaattaatacatctattttaatctttttgatcaaatagatataatttcttatttttttttttaatttagcaaaatgtatgcacttttggctctcatttttcgtttaggaagaaaagcactcctctagaatatacgacttgtgtgattaaaaacccaaagggacacataacacacgtcacactattcctgatgatctgcgaattattgcattttgaaatttgtgttgacattttctaacttggctatataaatatggtacagaggaagttttagatgcagttattatctgtaagaatttgccaaggtggacatctgaagagttggtgtctggggaataggctgtagagaaaagtggctggccagatggtgcggaacatatgtggtaggtatgatacagcttcctttgattttttttttttttttttagaacatttaaatgtggaaaagatctcaacgagccatttggtacatcttctacttttacattattaattccattaggatttttttaaagacttggccttgctatttcgttagaaaaagaattctgggccatttctggaaatttagatttgccttccctgaaattgagtgtaaaccctgaattaagattattatgattttcaagatcacatttctctgttatttggaagtacagggtcaatttagactaaatgatcttaataaagtgactttgtcttgatgtatctgagaacatgcaaaataaccagtgtccccatgacttaaacttcccctctctgtgactgtgatggattggattggattgttacaaagacactctcgcttttttctcctttggaccaaatgtacatacatgggagatagttggccaggagtagggatggccatggaacggaggaagaaagtgaccacaccgactgtttttaagagaggaaggttacaatcccagtttcacaaatgtgctttgttgttcattcatttattcgtttaatggtgttctctgccgggtgtggtggctcacgcctgtaatcccaccactttgggaggccgaggcgggcggatcaagaggtcaagagatcgagaccatcctggctaacatggtgaaacccagtctctactaaaaatacaaaaacaaaattagccgggcgtggtggtgtgtgcctgtaatcccagctactcaggaggctgaggcaggagaatggcgtgaacccgagaggcggaggttgcagtgagccgagatagtgccgctgcactccagcctgggtgacagagcgagactctgtctcaaaaaaaaaaaaaaaaaaagaaagaaaagaaaagtgttctcctttgaaatgtcattcttcctctgtcccttcagctcacgttacaggagtacaggggtgctaagtcatcgtagggaccattaggggtagtataatcttggttttaataataattttgctgattggtggcagattaaatagcagacaaaatgccatagacgagaattttgatccttagccagctgagtgatatttctcgtcaaagagtgtataagagaaaatgtaataatttcctatttgataagctgattttatcaattgcattaactgctttatgtagccaagccttattatgctgtatttaaaatcaagggtcaacacactttttccgtaaaggtcagatagtaagtattttaggtgctgcagaccactcagtgtctgttgtaactattcaaatctgccactatagcatgaaagcagccctagatagtatgtaaacaaatgggtgcaactgtgttccaataaaaccttataaataaaaacagatggctataatttaccaacctttactatatttatagcattgttatggcattccttaatattttaaataatagctaaaaatgaaagataacaaatatagctttgaaagaccttgctcagtgaatatggtctttcttggaagctcagtgtttgtcacttagttgcttccggtgataatttcctaggtgctaagaagcatgacagtctgaagttcatttgttcagccttctcgctaaattacattaaataagtaaatggggaaaaataaacaaggcattgttttgctttcctttttgcaatttccccttgtttcatgcccacctttggcaatgaccactcacagctgtgtctgtcttcataagccaccactggtcacctcatctctatcttcactctcttagggggaacattttgcagttttccctctgcagggcataaaccattttcccatttcttgccaggtgcccagaatcaagacattttaaaagaccttttgagccaaggcatcctcttggaatcctgtgactgccttttaggtgttgggatcctgtccttgggattaaaatgtatactgtgttttttgaaattttataaataactttatatttaatgcctttatttaaatttggctcaaaaatataaaatagaagtgatttttcttttctttcatatctaaagatttactgttgtaaaaaggcccctccagaagtgtaagtccaggggatttggaacacatccatccagttgccgatcccatcggtgtgtcttctggatctattctttttttttttttttttttttaaatcctgaattaagggtcttaggcatggctgccatgtttttctcagaaaacacgttaacattgagcagtccatggtttttcattgtcattgcctagcagcctatgcttgcttgcctgaacatctggagacttaccccatccatatgaggagatgagcacagagcatggatgaatcttctgcagagataccctgaattgcatggcctggcttgggtaaaagtcagcatggtgggggatctagaggtccatttctggtccacagggtcccagggtgctcccttcctttcaaccaaatatttattcagccagcgtttattgggcacctgtgtgctgagtatgtagagacaaattttttaaaaggataaaaatttccagatcaaaagtgatagaactacttagaatcctcttgcttaggggtctatgtggagggctcatagccccctttaccaagaggaaatcagatcataccatgaagtgccttgaccttctgttttttttctgtcagccccactgggttttcttgcctttggagaatgtagcaacatctatttctgagagagaatctcctgaacagtaaagcaaaaatctaaatctgttttttgggggttttttttctttctttttttgagacagagtctcaccctgtcacccaggctggagtgcagtggcatgatctcagctcactgcaacctccacctcccaggttaaagtgattctcctgcctcagcctccagagtagctgggactataggcgtatgccaccatgcccggctaattttttttttttttttcctgagatggagttttactctttttttttttttttttgcccaggctggaatgcagtggcgcgatctcaactcactgcaacctccatctcctgggttcaagcaattcttctgcctcagcctcctgggtagctgggactacaagtgtgcgccactatgcccagctaatttttgtatttttagtagagacagggtttcaccatgttggccaggctggtatcaaactcctcacctcaggtgatctggctgcctcggcctcccagagtgttggaattacaggcatgagccaccacacctggccaattttttaatttttattttttatatattttttttatttttagtacagacagagtttcaccatgttggccaggctggttttgaactcctgacctcaagtgatccgcccgccttggcctcccaaagtgctgggattacaggtgtgagccaccgcacccagcccacaaaaatctcaatctaaggaagactgaaagttaagaaattttaagaagcctgagataacatcagtagcttaggacctggaccgtttctttaggagacacagaagcacaactcaactgcaaatgcacctcagaaaaactctcattgggttaactgttgcctcagcagaagagtagaaaattgcaatacatgcagaggtcacagtaggatgtatggtggtttccaaagtgtgccctcttgagtgaaattgctaaggttcacattcaggcttctctacctcctggctgaaagatcttgggcaagtgatcattaccttctccttgcccttgggttgttcccttgtaaaaatggaataataatagtacctatttcagagggtggttgtgacaaatgtaataagtaccacatgctgagtgcagtgcatagtacatcataagcactccataaatttttgctgtcatcatcattgaccacaaaaatagtttcattgtgcagttctgatcttatcccagcatcttttctgtacctccctaccctggttttaaatgagttatgtataccttaccttgaagtcaaaaagattttttctaaaacattctagaaaagcaggtttctgcttccaaacttgaaataccttacaagttttcagagattgtggagagtggagttgggattttataaaggctttgtgaggttttacttgcctcacactgtggctttagtaggttcttctcctcagagacctgagctgccagatggtgcattatgacctgatcttctgatggaatcattacccacatcaatggcacaatttttttttaatccttaaatatttgtggtgccccagaggatataaccccttattaggttttatgggattctcggagataaactggccatagcgaccttatgatctctttgagatttcaagattgtaattcaactaacttttatgagaagcctactctgtgccaggcaaattggtaggtatttttctttgcaatcccctaagaagtgggaaatattgtatcatattaccagatagagacctgagtcctcagggagtgccagctgtcaccatgtgtgtaattaagcagtggttcgagcccaagaccagtagccctttctgtatagcacatgggagaaaattggaacaggatttaatccagaacattctagactctgacgttctgagtttaagataaggtgacagacaatactgcagacgtcaatgggaggacaagcatttcatccaagaaacagcagaccattaggttgtttgccaggttttctggactagagctgggtacccttacagagagggagcctgcgttcacctttgctagtgcagctggcaataattatagtgctctgttagtgctctgttggtctgaaaaggaaacagaaagaaaaatattattgtgaggagccaaattttcactataaatagtatcttccccaaatgagcattttaagaagcaggatatggtgtgtgttgggggaaagatgtagaaaataaagatcattttggtgatttacataaacttcaatttagaaacggaggacattctcaatggatcatgctggtactgaagggttgcatttcaatagcatattttttaaactccccatttcctttctatggtaaagaataaataaaaatgctgatatagaatctttgctggagatagagacactgactctttgccacctgaaattggcagtgaacagcagagctgaaatggaaattggcaggtaccactggatgtacccaggctcaaagaaccaccagtaccatcccgtgccaaccctgggggacagggctagccccttgagcagtccaggtaaatacagccttggggtgaattctaatagcaagtcaactgttatctttaatattatttgtaatggctcttgcagcttggtgatattttatgttttgcttggtgcattaatttgttcacacgggcatgggtggaattcgccctataaacattttttaatcatctttctttttctctctccctctccattccaccccatctttctccactttcttctccttcttccctcttccctctttcaccttcaatcacttcgtcttctcaaagggaacaatgtacagtgagatatgcctttggttaaccatgaaatttccaatgcctgaaccaataatgggggaggggggccacccacatcccccatgtggccaagaactgggccagggccttcaaggagccttggccctgagagtactgtgagtgtccccaaatgtcttcccagccctgctgctctgcaccaccctctcacctcagtcattgcctttgagaaagagaaatcaaagctgtgaaagtaggattggataaccatgtacccgattcccatcaggtaggttcagtgggtccggtttccattttccttgctcgtgaggaacattggccattcagaaccgctaggtgctggatctgggtgaggtgtgcgacagctgatttggggacctagaaggggcaaaaggtgaagcagtatgaacatccaacctcccacgttcccaaaaccaacacaagttgtaatgcccagctcagttagctaaaactcagtgattttgccagtgtacaaccatagttcaaactacataaaatgcagacataaagggctggtggtaggtcggataaacacagtaagaggcttaaagtatttctgtgattttgcatcaatccataacatttctcccaaatgcttgctaactttttcaggagtaaatgtagcatggtacagctccagaaagggcaatcccaaggtacaatgtaagttacccattgaattacaaagtcataaaatccatgattaataaaaccttttcctttaaaatctaaattgtgttgtcaggttaattaaaatgaaatctgacgttggatttagttctgtcttgggttatgcattccttcatctgtcctatggctatcaggtgttggttctgtgtgtgcctgtgcagcgctggctaaatagggtgagcatgaggtgacatcagccatccattctcatggatcctataaagaatatggagggttctggaatcttgatttaaaaaaagtcattagacgtgatatatccatacaatagctactattcagcaataaaaaggaatgaaatatttgtgcatgctacaacatggatgaacctcaaaaacatcatgctaagtgaaagaagccagacacaagagaccaaatgttctaccactctgtttatgttaaatttacagaattggtgagataagaagtaggttaatggttgccagaggctgagagaagggaggattggggagcaactacagatgggtacaagggatcatttttgctgtgatgaaaatgttctaaaattagattgtggcgatggtcacacaacgctgtacatttactcaaagtcattgaattgtatacttgaaacaggtgaattttatagaatataaattatatctcagtaaagctgcttttgaaaaaaaaagcagcaaaaaaaaccatgagatgtgcataattcaagggtggggagcggggaaaggggtattttttaacataacaagaagcccccaagttatcagaaacaactgcttgagggaggagtccctcttcatcttaagagtctttaagagtcttcattttaagagtgttgaatgacatcaggccagctggaaacccagaaaaatacttattcttttctgtattttagttcactaaactggtaaagaataaacacaatatcttattgggggggaataaaagaaacctctatcaattgctcttgaagagttttctccacttgttgagcagttccctgtaaaagcattgcaataatatttgtgtgcttttgatcctacggtgaaacaccagaatctgggcattcatagcagcagtggcagctgagaagaaaaatacgaggctccattttctgtttttctgaaactgatttctttcagaattccaaagaatttgggtttccaaaagataacatagtgcatacatcatgtactgcatgataccaccactgagtgtctctgcagatctaactcattaatctttctggagagcccaagactataaacaactccttgtccattcaggtgagattttggcaccaaggaagaggagatcagaacaggttttgctgccagatgagttaggggagaaaaaaaaattacttttcaagttttttggaattccataatgatatgatgaaagattgtggaagtctaatagtatcaggttgctggtgatactactgcaagcgagaattccatgaactaacaggttcttgcctgagggggagaaacaaaatcactgaatttgatttaaagaattatcttcccagatcctgaaacaatctccacctacacatagttttaactttttgtgtgcattgatggaaataattggaaaaaagatgcctccacggggactgttaatgtctggagctgtctgcagagaccttatgtgtgatagtgtaaagcctacagcgcaggccacagagtgaagggacccactctagccatgccatcgcctttccagacacttacagattttgttgggtcctaaatcaatgccgttgccattctatacttagatctccaaccccaaccagatggtatgaggcaaaaaatagggaattctgtatggctcttttttttttctttttttttttattaatttttttgcagagttgtcagcctttttccatgggggaaaaagaggttttgatacaggctgaccaggaaatttttgccaaaggaaaatgcctctcccactcatgcagttactgtagcagagactgcccttctccaggaacttccttattccccattggaaaggtcatggcggttccagggtccttttcatggttttctttttcttgctactacttcccagtagaattccatctttaggggttagatagttattctttccttatctctttttccttttcaatttttagctgcgttggacatgtagtgtccacatcttttctgccttcaggagatgaaatgatgtatgaccacatgggctacccccgccccccgccccccccgccgtccatgatgctgccctaggggcctggcctgaggtggtggtctgagatgcaggcaagcgatgaagcagggagtagttcatgctaagtctccagtcagtggcatattgtgcttaacattggagggagcacttccagactgttgtagattgtgttacacaggctccagaggatagcctaagacaatctagattctctattccaagtgcgggctgtggaccagcagaatcaacacctccaggagctcgttagaaatgcagagtcccaggtcccacccagccccactgaatcagaatctgcattttcataagacttccaggtagttcctatgcacattaaagcttgagaagcagtaattaagagcaaggtccaagagcaagaagggagaagacaggaaggaattgattatgtgaatttaccctcaagagatctagaaatctttatctttggaaaagataaagaattgctcaaggtattcatcctttcttctttccgtttctatttaggaagaggcatgtctaagcaatgccaaggcagtcattaatctgttgagtcctggctggtttgaaaaacagtgaccttgcttctcttacctgcttgtctcatgagggggtttggggaaggggcagtgaaggtgagaaaggtttgtttctttgtggcaaagtgagggccagaggagaaagtagttgatggaagcttgggagaaattctcaaatgtctctcatctccctctttaatataatccaatgacatgcaagatgccgtgactaaatataggctgccatttttagtggactaagaatggttctttatatacagttaaatctgtaattcagaattcagtctcacaaggaaggagtagaataaccacccacttcacatatcaccaatttccgcctctcaaatccaaaatgctctgatgtttcagttaaaatggccacagataattccagaagtcgggacaaagagcacaccctctacatagggactgtcacagaggatgtcgggagaggagggccctctggagtgttggtatttagcaagaagcccaagtgttgtgatttgcaccacagagaatggattcctgagtcgccacggggttgtggggtgggggcgggtagcagactgacggagggcccagcactgctgttaactcatgttgcaccttgtctgcccagatgtaaccacaggctggctcctgggaactgcagactttatcccttggcccccttctaggctgagcctgggacttctctctcactgatctgctttgtagagggacacctgtagctataagtcctgggaaatgctactggatttttgtcattgttctttagtgtcactctttcctaacctaaggttgtaaggccactaagttcgaggtcttctcccaaaccacttgaaatgtattttaagggggaagaaaaacccttaatccttctgcgtgtaccattccacctctggccatagttgggtgtcgaccataactgacagtctggtcgtgccgtgtgggttctgctggtggtatcattctgtccccagaggctggttgcagaagcttttgtagcttatccagcctaagccagtggatgctctcagtctgtctgatgccttccagttactcaagatatttctgattacatagaggtaaatggtgaacacagtggaagcacgttgtagctcaggctcatgccgtaaagtccctgagatttttagagtactttgccttttgttttctgaaatgtatcaattctttcattttcaaagcacctgcagttttcaccaaaaaagtgccatatacagcagttaacgattttatagtttatttactgactgctatggcagtctttatatatatatatataaaataatttatatatagctgtaaacaaatacttatcgatataagtaatttcttgattgtttttgaacgttccattgtttatgcgctatattgttagtctgtgattagcacctaattatgtaacaatggcttactgtgtgtgtgacatatcagctccctttgtcttttggtcttacctttgcttctcaccttagagtaggcagacagagaaagcagagataaaaagcagatcgatgagtattgagtgttgatctcgggctttctgtcagacatgtctgattgtagggacactgacttggattattcaagactgagtacttctcggtctttgagaagtagtgtcatctggtctttgctgcctttgaaatgtcccttatgttatatgttttcatataaatctaactagagtccattaaaattaattttgctttgaaatcttttgccacccttagaggtaactggaattactctgaagtagctggggagtagctgaaatcagccacttaggtcttcccacctcctcaggctgtgtccttttgggtgccgaagttcactcccaaataagccacatataccctcaccccctgagtgcgtccacgtctatgaaaagcttatatgaattggcttttgtactaaacggaatgctctgggtgtcagagtcatttaggtgggacaaatcttcctctgaagatcatcatgcttgtattttctggagacttccatgaacaatgctttcacccccaaggaccagctctaggggtgaaatgtcaggctggtaggagaggtaatgggatcgaaacaagacttcctgtgtcttgagaaaaccttgtttatattcatgtgctgtttcccagtggcaataaatcgagattcctgtgaggatttgacagacgaggctggtgatgccacccactgtttttgtaaagaaaatgttatcggaaccagccaggcccatttgattgtctgtggctgctttcgtactccactagcagagttgagaagctgcaactatacaccctgcaaagccaaaaatatttgccatctggtcctttacagaaaacaattgccaatccttgaattagaatttgcaaagtgtgtcaaaatgcaatactctatctactgatgttaggcaacacctaaaaactttgctcggcactcagtttcctaaaatcttctccatcaaacatccctcatcctctgccctccaggccccagaatccttgttctctgtggggaatagggactccctgctcacaggctgtcaactaaggctcagcccttcttcagagaatttcttggtactttctagaagctcagcccctctggcctctttcaggtccttctctgagttttcccataataaaccaagtcccgttaagtggatactgtgagctactttcatctagtgttctattcagtgcactttagcaagttttatttcctgtgtatagaaaagatatttgtggtttactaaatgtagtgctggggatcatttctttctttttttttttttttaagtatgaggttccaatgccctgaatcggaatcgctaagaatgctggttaaaaattcagatttcatatgggcatggtggcacacatctgtagtcccagctacttgggaggctaaggcaggaggatcacttgagcccagaagttcaagttcagcctgggcaacatagcaagacccgatctcttaaaaagaaaaatcagattcccagtccccacctaccctctctgcgatgggtcccagaaatttggcccattttaagaagctcccccaggcaattctaatgcacagtaaagtttgaccaccactgctatatacatagaaggccataacccctcattataacatctttggtaaagtatcgtttcagttcagcctgtgtatgtatatgttcaacctgtatatgtatttacagttaagatgctcaaagtcaaacctccacatccttagcagacagtactattgaatttgaagtaaattcctcttgaagtaatgtttcgctattgccactatatctttgtgtataagagccaatgcaaaaacattagattgtaaagctgtaggcaaacatcagagctcaggctgtgtgttagttatcaattgttgcataacaaattcctccaaaacatagtggctagaaacaaaaatgtatattatctcggcttccttaggtcaggagtctggactcagcttagctgtctcagaaactctaatgagatttcagtctcatctgaaggcctaactggggaaggatccacttccaagctcattcatgtggctactggcaggacttggttactttgggactgagggcctcagttcctcacaagctgctggcctaaaacctcccttgatttttttccatgtgtgggctctccatagctacttcatggcatagcagatgacttcatcagatagagagagcaagtgagcaggtaagagaatgtgccagccagagagacaatgctaacaggacagaagtcaattttttgaaacctaatcagggaagtgacatctcatcacttttgccatattctagtcctaagaagtaagctactaggtccagcccacattcaggggaaggaattacacaaggccatgaatgtaggtttgtggggatcattgggggtggtgtcttagctgcctgccacagtctgtataaacatttcacagtgcaaatgcatcctccatctccttaatgatcataacctcttcactttctcaaagcctcacctctcagagaatgtatcactgggttaaatgagtacctggcaggtgtttgacggccttcctgaggtactagactctaagctctctgtgagcagaggtcttcatgccttgctccctgctttggcctggctcgggacctaggaccaagaaagcagtcgttcatagtgttgaatgatgatcactttatttttagcactcatgatgtgtgactctatatgaaattgtctaattttagtgtccattgtgtacatggctcatttcctgggccaggctggtcaagaccttgcactctgagagttgcataggagctcagcaggtgtttgttaagtaagttcagattggctactcgttgtcaggagtttgagaccagtctggccaacatggtgaaaccccatctctactaaaaaaaaaataataataataataatacaaaaatcagccgggagtattggtgggtgcctgtagtcccagctacttgggaggctgagacaggagaatcacttgaacccaggaggcagaggttgcagtgagcagagattgtgccactgcactccagcctggacaacagagcaaggctctgtgtcaaaaaaaaaaaaaaaaaaaaaaaaaaaaaaaaaaaaaaaattaggttggctaatcgaggtttctagaatcatctgcatgtaaatagggttaactttgtgggatgattttcttgaataagaagttctcagcctgagcttcacagtagaaccctggaaggaaggggaggtcttttaaaattccgaagccacatccagaccaagtcattcagaatcttgagggtgggacccaggcatcagcgttcttgaaagctcccccaccaggtgatcctctgtgcagccaaggttgagaaccactgtggtagaccagtgtttcccaatccgggggagtttctgcctttcaggagatgccttttaggcatctagtggtgtagaggtcagggatgctgctaaacatcctacagtgcacaggacggcccctccccaacaaaggatggcccatgccaatagtaccaagagttgagaacccctgggctaggtcctacgctttgagtcaggaaattggttctaagtgaagcagtagaagtccatggggtagctttgtcccagatgttaagcttattgcaggcatggatagcttgataagtctggaatattatatacaatctatgtatcggtgtttcctgaagagaaactcactcttttaaaaggcacgcagtgcataaaccaatacatttaaacctacatatatttatttatgcaacataataccatacacgtgtgtttgcatatagcacgtgctataaacaccctatgcatacagagatgtatgcagggcatatgagtgtgttattgtggttagaggaacaggtatgtcttcctcagcgccctttattttccttccccctcactgtagcctcctgccctctgcttgtctagtaaaagccctaaggcctccctgacccttgctgtccttaccctcagtccagaggatgcctctgctgtgccttgctgcctggagggttcccatcacccaggttaatgtggctcttggctttcaccaccaatccttagtttctcaaaggggttcacaacctttttaaattactagtgtgtcttgtagaaattgaacttcacaaacaggtcttctgaaaacgctttcttgtggtgtaattgatatgcatatggtgcatctctttaaagtgtctgacaagccttgacatacgtgtgtgctcatgaaagcagcaccatgagcagcatggcaatgtggctgccactcccaactctttccatccttcctatgctcccactctccccaagcaaccactgatctgctctccttctctgtggattagtttgcattttctagaatggcccttgtgaagatgtgttcacataaattctctcaccctttctcacccgaatagaaaatgttgcatgatgttgattgcttaatagctccacagctttgtccaatttttatccttcctgcttttactgaagatgtcctgcccccatgaataaacctcagaagacccattctgccaccgcctaccactgaagagttgagcttgcacccactccagtccagcccacacaccagtgccagattcatctcttaaaagcacatcctgagtcacgcctcgcctgctcacaaaccttccctctcttccccttgctgcaaagtgaagcacagaggcttgaggctggcttggacatcttccatggaccaggcaatggggggacctaccttcctgacttctccccaccattaccctggtgtccttgatgaactcggctacaccctgaacgctccccacgtctcccacatcacatgggtcctgctgtccttcctttgtgcttttcatggaatccttctgttcttcaaggcctcttcacctcctgccatccataaacctttgccttagcaacccacaccaaccaaagagatctgtccctacctcactcccccatatccctgtgtcagcactctctttattctactttagtgataccttatgtgtctgtgtgtcttaccgcccccctcaccccacccacaaggatcaaagccaggagggcacacttgcagaccccaccacagtggcttgcacatggcaggtattggacagacactcattgaatggaatggaatccaggaaagtagagacactgtcgcccagatggtcaaggaaactgattgctgctaaagctcaaaattgcagatattaaatacttctcaaatgtctggagtagcctccagattgctgtgctcttaaaatctgtgtcatctggacttagagctggcttcccctactctccattgatctccatgattccttgctgtcccactttaccaggctaaaagcctttgggaaaaccaaagccagttcccacaaaaggcaaaggaagagactaacaagtatctggttgttggatttgtttattcccagtcatggaagcgtatcattgcttttattgacttgcttatcttctgctagtaccatattgcaaatgttagaggctcatctattttaagacttccatagtgttttcacaaaaatgaaaatcccttattaaacagattttaggacaagcttctaaaaggacctgccaaaaagtgatttcctttctatcattagaaatagtttccacattcttatcgttatgtagttgaacttttatgtccaggactgcatgaaagacgtgagaactgagaagcaacctatatttgatttcgcactttgttcttggacaggaagcccctgtcaactgacttcacatctttttaatgcactatattagtggttcacagaactttctgggtgttaggtccctttatgtgcttagaaacagttgaccccaaaacgcctttgctcttctgagttgtgcctataaatattttctatattagaagctagaactgagggctgggcatggtggctcatgcctgtaatcccagcactttgggaggccaacgtgggcagatcacctgaggtcgggagttcaaaaccagcctggtcaacatggcgaaaccccatctctactgaaaatacaaaaattagccaggccagccaggcacagtggctcacacctgtaatctcagcactttgggaggccgaggtgggcggatcacctgaggtcaggagttcgagaccagcctgaccaacatggagaaaccccgtctctactaaaaatacaaaattagccagcatggtggtgcgtgcctgtaatgccagctacttgggaggctgaggcaggagaatcgcttgaacctgggaggctgaggttgcagtgagccgagctggcaccattgcactccagcctgggcaacaagagtgaaactccatctcaaaataaaataaaataataaataaataagccaggcatggcagcatgtgccttaattccagctatttgggaggctgaggcaggagaatcacttgaacccgggaggcagaggttgcactgaactgagatcgtgccactgcactccagcctttgagttttttaagatggagcgagactccatcttaaaaaaaaaaaaaaaaaaagaaaagaaattagaactgagaagtttattacttaataataaacttagtcatttaaaataatagcaaatccattatatgtcaacctaagtaatgtttaggaaagataacgattttcaaaaagaaaataatattttagtgtgaggaataggactgttttacatttttgcaaatctctttaatatctggcttaacagtagacagctggactcttacatctgcctctgcattcattcagaggcatcttggggtatcttgctttggttgaagtatatgaagaaaactcaaatttctcacaggtatgtgcttggagaatggaggagtgttttaatggcctttgcagataattatgaaattcttccttgatactacaccaaaattcagcagctagtggtttcttaaagactacttgtaatgtggaatctgaaaccatattgatgatatttttgtactcttttccactaaaattcattgcttgatcttgcactttgattgactcttatattcaagaattattttcccttggctatttggaaaatattggttctctgagttgtgcagatcttccagacgttgacacatttaattaaaccatgtcaaaaaaatttcattggttaatgtcaccaccaatttcatcaagaagtctggtaagtatttggaagctgtcagtctcactatggcaggtacaagttttccaaaattgattggcaacagatactatcagttgttttctttgaagtgacaagctgttcatttttgggaaagtttctgccaaatacttaagtctaaaaaactatatcttgtcaggcattctttcaagaaagggggtgtttgcccccagaaaggtacaagtttggctcataactcagttacataagaatgtttcctgcagcccactgtcacacgctggtttgtggtagaagggctctctgcatcctctcactcatttcattacacaaactgttcgaaaggcacatactcgggggttgagatttaatcaaattaataattttttattgcatcgaggacatttggaagtgaaactggctttttaatttattttcttgcgagcgcgtggtagtgaggaatgtgttcctgctaagtacactatggagccactgcccgattcacgctcaggcatcagcagttttactgtgcaaatgtcaagcagtgaaaaaagtaaataacatcttggtgctattataaaaagttttggcttcacagtcctcctgcaaggatcttgaggtctgccggggctgcacagaccgtctttgagggcccactcctggctcagagtgagactggtgggcaggcaggatagaatctcttgggagctcaatgtcctttccagacctgcctgaacagaatctgcgttttaatgaagtcccgaggagatttatacgcaggttaaagttttcctgtagtcccagctatttgggaggctgaggcaggaggatggcttgagcccaggaggcagaagttgcagagagctgagattgcactgctgcacttgaacctgggtaacagagtgagattgtatctgggaaaaaaaaaaaaaagagagagagagagagaaccactgctctttaacagaggtctgcaaaactttcctttaaagggccacatagtaaatacctgtggcaacaactcaaccctgcctttgtagcttgaaagtagccatagaccatatgtaaatgaatgagcgtggctgtgtgccaatacaactttatttatagacacagaaatttgaattttgtgtacctttcatgtgtcacaaaataggttttttaatatattctaagcggttaaaaaagtaaccacttggaatcatgtcaaaatcattctgagtttgcaggccatgaggagagccagatttagctggtgggccacagtttgctgacctgtgctatataacactgagtgctcattgaagttaccgggggagcttcaaaaaaacaaaccccaaccctctaattcctgagtcccgtccccaataaattctgataaaattggtctggggtgaagccagggcatcaggattttcagatgctccccagattattccaatgtgtaggaaaaatggagaacctctgctctataatgttttccaagaaagttagttttcttttaagcatttctttttaagattttagaatttggcagtgtcaccaaatgtctgagaccagaattatgtattgtaaccttagagcagggtttctcactcttggcactgtgaacccaaagctatctgagataggtctcaatcaatttagaaagttaattttagcaagcttaagaacctgtgacacagcctcgggagatcctaataacatgtgcctaaggtggacggggcacagcttacttttataccttttagggagacatgagacatcaatcaatacctgtgagatgtacattggttcaatctggaaaggcaggacaactcaaagggggtcagagggtggcttgcaggttataggaagatttaaaaattatgtaaagacctggaatccatagaaaggaatgtctgggttatgatgataaggggttgtggagagcaaagttttatcctgtaggtgaagcctccaggtagcaggcttcagagagaatagattgtaaatgtctcttagcagatttaaggtctgttgatgttaatgctggttggcttttcctgaattccagaagggaggagggtataatgaggtatgtttgactctcccttccaatcatggcctgaactagttttttcaggctaactttggaatccccctggcagagaccaggaatctattcagatggttgggggtggggtggggggtgcttagaatttttttttttttttttttttaaacggagtctcgctctgtcgccaggctggagtgcagtggcacaatctcagctcactgccacctccaactccctggttcaagcgattctcctgcctcagcctcccaagtagctgggattacaggcatgcgccaccacacccagctaatttttgtgtttttagtagagacggggtttcaccatgttggctgggatggtgtcgatctcctgacctcgtgatctgcctgccctggtctcccaaagtgctgggattacaggcgtgagccaccccgcccggcccagagttttatttttggtttatagcactattggcattttgggtgtgaccattctttatttggggatgggggctgtcctgtgtattctaggaggtttaggagcatccctggcctctacccactagatgccagtagtgtcccccaccctcagttgtaacaaccaaaactgtctccagacaccgctaaatgtccctgggtggcaaaattgcctggattaggaaccagtggtctaaacgatgtagatgttttttgtgctacttcagagaatctccacattggagctattgacatctggggctgggtaattctttgttataagagcatattctgtacactgtgggtgttgagcagcatccctggtctctactcactagatgccagaagcaccctctcccccagctttggcaacgaaaaatatctccagatattgccaaatgtcccctgaggggcacagtcaccccctgttgagaattgcttggccagctcagaatcagggaagcttctgtccactgacattcactgctgcttctcttaggattttcgccctctccattttcccattgcttgttgcttgaaagttgtaaagcttggttcctgcatcttttctttttaattttgtggctcattaggaatcagtaatatagcaaggaaggccccatgtagagaggtaagggggtggtttttttgtgtggtgtttgttggggggtgtttgggagggtgtgtgtgtgtgtgtatgtatgtgtgacattcattccctggggaagaatctgagcccttgttcctgccagccctacgtctgagccagcattaaatctgcagccaagatcacagacaacttgggcaaatcacttggccattatgaactcacagccatggcaacggccatccacaagcctgaggacaaaaggtgttttattctgttgttctgcacaaaaggttctagggatactggagacaaaatagcctttgagacttaaaggcattgatgtgtattttttttttccctactacatggcttatatttaaactgtcttaggctaatgtacactgtaatttttgtgtgaatcaaaacctaaaattctttttatccagaggccagctaaatgaaggcataagacagcccaacagaggcttttagggtttggtgagaggtattgagaattactagtaaaatgtgctagaaagcctggcattctagcctggccaacatggcaagaccccgtctgtactaaaaatacaaaaaattagctggatgtggtggcatgtgcctgtaatgccagctactagggaggctgaggcataagactcacttgaacccaggaggttgaggctgcagtgagcggagatcacaccactcactccagcctgggcaatagagtgagactctttctcaggaaagaaagaaaaaaaaaaaacctggcattgattattatttttttacatgaatacatcacagtcatcaaaaaaatgctttccttattttttctcgttcacgttacccaatgttgtcattgctggtttgaagcttgggaaaattcagtctgtggatttataggagcatccaagaaaagcactgatcttccttagctatcgtaaacttttaacagcatggtgttctgctggtacttggcaccacccctatatttaaaaacatcagcttgcctatgactactaaggacagcctgaatcccagatctacttcctttttgtgcacaggcactcccagcactttagggggtggttggagtgtgtgtgtttagaaatctgctttctcaggtgactcaattcccgtcttctcagaccctgtctatggcatgacactaaagcatgaaaaattccaaggttaacagtacttgtttggctcacaaaaatgcactctagctgcactcttttcaagatggctggacaacttggaacattttgtttttcttaactgtagtccttggaacttgccatttgattcacaagtgactggagggttatggccaaacccagtgggccacgtcttagagaaaaaacatcacacaccatcgaatatgaaagcaggcacttcaaacagactcaggatgccacacctgagaccgggaagatgccactgttgactagaaatgggcttctcaaattttcatgtgcacacaaatcaccccagaggccttgttaaaatgcagattctgactcagtctggggtcacttccaacattctttatttctcacaagttcctccctgctgaagctgacactgctggtccaatgaacacactttgcaaagcacatggaattgacaaatgacaaatggtccactcatatcttttcttgacctctgatagttttccttgttgcccagtagaagctgccagcatccaagttcagctcttctcagctacagatccatatatcccttcacatcatccagagtgatctttcacaaccccaatctgtttcccatgcttaaaaatgctccctggcagaccaggcatggtggctcacacctgtaattgcagcactttgggaggccgaggcgggaggatcacttgagcccaagagtttgagaacagcctgggtaacataaggagaccctgtcactacaaaaaaattaaaaaataaaaaatgagctgggtgcagtggcatgggcctgtggtcccagctacttgggaggctgaggtgggaggatcgcttgagccagagagttcaacaccgcagtgagcagtgattgtgccactgcactccaacctaggcaacagagcaagaccctgtttcaaaaaacaaaacaaaacaaaaaaaaaacgcagtggcttcccatgattttgttttttttgtctttttgtttttgtttttgtttttgttttgagatggagtcttgctctgtcacccaggctggagtgcagtggtgcaatctcggctcactgcaccctccgccttccgggttcacgccattctcctgcctcagcctcccgagtagctgggactacaggcgcccaccaccacgcccagctaattttttgtatttttagtagagacggggtttcaccgtgttagccaggatggtctcgatctcctgacctcgtgatccgcccgtcttggcctcccaaagtgctgggattacaggcgtgagccacggcgcctggtcaaggcttcccatgattttgaagataaagtccagaattcttaaggtggcctggaaagccctaggtggtctagctcctatattacctatatcctctagctcctaaataaacacatttagctttttcttactaactttttgcagcagttttggttcctctaggatgagtgtgtgatatgtgactaaattgcccagtgttcaaagatatcatgcacactgtgaccagaggtggcttctatactgacatagaagatacagtggagagtgatccatttatagattgttggatatctaccacacatgcaatcttaaccctgaagataactggtcaaccaagctagaataagctctacatccagctgtattatgtcctataaatttttcccatattttatgtcactagcttctagtcatgttggctggcacagtccgtaagagttttatctgtgccagtggagcaaagatggtgatttctgttctataggagccagggttcctacagccacaaataaaatcatctgctgaaaacctaagagcattggcatctgctgagagagcatgattcattgaagtgatcccccaaattcttgagttcctggttttccctgctgttataaaactagatccacagcatgaggtatatacagagtccttgagagatataaattggagggaaactttagctttgatctagtattgaatttgggattgaacagcatcattcttctaaccccacttggctttttgagcctgggagagctgtgatatttctttggaatgctctaaccatttggatgaaagaccgtttgaagtggcaactgtggatttggaaggatgagttctatcgttaaagggcgagtgtgctgcaccataacacctaaccctaactccaaatgatgaaaaagggtgtgggtttagtttaaaaatatatatagatgtatacatctatatatacacacagagaattaatgaacaattttatctggttatatatcagtgtcaccacatcagctgtttaagtattctggatactagatctttctgtagaaggacccatccagtatgaattatttgcccttctgatcttccctgtcccccttctctccactctctttccactggctctgcaggggtctgtatctttgcccccatcatgctggactataataattgtgttacttgtctgcctgcagtattggatttatcttgaagccagaaaggtatcttatttcagttttgtgtacttggcacccagtaggtcttcacaaaatactgaattaatgaaatccaacagaaaacccagttagaacccagctcctgggttatagaaaatcaaatatgtgacaattcaaaatgtatcttccaaagcagtgtgttctgtgatgatgaaatgtcctatatctgtgttgtccaatacggtagccactagtccatgtggcttttgagcatatgaaatgtggtttgtgcaacagaggacctgaaattttcattttatttaattttaaataaacgtaaatagctacatgtcttagtggctaccattttggaccacacagccccaaggcctcacatctttatcctttaagaaccagatacaactttgttagccaggaaagcaggcattcatctttttcttaacatgatcatagaggctgagaatgtggggaggttgtggatgatacaatacccatgtctgttttctctttataatgagatacgtcaaggccaaggattctagtttctcttagtttgggaacctggagagaatttggactttgagttgcattcctctcacctcagtccccagaaagtcatgtgacaaaataagattgagctctaacatctctgctcacaaatcccaagtgtctgaagctctttaagatactgacttgctagtgaacttgaaccatattgtgcactggttccctttttctttttttgagacggagtcttgctctgtcgcccaggctggaagttcagtggcgcaatctcggctcaccgcaacctcttcctcctgggttcaagcgattcccttgcctcagcctcccaagtagctgggactacaggtgcccaccaccacacccggctaattttttgtatttttagtagagacggggttttactgtgttagccaggatggttcccattttatatagtttccccaatccacttcagggaagttggtcttcctaaaaacagctgctcatcttttgaaattaaaggaagcacagctttcttatgaagccctgatattttttattttctaatgaactaaagagaaatctagtaatgagttttcatagtcactttccataggtttaagcgaatgctagtttaaaaggaatgctcactaaaatgaaaacattcatctatggtgttttatgctgggttgtcattccatgacaactatgaagaccatttgggggattttttttttttttttttttttttttttgctggcttaatgtgcttgccctaaagtaatgaagtgcccttgattgctgctaaacaccataatgcgtttaaagttcaatttccccgacaagccatttacttaagggtctggataatataaacagagacaggaggttaggagaggtactgacattatcctgaggccagtgctgcctttactgaaacgtaaatgtctccaaactgaaaacgtcacctggctctgcccctgaggcaggtctttatggacatctcaagtaaaagtttattttaaaaatgaatacaagtctcgtcttttcaagattaagagtgacttacggctgtctctccttcattccacttcatggatgttcattttggttttgtttttttcttctgttcttttttctccttcaagtacttaaatatcacccaccagttctgggttctgactctgaacgtgtgtgtcggggaagggggcaggtggaagccggggaggaggaggactgtgaatgaattgcttgggctgactgggctggggggaagcatttttattaaaaatttgagataatttctgatgtcaacttgaatgaaacttgagtagacccacttgagtggctcttggtgactttgttcttcactgaattatggaccaaaatacctgtgacctttccaaaacaatcaccttgctatttgtttgaacctggcgacggcataattgctgtatcagattctcccagttgccccggaggtccagggcttggggaaagccgttggttgccacagcagcagacgtattgaaaccccagaactgtgaggctggagacgacctgactgttgcttttcttcacagagctgcagcttcactgctgtcctctcttttgactgtgttagtggaatgagtgcttcttgttggcacttgagcggggctccccccaccactcagtcgatcaggaagctctagaactgtaactaccttataactctttgtcaattgactgctctgccattcactacccttccagattctgagcaaattaagttacattcccttttggagcctcagggtcctcaccgcagaatgtgagatcacggtaactaccacactggcccttgggatgtcgaagtattaatattaaccatagagcctgagaggggagatggaaaattgtaagccttctctgtgaatatggggtattcttgaagaccagaggtgttcttgcccgtaacggctatattttctctcctttgggttcaggctgctttgaatgctgcatcaagtgtctgggaggagtcccctacgcctccctggtggccaccatcctctgcttctccggggtggccttattctgcggctgtgggcatgtggctctcgcaggcaccgtggcgattcttgagcaacacttctccaccaacgccagtgaccatgccttgctgagcgaggtgtaagtatccggttccctttaaaaatgcatctaaggcctggcgtggtggctcatgcctgtcatcccagcaatttgggaggctgaggcaggcagatcacctgaagtcaggagttcaagaccagcctggccaacatggtgaaacgccacctctactaaaaatacaaaaaaaaatttagctgggcgtggtggtgcgtgcctgtaatcctagctacttgggaggctgaggcaggagaaccagttgaacccaggaggtggatgttgcggtgagctggtgagccgagatggcaacactgcactccagcctgggtgacagagtgatactttgtttaaaaaaaaagtatctgagatgcaaccacctcatgatgtttttcagaaagactacagtgtgctttcctagcagaagatgaatgcttttacttaaagctcactttatgtagttagaaaaaggttcatgagagaaggaaaaagaaagggcctagaatatggtagctgtttaggccccagggtggaatgttacttgggaatggtaaggtgcacacataggacactccacacatggtagctgtggacatggggagctgtgacatggtgataggtgatgctgccgattgtctcaacagaattgtgttgttcccaagtaacagatgcctccagctttctcccaggaagtgaccatccctggaatggtaggagccctgttgaggactgaccccaactctaagcctacaggagcagtattttaacattaactcttccagcagaagagcagatcccagggcatcctccattgcagaagagcagatcccagggcatcctccattgcagaagagaggaaggtccaggggtttagcagcagatctctgcctttctttctggaaacattctcaatggagtcgcagtgactcccacacatagattcttgtagctgtgcaagctcagcagcaatctacttatttccttcacatgtcttcccctttctccatttccttctaccgtttctttttcttcccttgaatcccaaagttccagtgttagtgtgtcttatgattataagaaacttcttcaccagactgaaaaagacatgaatgaatttttatggaatggtcatggagtcatgttggagactcttcagtccttagggaattttattctttcttatctgttcacaaatgacctccaaagaaatgaacacaggttggggagattataaggagggctcaagcaggacaggggactcactgagttccaactatgtgcaaagaagaaatgtttaccaagactgaacctgggaaaggtgtgttgatttaattaggtagtgatctcagtctgtggctctcaaacttctgagaagctttaagaaaatccccatgccttaccccagaccaattaggacataatctctgggggcgggatccaggtaccagtattttccaagctccccaggtgattccagtgggcagccgaaggctgaggacatgtcatttgtctttgttagcttttgtgggacaaactgcattgtgaattaactttctgtatcttaaacctactcgacctactactatttgtgtggtgggagtcacagtgcaaaagacatctccccagattaccccctaaagaagccctgagtgcctacttaggggttttatcagagtgacattaaccactaggcctggttgggaggcattttgaaagggcagaaagaacatgttgtccattgggccagggttcagatgctggctttgccactaactgtgtatcctccgatgaggagcttaactcctcaatgcctgtgttttacttatgtgcaaaatgaggattctaacccttgccgcccaggactcaggtaaggattaaaagattacaactggatgctgccctgagcaaaggaaacatcattcccaccttggaaggaaggcccaggttgctgggacatgggcagggatgccgcccaggatgccccacaagtccatcaaagccatcagtggggcgagtgacgcactcacaggaacatccccctcatgtcctctctccagcgtccagaaacgtagtcactaccaggcagtgaatttaatggttcaggatctcttcttctctttgtaggatacaactgatgcagtatgtcatctatggaattgcgtcctttttcttcttgtatgggatcattctgttggcagaaggcttttacaccacaagtgcagtgaaagaactgcacggtgagtttaaaacaaccgcttgtggccgatgcatcagtggaatggtgagttgaacctctgataactgattgtttgatatacaaccagagccatgccttgatgtatttccttgtatttggcaaaagctaccaggtatcgagcgtgaatggagggtccatgacacaaatattggctttaccaatttagagttaggactataaaaaccttcaacatgctattgatagtaaactaaagtctatggctggcagaaataaatcaaatgttttcatcagtgtaaaggtgaaaagggtgctgaagatttttcaaatgccaagttcccactatagaaggaggtaactttcatgtggtctcagtgctcccctttggttgtctttaaatatggatcatagccataaagacatacatgaaccatggaaaatcgtcctgatccttctgtaaatacttaccagtacctgctgtacagagcgcctagctgggctttgctagccactagaggtgcaaagattaaaacacaggctgctttctcaagcagcttatagtctaagacaggggttagcaaactaggggctgtgggccaaatttgacctactacctgtttttgtacagctcaagagccaagaatttttttttttttcttttttttttttttttgagacggagcatcactctgtctccaaggctggggagggcagtgtcgcgatctccactaactgcaacctctgcctcccgggttcaagcgattctcctgcctcagcctcctgtacaagtcaggggaatggttacttttgtaggggaaggaggcagctgttaaataaaatgcctgtggaaagcagagggaaaatagccacaaatagtgggaatcctcctccaaaggaaaaaaaaaccaaaaacatctcctcacagctttaaaatgacagctttccccctcacttctacccatcaagtttcaaaaatagaggtctagtttccaccagggcacagcattaagtcatccactgcctgatgtttaacatatttggatcctttgagcattggtcaggacacagtacatggtggagaggagaggagcttgtttgtacttgagctagtggcacttcacctagagatggggacactgtgagggatccacagcccacctagcatggcccgcttttagctcttatgtcagattttgttggagaaagtcgaaagcccccttagactggagaggagcttgaccatcttgcttgatttcattgccagtcattcatgcgctgtctgcatctctggccactggcacctcatgtgcttccgtttcatccatacgcttaacagatcacaatgctgacctgccttggagggtgtgaggaagatgcaggtgacggggcagggctgaggatgctggggacagaaacaggacagaaagtcatgtgaggtggagaaggtggatgagatctgcccgctagggaagcaaagctgccactccatcaccaaaggcctttgtctcctcagtcctgtgaacccaaaagtatctgaaacaggtatcagccaatttagaaagtttattttgccaaagttaaggatgcacccatgacacagcctcaggaggtccggacaacatgggcccaaggtggtcagggcacagcttggttttatacattttagggagacgtgagacatttatcaatgaatgtaagatgtacattggttccgtccagaaaggtggggacaactcgaagcagggagggggcttccaggtcacaagtaggtgagagacaactggttgcattcttttgggtctctgattagcctttcattgaatatacaattcacatgggagaggagggtagaggaatagtcacttatgcctggtctggcttggtgaaaagacagggcagaggaagcaatcagatatgcatttgtctcacatgagcctcagagggatgactttgagctctgtcctttgtccacgaggaatttccttgtgggcaaattgtgagggaggtatgtagctttatctttgtgctatcttgtttaggaatagaatgggggatttgcctgtcgcagttcccagcttgacttttccctttggcttagtgatttgggggtctggagatttttctttcgtagtcctgtgtgggaggtttgtgcccaggaactcactgaggaagcagctctggacgctagaggcctccatgacagggccagctcgcagcggggacctctgggagggggacagtggccttccctctggagtcctggcctctgacagaagggaaggctcactgaagccaagaaccaccagctccctcctgctcaggtcctgttttcttttgaagggaaagaaacctagtctggagcagcagtgggaggaagtgggaggtggaactgctgaaatctgcttctctgaatatttttggagatgcaaatgcttccttgcagtgcaagggaaagtgtctcgtttctgcagtttcctggcattgtgaccatcaggaggtggcctccaaccgcccaggtatctcctgcagcacagaaagttaggggtgaccatcaggtctccaccatcagcttcaaaatagaaaagccaaactagcactccacaccctctgtgggcgcgccttctgagaacacaaataccacgtttttgaggccgcctcacaaagctctctgaaaagtggtcaaggcagaggaaagccaagcaacgggattctattcttcctggattgcccatgacagtgtgtgggtgaacacctgaagctttttccctaagccgttgctttgcttgcaaagctgctgtgaatcttagagacaaaagaaaagtagaggaaaatgagaattttatagatcgagcattaagcttgtattcgtgattatttgaaacttttggtaattttgcagaatcaggaaactagcaaagttctttttgagagggcttcttgtggcaattgctattctctgtgagccaacctgttacgaaaaataaaggtaacttttgagaaattaatatgaagttataattcagtggtatatggaatacatccagaatctatcccatgttaagtagcatgttctgcattttcagaacggctatttagaaagagcacctcttgagaggctgccactgattagctctgtgaccttggatgagtgagatcacctcttggggtctcctgtccttgttagttaagagtgacccgaaaggccctgacattgcttcgggcactccaattctagatcctctagctctggggaatgtggctggctcttacttcccctgctcccgtgctggcttttccttcttgctaccaatgccggggcgagggtccccacaatgtgttccacaggtcagtattgggcctgaaaatgcacaatccttccacttaggggacacacatctacctgtttcagtgatgattgtccttcctcttgttttggcctagttcgttttcctcacctatgtgcttggagtggcctggctgggtgtgtttggtttctcagcggtgcccgtgtttatgttctacaacatatggtcaacttgtgaagtcatcaagtcaccgcagaccaacgggaccacgggtgtggagcagatctgtgtggatatccgacaatacggtacttccttctaattcacccctcccccagttatttcattatcctctcgtgcatatgtctggacctaattattacatgcgcatccttttaattgtcatgatctgtttcatcccttctattagagtaattttatacttttcccttcaatatgctattttctgggtggaaacttcagggaggcttttagcttgctaggtatcaaaatttcgttatattttcatgttaagtgtgtagtgaaagaagcttttcttaatatgaaactactttataatgcagttcaatcaaaaaagacttctggatctccgctacaaaaagattgtattttttctttattttcagttttataacatccaactttccattcaaaataatattgcacacattgtataattcaattaatttgcacatccaactcctcaaatctggtctttttaaaatgaccaactgcttaaacttcatctgtattgaaaaatacaacattagatccagccatattttaaagtcatcagaacatactctataaatcattatcagctgttagaaaccagttcaaacattttctaatgagtgagatccttacaatggggatctaaggttggttcattgtgacaaaccccagaagagaccactggctcctcctgtcagttaatttgggacttgacttcgctgctgagtaagagagggcagctgagtaagagggcagcatcctgagggaggagtctaattactgcttccagccaccatggtaggaaatcttttcttggcagaaacaaccgggggtgggggggaatagctttcatcagaattgaagaggaaataactgtccttccagagcttttctgaagagagatgactatttcatttttgctgtttttctcatgtggcttagtctcaacatcttaccttacaacataatactaaatttgcttgaaactacctatcagactaacctcttctcacaaagaccaaggctgaacaacactgttctttatgatagagctaaaaacggagcctaaagttggctgttaaagttatttgtaaatgaatatctaaatgtatatcattctcctattccttaaaagtaagtgttttgccacaaatttttggtaatcagcaatcatctttttaaatcctctatatttgcctatttattgttatagttactggtttcactgataatttggggtaatttcccatgcttctgaagtataaagatgtactcttggcccgtgtcaaggatgaaaggaataaggattttttttcttctaatactcctttccttaacctcctaggagtgtttaatatttaagcacaaacttatgcattaaaggggaaaaaaagcagcagcccactggacaactgtcattgcagaggagcctcagggtttaagtgagagagaaatcatagactctgcttgtcccaccctctggggtaaaggacagtagtgttttttctttttaaaaaatttccggccacgcacgatggctcatgcctgtaatcccagcactttgggaggctgaggcgggtggatcacgaggtcgggagttcaaagaccagcctggctaagatggtgaaaccccgtctctactaaaaatacaaaacttagctgggcatggcggcaggcacctgtaatcccagctagttgggaggctgaggcagagaactgcttgaacccgggaggtggaggctgcagtgagccaatattgcagcactccactccagcctgggcgacagagcaagactgtctcaaaaaaaaaaaaaaacaaaccaatttgattttcagtccaaaaatattttctaatacgtttataagacataataaaaatgaatataaaaacaaagacaaagtacaaatccagagttttttattggattcccacaaacataaattactccgtcaaattgccatgaaagtttgagtgtatacttgcaattttggaacttaactcctggcagaccagtaacagagcttggacagcaaggccacagaccacagcattcatgaggaaatgtattttgacctcaatgtgataaaatgctttatgagggggttgtcctgcagtaactatagggaaagcctggctttgaaaattaatgtttacaaatatgaacttccaaatgtgaaccctcactgaataaagcacaatttgtaggggaaaaaaatatcaggctgtttaaatctcttatggactagttggctttgcttttggcctattgttcaaatggggctatttattccaaaatgcttgttctgcagacagcagatccatcaattcttaatgaagaacatagcctacaattacactgtaactggcatccgaagtggtggggtctgttaagaacatgaggcgctatagtttgtactaacatcctattggggttcattttacaggtatcattccttggaatgctttccccggaaaaatatgtggctctgccctggagaacatctgcaacacaaacgaggtaaactcatcacagttcagaataacccttgagtattaggctgagaaaaaagggttctcccagctgtagaaagagcgagagagatggttaaaatgccattaaggaaagctccttgtttagaatctttaagatagagctatatgtaaccatcactattcagccatttttgacctacaaaaatggtcacttcatatggtccaacacatttggtgagaatccttaagaagtggagggcttttcctttgggcaataatttagaggtgatcccaaacctagaaatctaataatatatctagattcttctctcacctcttctacttctactctttctactttgaaagattttcaaagtagaacacctgtcacagaacggatgtaagttaattttcatagaggagtccctctatttcatagaggaatttgtgtatatacccaacttttaataaatgaggccacagttaatcatttatatttctggaatgacttgctacttctctaattctcattcgtccttactagggagtgtgtcctaacaatttggtttaaattgtctcagccctagaacattcttcagtcattggcttgtaactgtttataaaggaaaattcttaaatgcattcgtaggtgcttgtatatttaagaaaatcctggcaagcttttaagaagcagtgagttacagaaataatcagctcctaccctatctgacttgtcaatttgtatatccataatatgcagtggcttgaagcagggctccccaccgtggctgcatgttacagccatcaaggcagcactatgttatactgatggctgaggcccagcccttaggtattcagatttaatcgatttggggggcagtctgggcatcagaaagtttttaaagctcctcgggtgattccaccatgaggccagagcatgaagagaaggcaggcctgtgcccagtcttgcagagaagagctgcaaaggagacagatgaagcagcaccccacaatgagtgtaggccatttcatttaacatcaaatgcttatgttgatgccctgttcttttgtagttctacatgtcctatcacctgttcattgtggcctgtgcaggagctggtgccaccgtcattgccctggtgagtaatggccccaagaccaccctagtctagcctcctccctccagcttctaaatgacagatttcccttccagcttttaccagcctattgaagccaatgattctggcactcaaccttggttaactggcgcctgtgttaacttaccacatgtagtttacagaaagtattagttggttgccttggcactgattgtaggtgatgtaatttggactctggaaagaaaagagggtatcaacacctatcaactaggcctagcatattaccttgttgcactgagcacttagcttcatgacttcagtcgcagacagatgcaatgctcacgtgaggcattacccatttctttgccaagggatattaatttacaagtggagatatgcacatatacatacatttatatagtcactcatacagggtagctgtgttccataaagtcacctcaagcaatgaattagcgaatgctggaccactgctcctaggggaaatacatggctaggtttctgtgagcctctggtcacatcattttcagcaacctatcaacacataagcttgtttcgtgtgtttctgtgtaaatacaccgtatttaatatatattgttgattccttaatattgaattcatggccaatagctctatccctatgcctgaatgaagcttctctaatgaacattttctctggtcaggcagtttgcaaccttcttgcacttagggactctagacagcactgcagcactatgcttgggagccattttaagcagcaaaatcacccacaaaatgcacaaaaatgtgaaaaacgtggcactaaatatacttcgagtatacttatttacagtctgagagctgaaacaagaaggcagagtattgccttgttcagcctcagctgggaatgtgcataccgggcaactcaactttcaccgctctgcacatgtctgctaataactgcgaaagaagtgcctcaagtattaaggattacaaatgaatcttagcaagtaggcagtcacaaatgtggaatctacaagtaatgaaaatcaactgtataaatacacgctcttatgtatgtatgtttgtatacatgtaattttggagggcttggtttgtgatttcaggaaaaccaactaagattggtagagcaagggaaaaatctcagctgcttgtaaattattcattcccagtttttctgaccattaaatccccttagaatctatgaaaaaaaccacctttaaaatcatggggtgacctgttcttttggttgagcaacagggaggaaagataactgcctgctgctgagcaggtggttttggaaagatgagaggattaaggcatttagcttcatccttctcatgctgttgacccagctctctgtcttgttattcttgaaacgcatccaagtccttttagtaaactcactgagggcagaaccaatgacttacattgtacatgtgtgatgagaaaaagtttgtgtgtgctagataggaaaattgtctgttgtgattttaagtgggaaaaaaacaccttagactatgagcaggcacccgtccccacccaagtttagaagtgtcatggcatcggccctcactgcctgtatcttactgtcctgttttgttctcttccaccagctgatctacatgatggctactacatataactatgcggttttgaagtttaagagtcgggaagattgctgcactaaattctaaattgcataaggagttttagagagctatgctctgtagcatgaaatatcactgacactccagactaaagcagagtctaggtttctgcaattttgttacagtaatttgtaaatagctttagtaaactcaccttgcatggtagattaataagatgacttactgtacatgaattacacaataatgagatctggtggctatttccacattttgaaaaggattcagttatttactgacagtggtgagcatcctttttaaaataatgttctcatacttaaacattagagagcagtatctttaaatgaattattaacactttggaatacttacattttctgttatttttgattgcctgataaccagtttcaatgatgaaaatgaaaacaagtgctgaagatgaaatggaagagaaccgttttaatctggattttgttttgtcacacctggaaaatactttgcaaatatgttctaaattgaaaacaatttttttatgatcacatggttcactaccaaatgaccctcaaataagccagatgaaaatttgaagaaaaaggtcacccagttctctggaaaaaaaaaaaaaaaaaaaaaaaaaaggatttatatgtgggtagttttttttttggtacaacacaatcattctgttagagcccacaaaattggtaaccttaaattgtgtgttttggtaagtaataactaactgtttcctcatagctagttctcaagctgcatgtaagattttaacgggaagagaaaataggcctggacctgaaggtctcaaatatgttgagaagaaagtatgaactataaggaacttgagatgtagatttattttgcaggaaatacgaggaaaataggaaagaagtgtttgccgcatcaagtgtaaagaatgatactgaggatttttacattttatgaaatgaaataatggcatttacaaaatgaaaaatgtagtttcacaactaagttttgttaacagagactgcatgctttgcttatagttcttaattttggttttgacattcatttaattttttccatgttaaatatgtagtttaattatttactcaaaataaacattgttcatgcttttaggcctttgggggaattgatttttatccacaggtagaaaatggtctttgcacacactacacttatttcaaatatacaatgtgctcccgaactttcgcattagtctttaaaattactctcaaaatggtattaaaaaaaaaaaaaaaagcaccctctcgtatttcatttttgctttttcttaacaatacctttggccatttttttccagttcactatgtttgtatactaacttttcttcagccttttaatgcgaagccaactagtagagcatgctttcaggatctgacagctctgctagtagagcgagtatttattaatacagaattaaccttcgcccctttaaagtcaagtctgtctaatctaactagcgcctcgctttgccttctcacaatgctcactagccatcatgctcacccttctcttccagatccacttcctcatgatactgtcttctaactgggcttacttaaaggatgcgagcaaaatgcaggcttaccaggatatcaaagcaaaggaagaacaggaactgcaagatatccagtctcggtcaaaagaacaactcaattcttacacataaatgtttgccagagtgtttcggccgacgtatttacagctctgacaaatcatcagacagctgctctgcagtacagatgtgtatcccaccaaactaatgtagatgtacaaacacttcactgtctgtctcaagctgctgggatgtatctctaggaaaaccttccagtgggtaaatctttttctttagaacaaatattggaggtttcatgttagccattttaaaaggcaacactttgacaaaatgatcgttcatactttgggaatttgtggcatgttcacatttattgctagggcaattctaccaagacactcaatggaatatgtcacactccttaatagggacctgtgactccttaataaggacctgtgacatgcccagcatcaagggataagaccgtaaattcacatatatgccatctgtcctcaagtgttatctacataggaaataaaatggaattgatgtaaagttccatttctgacagctgacatttattaaactttggatcaaagataatgtgattcttatgattgatttctcaaactagcttttccctcccaagtccaggacccattaatttcctgagccaatcagaaatatatttttcaataatgctaaaattagctacaattctgctgaccctactattaaagaatctggatgctggactcactgacaagctttccagaagcaattttataacagatttcattttaacaaaatactgatccaattttcattattcttgagaaatgtcagctttgccttaatgagtatttgctttaaatttctaagaatttatatcataactagagacccaaatatctttcacagaattttgttccataaatgtttttcttaattattaagaagtgttaccttattaaaatgaccaccattctaaaccatttttcagtggtctggatacgaagtttacagtttcataccaactatctaaaacctaattgcaaattgaccacagacctctaacctcctacttttatagacttgaatacttaagtaatttaaattagggttggtatttcatttttttcttatctaaatcttagtttcctggaataataaagtttgatgttcagcaagagaactgcttgagtttaagccattttcaaaagaaacttgccttttacattattgtgttccagaacattaagtgactgtaggtactgggtattagtgatggtaaactttgtgttgctctttatgaaatgatccatataactgttgggtgcatcagtgcttttcaaaggggctgcttactatagggttaactatgtatattcattgttaagagttaacttgtggtttggctgtttcctggattttataacatacatgtgcagaaatgtattcaaatgaaaggaagcatacctttatcaagatgctattaaaattgaacatcaagtataatatttcatttggattctcttttttggttaatgcctaaaaatgcctatttgggatttttttttttttttaaattaagagaagctctcttctgtgtagaacagttgttccaaaatagcttagtgttttgttttcctgttgcatgacagatttaactattctttccagcagtggaggtgctgtcagagtccagtgttctagaagaggcagtgtctaaagcctaattttacttttctaattctggtagctattaccaggaatttttgaaagttttgtttaagtagtctaatattttttatgtaaagagcattaaattttgctatgtataaatttttgtaacctaacagtgaatcaatattttctatcagtgccaagggcttcctgtagttctattcaagtgttacaataaatatttgtagataatagtcaatacttgtgtatgcttattttaaagatctatttaggtggaaatagttgtggatgtactaagagtaatgaaataaaattatagcttcattca

SEQ ID NO: 7 - DNA, 27864 bp, Homo sapiens
atgctgacaatcttcttccttcccctggccacctctctgcccacttgcttcctcagtaccttggtccagctcttcctgcaacggcccaggagctcagagctccacatctgaccttctagtcatgaccaggaccagggcagcactcctcctgttcacaggtgagcctggaccccaatgaagtagggctggggacccaggcccaagggagccagggccctgaactgggggctcaggctggggggttaggatctgggtaggaagagagactcagtcaagcctgagggggaggcaggcacatagggtctgagatttggagtttgtggagggagaggatattgatgaaccaattttgggagagttccagagatgctggaagagaggccagttgtctctgtactgcagagatttttaaaataggcagaatgcgccaacttgtgctctgtggacaggatgctttggtccgcaagttttcctggactcactctcatagcgcccgaggtgcacgttggggaaagatcctttttagagcctgggtactgctctgcagaaatggagaactgcaactcgatagtggatggtgggcaaggggcatccctggaccctgggaaggagagaaggggatgagttgggtgtccagaagacccaggcaccccgggcatcaggctcggaggggagattgggacgctggggccgggggtggagggcagccaggcagaaggaagacccttctccaaagctctcttcccacctctttcccagccttagcaacttctctaggtttcaacttggacacagaggagctgacagccttccgtgtggacagcgctgggtttggagacagcgtggtccagtatgccaactcctggtgaggcccaggtggtgctggcctttggctccatccatcctctccctgctcagggccccatgcccccggccctgccctgttatttgcaaactctcctctctgtctggtgtagcgactgccctggctaatgaagatttgccttgaaggcaggcacggtctcacagctaacatttacagagcagtaagtgcagtgccaggctcatcacaggtggatgctgatttagtccacacgacagcctgtgagtaggaatcagtcgtgcaacaaacacttatttgttttttctttctttttttctatacatttaaaaatatatagagacagggtctcactatgttgcctgggttggtctcaaactcctgggctcaagcaatcctcccgcctcagcctcccaaagtgctgggattccaggtgtgagccaccacacccagactcaacaaatatttcttgtctccatacgccagagaatccaacagacagaaatcccttccacatggactttaaattattaaaatccatcttgcagatgaggaagctgaggctcagggagggaacgcaaacttgccggagtggcagctgtgctgcagcgtccacactcttacctaaagtgttctttgtctcctcgcagggtggtggttggagccccccaaaagataacagctgccaaccaaacgggtggcctctaccagtgtggctacagcactggtgcctgtgagcccatcggcctgcagggtgagtcaccgcccctcccgggacccagggccgggctcccaggcttccctgctccaggggcccgtggactcaccggagtgtcactttcagcttccactgtgtctgagaccctcaccctcagatatgcttcctggccccttaaggcctccccgcccatcgcactcccgcagctctgtcaagacccgacagcttccttcaccgtcagacctccttgtctcccaggtggaggtgacccctgcccagctcttccacagccttctctgtacccccgagagtgaccatgcacatatctgtccccacagtgcccccggaggccgtgaacatgtccctgggcctgtccctggcgtctaccaccagcccttcccagctgctggtgagtggccctgggtcacaggaggcttctgagggagggagggaggagccggggccgcggggggctgggagtctcctgtagggtggaggttccggaatgtgagggtgggaggaagcaggggcagccccccagcagcccgctgtgtccccaggcctgcggccccaccgtgcaccacgagtgcgggaggaacatgtacctcaccggactctgcttcctcctgggccccacccagctcacccagaggctcccggtgtccaggcagggtgagtgtcgggaccaccaaggctttgaggagctcacgcacatccaattgggggtgcggtgggctagagacagtcttgccagagtggatcagaaagaagggatctggaaaaagagttaccacgtgttgcagtggttcctgacgctgctgcccgcacatcctgccgatcgcccgcacgctgccggacctttcctgtgaccttaacctctccaagcctcagtttcttcatctgttggatggggataataacacacccagcactgaaagcaacacaggatgattcatggccaggggttagcacagcagctagcaccaggcgacagccccatgaaggccagctgttgttatttttagaggagaggatctattttcatccaatgggtcctgggatatgaccaattggtttgtgccgtagtttaggaaaggtcagtgaaagtgcagtgtgagcaacgtgtgtgtgtgtacatgtgtgtatatgtatgcatgtgtatacatgtgcacatgcacacatgtacatgcatgtgtgtgcatgtatgtgtgtgtgcgtgtgcacatgcaggttgagacgcagggcctgacttccctggtgctgatggggaagaaagataaggaagcaaaacagtgggctttggcaggctgaggcctccccctggtttcacatttgctctcaagcctttggtgagactgacatctggctgcaaatagggtgtgccttccagcacctccgtgggtccagactccatccacaggggcctgggcacccatcagaatgcccaggacacctgtctctccggtggaggcctctggggcagaggggatgcttgagaggtcacatggaagggggtttcctctccaggtgctggaagatcgtctcttctcaggacagatgctaacttcacacaggaggggagtgggggcctgtatttaagctgagaacagaacaggcccagtgtgtggctgttgcctgggatgatttgtttaaaatattaacaatcaaggcaagagggttgtttgaggcctggagtttgagaccagcctgggcaacatagtgagacctcatctctacaaaaaataaatataaaatacaaagtagcttggcatgctgttacatacctctagtcctaactactggggaggctgaggcaggagaatcgcttgagcccaggagttggaggctgtagggagctttgatcacaccactgcactccagcctgggtgacagagtgagactccatctcaattaaaaaaagaaatttaacaaaactaccattcagcactgagcagtgaggacaaacactggctagggactggtgccagtttgtgtcattgctggatggggtgacattgagggaggaaggaggggtgggtccagggaggggcacagatatccagggtggtggaggggtaggccctctgcttcctaccgtctgaattggagaaatcttcctggtttttttttttttctttttttttagagatagtcttactctgtcactgaggctggagtgcagtggtacaatcacagctcactgcagcctccaactcctgggctcaagtgatcctcccacctcagcctccagagtagctgggaccacagagaagagctaccatgcccagctgatttttaacaatttttagtagatgtgaggtctaactatgctgtccaggctgatcttgaaatcctgggctcaagcaattctcctgcctaggcctcccaaagtgcttggattataggagtaagtcactgcacccagtctgaccttcactcttttgttgatggggctgagcagcttcatcacagcctttttcattttttatttttttgagatggagcctcactctgttgccaggttggagtgctgtggtgcgatctcagctcactgcaacctccacctcccaggttcaagcaattctgcctctgcctcccaagtagttgggaccacaggcgcgtgccaccacacccacctaatttttgtatttttagtagagacggggtttcaccatgtgggccaggatggtctcgatctcctgacctcgtgatccgcccccctcggcctcccaaagtactgggattacaggcgtgagccaccacgcctggctcatcacagcctctttaggcaactttaagagaatgaagggccttgttccaggcaaggggttagggaagctctgcccctgatgaggagaggacccagggtgtggagcctgactcccatcgccagactaggggcttaggggaggaagggttttgggagagtgagctcttgtggccaggaggccacggtcctggactccaggagtgtcacttggaggaccggtgccacctccttccccagagtgcccaagacaggagcaggacattgtgttcctgatcgatggctcaggcagcatctcctcccgcaactttgccacgatgatgaacttcgtgagagctgtgataagccagttccagagacccagcacccaggtgtgcctttgggggagggaggctgctgggggtgggtgcttcgatcctggtgaaatggcctcagccccagccctgtgtgcttctcccagttttccctgatgcagttctccaacaaattccaaacacacttcactttcgaggaattcaggcgcagctcaaaccccctcagcctgttggcttctgttcaccagctgcaagggtttacatacacggccaccgccatccaaaatgtcgtgtgagtcctgatttcttccaggcacagtcccaaagcacccaggtcttcccttgggcctcatctgtctccacgagaaggggacaggcagggaccaaaatccagcccgtgatacccttgccaagctggggcctctgggtgggactggggcctcccaaaggaaaaggcatcttctaattttcacaagggcaccaggggctagtgtggtttggttcacaggcctctaagacctctcctttcctgataggcaccgattgttccatgcctcatatggggcccgtagggatgccgccaaaattctcattgtcatcactgatgggaagaaagaaggcgacagcctggattataaggatgtcatccccatggctgatgcagcaggcatcatccgctatgcaattggggtagggcgtgggatggcttcccacttctcccacggcttcctctcagggcaactcccctttctgtgtatgttcttttctctttgagacagggtcttgctctatcacccaggaagtggtgcaatcctagctcactgcagccttgaactcctgggctccagtgatcctcccaccccagcctccccagtagctgggaccacaggtgtgtgccatcaagcctggctattttctttttggttgagatggggtcttgctatgttgcccaggctggtctcaaattcctggccttaagcaattctgccaccttggtctcccaaagcacagggattacaggcgtgaaccaccgccaacaacatccctttcaaggatagaaacaccagctctctcggctcttactgccttaaggatgaaaactctgccccagactggagaccatgatcctttctcctaaactccctgatgctgtccgggcttcgtgtttctcctgtgtccaccgggtgtgatcatgttgatcttgtggggttattggaagatgttgcacccagtgcacacaggcacatttgatttattatttttactgagttgatcttttctggggacaggttggattagcttttcaaaacagaaattcttggaaagaattaaatgacattgcatcgaagccctcccaggaacacatatttaaagtggaggactttgatgctctgaaagatattcaaaaccaactgaaggagaagatctttgccattgagggtgagtctgaagggagctcttcgcttggggaatcctcagccgttaacacctttccacttagaacccgaggctccgtgaaacaggtagacagcgtctcggttctcctgctttcccgggaccccgatagccatgtctgtcagcttgtccccactgacgtcccccagcactgtcagagctgccccaaagtggccccagggatggccctgctccccacagagagtgatctcacaccaccaccggctccactgcagaacaaaaagcagtgccaggcccaacccaggagacccttccacccacaccgggccctacccagcccacatcccaccagccactcactcccctgggcaaggggcacacggacacctggccccctcgggtctgcttgtagacctgtggggggccctgatgaggaccagatcggtgctgccatcgctgtccacatccatggagcagaggggggccccgaagtcggagctgatctggagggcagagcctggtccctgtcacaggcaccagctctccctgtagcctccagtcttagcttctcctaaagctgaagtgttcttggacctggcaaagcccgtctccctccctggcactcaagcgtcatgccttcccccaggtacggagaccacaagcagtagctccttcgaattggagatggcacaggagggcttcagcgctgtgttcacacctgtgagtggggccccttaggccgatgatgtgccgtgaggggagggggagcagggaaggccagggtgggtgtcaggtgggtaagaggcgcaggcggaaggcatatctctggtacatgctgtcttcctgctccggcctctgctcagccctggaatccttttctcccaggatggccccgttctgggggctgtggggagcttcacctggtctggaggtgccttcctgtaccccccaaatatgagccctaccttcatcaacatgtctcaggagaatgtggacatgagggactcttacctgggtgagaaacagccaggggttggggacaggtgggagatgcactgcccagggtggggtccagggttctggggaaggggtatgggggctgtgctgcccagggtggggtccaggcttctggggagggaggatgggcactgtgctgcccggggtgggttccaggttctggggaggggggatgggggctgtgctgcctggggtgggggtccagggttctggggagaggggatgggcgctgtgctgcctggggtgggttccagggttctggggagagaggatgggggctgcattgcccagggtggggtccagggttctggggaggggagatggtgctgtgctgcccggggtgggggtccagggttctggggagggggaatgggggcctttgtgctgaggcctgggcccctcaggttactccaccgagctggccctctggaaaggggtgcagagcctggtcctgggggccccccgctaccagcacaccgggaaggctgtcatcttcacccaggtgtccaggcaatggaggatgaaggccgaagtcacggggactcaggttgggcgtgacaggagccagaggggaggatgagggtaggggaggtggctggggcagaggagaggatggaggggctttgagggccttgggggaggtcctggtacctggggagaggtgggacctggcccacagggctgcctctggcagggacaggcagcatgacccaggctctgcccttcagatcggctcctacttcggggcctccctctgctccgtggacgtagacagcgacggcagcaccgacctggtcctcatcggggccccccattactacgagcagacccgagggggccaggtgtctgtgtgtcccttgcccaggggggtgagtggctgatgggcctggggtgggtggggtctggtgtgggtggaggggttgcccgggttgggcctggcactgctttttttctgcagtggagaaggtggtggtgtgatgctgttctctacggggagcagggccacccctggggtcgctttggggcggctctgacagtgctgggggatgtgaatggggacaagctgacagacgtggtcatcggggccccaggagaggaggagaaccggggtgctgtctacctgtttcacggagtcttgggacccagcatcagcccctcccacagccaggtgaggccgtgtcccatttctgtcactagagcagcctgcttcttgcctctcccactctgtcatactggaaaactgtccctttttaccttttcctacctcccttgcccagctctgagcaccttgtagcagtggcgtggtctcagctcactgcaacctccgcctcccaggttcaagcgattctctgcctcagcctccagagtagctgggattacaggcatgcaccaccatgtccggttattttttgtattttagtagagacaggctttcgccatgttggctaggctggtcttgaactcctgacctcaggtgatctgcctgtctcggcctcccaaagtgctgggattataggcgtgagccaccatgcccaggcccctgccagttttacaaggtacacaggtcaggcacagaaaacccattttacagatggaatctgggacactaggaagacaagggccttggtttgttggaggttcagagtgggtccgagatggtgaagggcactccggcctcctgacctctaacccggtgtgcagtctcccggctccctgctgctcaccacttaggtccagtcatttcaaccttcccttccactcgcccctctcctccctggatgctacatgattttattcccttcctgccatcaaggtcccaccaaatgcccatccctgcagccgccctccaccccaagggagcagggttccctgagaacgaagggctgcttttcttggcaaaagtcaagaaagctctgttaaaaaataggcaaaggggctgctccaggtggctcacatctgtaattccgacactttgggaggctgaggcaggaggatcacttgaggccaggagtttcaggccagtctgggcaacatagggagaccccatctctagaaaaaattttaaaaattaggcaggcattgtggtgctgtagtaactgtagtcccaattactcgggaggctgaggtgggaggtcacctgagcccaggaggttgaggctgcagtgagctatgattgcgtcacttcacttcagcccaggtgaaagagcacaatcccgtgtcaaaaaaaaaaaaaaaaaaaaaaaaagggcaaaggatttggatagggtagacgtttctccaaagaagaggtacaaagggccaatgggtgcataaaatgattctcaatgtcattagtcatcagcaaatcaaaactataatgagatgccacttctcacctactagaatggctagaaacaaaggcggataatgacaggtgttggtgaggatgtggagaaccgggcatcctcccccatgctggggatgatgtaaatccacgcagctgctttggaaatcagcatggcaggtcctcaaaacattaaacataggctgggcacagtggctcatgcctgtaaccccagcactttgggaggccgaggcaggtggataacctgaggagtttgagactagcctggccaacacagtgaaaccccatctctactaaaaatacaaaaaaaaaaaaaaaattagctgggcatggtggtgggtgcctgtaatcccagctacttgggaggctgaggcaggagaatctattgaacctgggaggtgggggttgtggtgagccgagatcgcggcactgcactccagcctaggcaacaagagcaaaactccgtctcgaacaaacaaacaaacaaaaagttaaacatagagttgccatgtgatctggcaattccacctataaaacatgctaagtgagggaagccaaacacagaaggccacatgtattcaggccaaatgtccagaacagacagatctgtagagacagaaagtagatgagcagtttcacagggctgggtgtgggggaaagtcaggggcatgagggtgactgctaatgggtgtggagtctctttttggggtagtggaaatgttctaaaattgattgtggtagtggtttcacaactctctaaacataccaaaaggcactaagtcatatactttaaaggggtgagttgtgtgctatgtggtctatagctcaaaaaagctgttaccaaaaagaaaaaagtgccaaggaaggtccctgcagttctgtcacacaccagctgtgtgatctttgacaggtaactcaccctctctgtgctcagttttctcactggtaaaatggtgatactaatagaaccaaccttattgagctgctgctgtgaggattaaatgagttagtatgcatgaagtgcctggcacacaataggtatcatgttgttataatctgttttaattatcattaagatagtttaacaactggccaggcgcggtggctcccgcctgtaatcccagcactttgggaggctgaggcaggcagatcacttgaggtcaggagttccagactaggctggccaacatggggaaaccccgtctctacccaaaatacaaaaattagttgtgcgtaatggcgcatgcctataatcccagctacttgggaggctgaggcaggaaaatggcttgaacccaggaatcggaggttgcagtgagctgagattgcgccactgcactccagcctgggtgatagagtgagactccatctctaaacaaacaaacaaacaaaaaacacatagtttaacacctgaaggggaatctaaagaagagggtgaaagactgttgagaataacaagggcccacgtgttgtcatgaaactgcaaacagttcgtaccaattcccacaacccatcacatgcaggcataccttgttttatgcgctttgcagatactgcattttttacacgctgaaggtatgcagcgaccctgcactgagcaagtctatcagtgctgttttcccagctgcatgcactcactttgtgtctccgtgttactttggtaattctcacaatgtttcaaacttttttgtaattatcatgtctgtgatggtgatctgtgatcagtgatcttcgatgttgctattgtcctctttttggggcaccatgaagcacgtccgtatatgaaggcgaacttcataaatgtgtgtgttctgactgctccaccactgatagctcccctgtctctctctccctctcctgtggcctccctattccctgcaatgcaatgatattgaaattaagccaaataataactctacaatggtctttaagtgttcaactgaaaggaagagtcacatgtctctcactatttatttatttattgaggcaggatctcactctgtcacccagcctggagtacactggtgtgatcttggctcactgaaacttccccctctggggttcaagtgattctcctgcctcagccttctgagtagctggcattacaggtgggtgccaccatgcctggctaatttttgtgtttttagtagagatggggtttcaccatgttggccaggctagtctggaattcctgactctaagtgatctgcctgccttggcctcccaaagcactgggattacagacgtgggccaccacgtctggccacatatctctcactttagatcaaaacctagaaatgattaagcttggtgaagaagccatgccaaaagccaagatgggctgaaggccttttgcaccaaacagccaaattctgaatgcaaagaaaaagttattgaaggaaattaagagtgttactccagtgaacatatgaatgataagaaagtgaaacagcctaattgctgatatgaaggaagtctgagtgatctggatagaagatcaaaccagccacaacatccccttaagccaaagccaaatccagagcaaggtccgaatgctcttcagttctatgaaggctgagagacgtgaggaagcttcagaagaaaaattggaagtcagcagaggtggaagtcagcagggttcatgaggtttaaggaaagaagcaatctccacaacataaaagtacaaggtgaagcagcaagtacagatggagaaggcgcagcaagttctccagaagatctctgatgaaggtggctacactcaacaacaggttttcagtgtagatgagatggccttcgatggaagaagatggcatctaggactttcagagaagtcaatgcctggcttcaaagcttcaaaggacaagttgactctcttgttagaggctaatgcagctggtaggacttcaagttgtagccagtggtcatttaccatttggaaaattccagggccctgaagaatgatgctaaatccacccttcttgtgctctagaaatggaacaaagctggggtgacagcacatctgtttatagcatgcttgactgagtgttttaagcccattctggagacctgctgctcagaaaaatagatttctttccaaagtttgctgcttattgacagtgcacctgatcacccaagagctctgatggagatgttcaaggagattagtgttgtttccatgcctgcaaacacaacacccattctgcagtccatggaccaaggagtaatttcgactttcaagtctcattatttcagaaatacatttcataaggctatagctgccatagatagtgattcttctgatggatctgggcaaagtcaattgaaaaccttctggaaaaaaattcaccattttagatgccattaagaacattcatgattcatcagagggggtcaaaatatcaacattaacacgagttcgggagaagctgattctgattctcatggatgactttgagtggctcaaggcttcaggggaggaagtgattgcggatgtgtggaaatagagaaccagaattagaagtggagcctgaattgctgcagtctcatgatgaaacttgcacagatgaggacctgcttcttacagatgaggaaagaaagtgttttttttttttttcagatggaatctattcctggtgaagatgatataaatattgttgaaatgacaacacaagattaagaatattacataatcccagcacttagggaggctgaggtgggcagaccacctgaggtcaggagttcaagaccagcctggcctacatagggaaacctctctactaaacatctctactaaaaaaattagctgggtgtggtggcagatgtctgtaatcccagctactcaggaggctgaggcaggagaatcgcttgaacccctcaggcaaaggttgcagtgagccgagatcacaccactgcactctagcctgggcgacagagtgaaagtgtgtctcaaaaaaaaaaaaaaaaagaatattatataaacgtagttgataaatcagcatagaatttgagagaattgactccaactttctttttttattttttattttttatttatttttttattttttattttttttattgatcattcttgggtgtttctcgcagagggggatttcgcagggtcataggacaatagtggagggaaggtcagcagataaacaagtgaacaaaggtctctggttttcccaggcagaggaccctgcggccttccgcagtgtttgtgtccctgggtacttgagattagggagtggtgatgactcttaacgagcatgctgccttcaagcatctgtttaacaaagcacatcttgcaccgcccttaatccatttaaccctgagtggacacagcacatgtttcagagagcacagggttgggggtaaggtcacagatcaagaggatcccaaggcagaagaatttttcttagtacagaacaaaatgaaaaatctcccatgtctacttctttctacacagacacggcaaccatccgatttctcaatcttttccccacctttcccccctttcgattccacaaaaccgccattgtcatcatggcccgttctcaatgagctgttgggtacacctcccagacggggtggtggccgggcagaggggctcctcacttcccagtaggggcggccgggcagaggtgcccctcacctcccggacggggcggctggccgggcggggggctgacccccccacctccctcctggacgaggcagctggccgggcggggggctgacccccccccccacctccctcccggacggggcagctggccgggcagagggtctcctcacttcccagtaggggcggccgggcagaggcgcccctcacctcccggacgactccaactttcaaagaagctctactgtggccaaatgttatcaaccagcatcgcatgctccagagaaatttcatgaaaggaagagtccatccaggcagcaaacttcctcacggtcttattttaggaaattgccatagccaccccaacctccagcagttgccactgtgatcagtcagccgtgtcaccatcaggcaagaccctccaccagcaaaaagattatgccttgctaaaggcttaaacgattgttagcattttttaccaatcaaatattttatttttatttttgaacttttagatttagagggggtacacctagcctttctagactccctcagtaattggtaaatttctctttttattttgttattattcctttttttcttttcttttttttaatttttattttttagagacagaatctcatcatgtcactcaggctggagttcagtggcgcaatcatagctgactgcagcctcgaactcctggactgaagagatcctcctgccaaagactcctgagtagctgggaccacaggcacaaagccagtgtgccctgcccattattattacctttttttttgagacagagtctcgctctgtcacccagactggagcacagtggtgcaatctccgctcactgcaacctctgcctcccgggttcaagtgattctcctgcctcagcctcctgagcagcttggattgcaggtatgtgccatcatgcccagctaatttttgtttatttagtagaaacggggtttcaccatgttggccaggctggtctggaactcctgacctcagatgacccacccgcctcggcctcccaaagtgttgggattacaggtgtgagccaccgcgtccagccattattatcacttttaatggctgctagttccagggtgcacagagatttaaagggcacattcttccagggattgggcataacatgagcactgggaatgaaggtgataggttctacaggggaggcagtgcctgggagggtggatctgggtgtgggtgcgaccactccctaccccaccgcggctttttcttgtcctttgaagagacagagtgacagcaagaaacaaaaaggggacttgggcctggggttggacggtctggtgttaggtctgcagtcagcctcttaaaggctacctggggttgacactgtccccaacctctctcctgcatctttgcaacgagggaggtgaggttggacaaactctgaggtccctttcagccttaatactcattgtgatatattattgactgctggctgtatcctgggtgctgttctaagaaccgtaggaattcctctcctgagcatggctaaactctgagctaatagtatcattatatgaaagatgaggaaacggaggcacagacagattgagtccttgcccacggcctcgtggctcatacgtggaggagtcagaattggaactagagactgatcgaatgaatgacactcgggtcaccaggacacccttcctatctccactcttacatctgtttcttagcaatcatctcccaactcctacctcctcttttcaggttcttcttggtgacatctgttcacaactcaccccttctctccctttccgatggtcctacctccatattccccttgttacttatttccaacttcttcccctactttccatcttgattcacccttctctcctctggccagcggatcgcgggctcccagctctcctccaggctgcagtattttgggcaggcactgagcgggggtcaagacctcacccaggatggactggtggacctggctgtgggggcccggggccaggtgctcctgctcaggtgagagcagcctttctcagaggctccccaggtggtcctaggttcagatgggggtgcccaccccacgtggtgctcccaggagccgacggcctgtcctcagctcggtgctctgcccgcaggaccagacctgtgctctgggtgggggtgagcatgcagttcatacctgccgagatccccaggtctgcgtttgagtgtcgggagcaggtggtctctgagcagaccctggtacagtccaacatctgcctttacattgacaaacgttctaagaacctgcttgggagccgtgagtcccctcccctccaacccaggacaccctgacctctggagtcccccatcccaggcccctgtctcccaccctgctcattgtccacccaaggagttcctgtctcaacgccgtccctgcgaccgcctacaggtgacctccaaagctctgtgaccttggacctggccctcgaccctggccgcctgagtccccgtgccaccttccaggaaacaaagaaccggagtctgagccgagtccgagtcctcgggctgaaggcacactgtgaaaacttcaacctgctgctcccggtgcgtctgggcatgaacgtgggtggcggccgcgctggggctggcagaaggcagggcagggagagaacaggctgtgttccggcctccctgtggctcagcccagcacaggaccagccatgcaggacgtgcttactgcacgttagccagtgagtgagtgagcgagcaaacaagtgatgagatcggctgcaatttccaggggccacacgattggatttcaggaaagagaattgggcaacctgagagagctctggggcttccggctgggctttttttcaggcattcactggacaggggtttatcgagctgctcctgggagacaggccttgccctgggggccaggggcataggtggccaaaacagtcattgctgatcgggaggtctggggggggggaggaaaaaaacaaagacaaacaaggggagagaacagagagggtgtcagggaggcctcctgaaggcggtgacgctgagcaggctctggaggaagctgaagccgcgcgggagctgggcagaggcaggataagaactgcggatgaggccgagcgcagctcttaccctccccttaccctccgctccccgcgacgcccgtcccccagagctgcgtggaggactctgtgacccccattaccttgcgtctgaacttcacgctggtgggcaagcccctccttgccttcagaaacctgcggcctatgctggccgccgatgctcagagatacttcacggcctccgtgagtcctggcactgggtctcccagagagggtgcacagcgtggggcctgggtctcggagaaaaccccccgttgccttcccacgcagctaccctttgagaagaactgtggagccgaccatatctgccaggacaatctcggcatctccttcagcttcccagggtgagcgcccccaccttagacctgccctactgccccagcctccttcctggaatctgggactcctgcctctggctctccctaacattgtctcatcctatagtcaaaacccaggtgtcttggctgggcacagtggctcacgcctgtaatcccagcactttgggaggccgaggtgggaggatcttttgaggccaggagttagggatcagcctgggcaacagagcgagatcccatttccacaaaaacaaaacaacaacaacaacaacaacaacaacatcacttgagtgtggtagagcatgcctatagtcccagctacttgggaggctgaagcttaaggattgcttgagctctggagttggaggctgcagtgagccataatcacaccactgcactccagcctgggtgaaagagcaggactctgtctcttaaaaaaaaagaagaagaagaagaagaagaagaagaagaacccaggggtccgtcccctgtctatctcccaaatccccacccaccccattttatcccagaccatttctagcctcagtcacagaatcatcttctcctttccttcacctgatacccagcttgaagtccctgctggtggggagtaacctggagctgaacgcagaagtgatggtgtggaatgacggggaagactcctacggaaccaccatcaccttctcccaccccgcaggactgtcctaccgctacgtggcagagggccaggtgcaccctctggggaaggaggaggaggcagggctgggcgttagcgtagattcccgtgcggttcagaacccgggctgggcttggaggtggtagtgccatctggggcacgcctctgctcgtgtgggtgttcaactttgggcatcgcagtttaaggacactgactatcaggaatgatttcctgagaggccactaatgtggagacagaggggaacctgcccaaatttctttctattccatattatatcagtattcctcttttaaatgaaaacatacctcagccttcaaatattttaaaacactgttctgtagaagcaaggggttgaatttattggtcactctacattaaggcttggcgacctttttctataaagggctagatagtaaatatttcagcttcgtggtctgcgtggtctgtgtcacagctgctaacctctggtgttgtggaatgaaagcagccattgacatgaatgagtttatgagtgaatatacctgcgatgcagtaaaactttataaaaataggtagtggctgttggttgccaatccctgctttaaaatgcagaactaggaccacggggagtcaaagagaaccagattttttaaacaaagatgttattatggctgggagtggtggctcacgcctgtaatcccaggacttcgggaggttgaggcaggcggatcaccggaggtcaggagtttgagaccagcctggccaacatggtgaaaccccatctctacgaaaaatacaaaaattagctgggtgtggtggcaggtgcctgtgatcccagctactggggaggccgaggtgagagaactgcttgaacccggaagacggaggttgcagtgagctgagattgtgccactgcactccagcctgcacaacagagcaagactctgtctaaaaaaaaaaagttattatgaaaaatttaaaacatttacaaaagtagaaagtagttcaacaaacctccccaaaacttgtcacctagattcaacaattagcagcattttgccacatttgtttcatcaatttttcccctttgctaaggtattttctttatttctttatttttgagacagggttttgctctgtcacacaggctggagtgcagtggcacaatttcagcttactgtagccttgacctcctgggctcaagcgatcctcccatctcagcctcctgagtagctagaaccacatgcacacaccaccacacctggctaattttttaattttttttgtagagttggggtcttaccatgctgcccaaactggtctctaacccctgggttcaagcagtcctcctatcttagcttcccaaagtgttggagttacagacatgagccactgtgcctgacctgctaaagtattttaaaacaaatctcagacatgggggtcattgtactcctccttattcactctgctatggtttgaatgcatcacccaatgttcgtgtgttggacacttaatccccaatgcaacagtgttgaaaggtgaaaccttttaaaggtgattaggttatgagggctttgccctcatgaatggatgaatactattatctcaagagtagattagttatttcaggagtgggtttccttccttcctttcttctttctttttctttctttcttttccttctttctttctttccttgagagggtcttgctctgttgcccaggctagggtgcagtggcacgatcttggctcactgcagcctctgcctcccgaattcaagcaattcttgtgcctcagcctcctgagtagctgggattacaggtgcccactgccacgcccagctaagttttgcatttttagtagagatggggtttcaccatgttgggcagtctggtcttgaactcctgacctcaaatgatccacccgattcggcctcccaaagtactaggattacaggcgtaagccacggagcctagcccaggagtgggtttctaattaaaggatgagtttggccccctttccctctcactctcacatgcactgccttgcacatgcagcacaaaggccctcaccagatgctggtgccatgttcttggacttcccagcctccagaaccacaaagcttctattgatacattacctagtttgcggtaatctgttatagcagcagggaacagacaaagacacactctatagttctgaacaatgaggacctcttatatgacctcaacaccattatcacacccaatgaaataagtgattccttggtattaagatcatagtcaaaattgtgtaactgtctcaaaaatatctttttacttctggtctatttgaacgaaaattcgaactaggtccatacatgatggttggttgttatttctgctgtctctcttagtctaatattcccagcggaagcgcattttgattaacgtataaaagaacacagcaggaaaggccatctcttgcatgtgaggggtgatcactgtcaatgaaagtgctcctagacatatcaaccaaatgtaatgggtggacctttgctgaatattgattttaacaaatgagctgtaaaataacatttttggagacaatctaagaaaatagaacatgaccagtatattggtatattaaggagtaattgttaattttgttggctgtgatttgttggttcttgtggttacatttaaaatacccttatctattggtggtatacactgaagtatttctagatgaaacaatatggtgtttggaatgtgctttaaagtgttcagaaagagaacatagcagaaacaagagtagaaaaatgttggttacttaaaatgagtgatggttatatggggttgattttccagtctctctattttttaatgtgttttaaattttccattataagaggcctttaaaataacaataaaaaggtgaacattttaatacatttgagatttctactttggaagaaagtttgaccagatagctatgggggagcttttaaaaacgtaaccttggctggacatggtggctcatacctgtaatcctagtgttttggggggacaagatgggaggattgcttgaggccaggagttcaagaccagcctgggcaatatagcgaggtcccatttataaaaaaatttttttaaaattagccaggcatggtggtggtgtgtgcctgtagtcctagctactcaggaggctgaggcaagaggatggcttgaggccagagtttgaggctgcagtgagctgtgattgcatcactgctttctagcctgggtgacagagtgagacctggtctcaaaaaacaaacaaacaaacaaaaacataagcttaaggtgggctccaggaagctttatcactacttcgtggcgtgtctttggaatgctgttatattaggttggtgcaaaagtaattgggtttttgccattgctttcaatttcaactaatactcctctactttttctcatgcctagaaacaagggcagctgcgttccctgcacctgacatgtgacagcgccccagttgggagccagggcacctggagcaccagctgcagaatcaaccacctcatcttccgtggcggcgcccaggtcagcctggcttctgtcccctcactgctcccctgccccaccctgtctttactgctctgtgacctctcagttccttttcctcagatcaccttcttggctacctttgacgtctcccccaaggctgtcctgggagaccggctgcttctgacagccaatgtgagcaggtgagccgggccaggccaggggcagtgcccctcatctccagcctcacaccccattctcctcctctggggcctctggcaactgagtctctcctctttctccagtgagaacaacactcccaggaccagcaagaccaccttccagctggagctcccggtgaagtatgctgtctacactgtggttagcaggtcagcaggtaccccactgcaggaaaaagggttcttctctctgacctcaaaaagaaaaaaaaaaaaaggccttgaaacgctgccacagagggtgagataaggtgtttgaaactaaaaggtcaggtgtttcagcagacaccttccttcagccaatgccttcctcgaatttgctgtgtgccaggcagggtgctgtggttattttccatacattcatttgacattcattgaagatttactgagcccccattatgtgtgatcaaaaccagacatgaaccctcgcccttgtggggtgtgccttgctggatgttctcctgtgcctggtgtttcccactctcacctgcacctgcatgcgtggaggctcccagccaggtgcacgctctgagctcgtgtgctggggtgtgccccaggctctcataccccttggcaggggacccacaggcagggctcacctactctaggcatgtgtggtccacagcttggccacacatggcaggtgtgatccacagcttggccacacatggcaggtgtgactctgtgggttagggcacagggagtgccaggttggggcatttctgggggaggccaaggtgggaggattgcttgaggccaggagttcaggatcagcctgggcaatatagtgagaccctagctctacaaaaaattggcagaggaggaatgaggcttcagagtaggcgtggtgggctggtgtttggactatgccagctggaggacaggtgccggaagagtgaagcagtgaggcagtggtgagactggccacctgtgtgatggtcccagctgcccaccaggtctccaggcttgtgcccaaaaagggctcaggaggtgttaaactgagacctcatgaagagtctgctgtgggccctccctcccctccaagccccaggcccggaaaagccaaggaaatgggaaaaaagggcccccggggaggtatgtgggggactgggaaggggcaatgctcagtagcatttggtcaacagcgtcagcctgggccaccccaactctgtgctgtgtcccacagagccctggcatcctacatccccacaaagggatggaaggaaagcggaggggcaggccatggcccctgctctcctgcagtcagtggcagagctctctgctccgttcattgtaccgactacccggccccactggcagcctcctctgcaggcagctatgagctctttgcctcatttttttttttttaaagcccaggtcttgctctgttgcccaggctggagtgcagtggtgtgatcacagctcacagcagccttgaactcctcttgggctcaagcgagcctcccacctcagcctcccaagtagttgagactacagatgtgtgccaccatgcctggctaatttaaaaaattgttttggagagatggggtcttgctatgttgcccaggctgatcttgaatcctggcctcaagtgatcctcccacctcaacctcccaaagtgctgggattgcaggtgtgagccactgcactcagccaattagcacttgtttgaagcccagccctgcttttctagactctctctctttttttttttttttgagaccaagtctcactgtgttgcccaggctggagtgcagttgtaccatctctgctcactgcaacctccgcctcctggctccaagcaattctcgtgcctcagcctcccaagtagctgggattacaggcacctgccaccacacctggctaatttttgtatttttagtagagatggtgtttctccatgttggccaggctggtcttgaactcccgacctcaggtgatctgcctgtctcagcctgtcaaagtgctgggattataggcgtgagcactgtgcctggtctctaaactctctctctctgtttttttttgagagagagagagtcttgctctgtcattcagtggcgtgatctgggctcactgcaacctctgtcccctgggctcaaacaattctcctgtctcagcctcctgagtagctgggattacaggtgcacaccatcatgcctggctaatttttgtatttttagtagagacagggtttcaccatgttggccagggtgatctcgaactcctgatctcaggtgatccgcccatctcagcatctcaaagtgctgggattacaggcctgagccaccgcgcctggcctctaaactctcttataacctaactcagccacagccctcattccaggacattccaaggccccaccgaccacctgtcctctcatgctctagccaatgccttctgcagatgccccatggtagttcacatccacttatgcgtcttctctctccagccacgaacaattcaccaaatacctcaacttctcagagtctgaggagaaggaaagccatgtggccatgcacagataccaggcaggtggtggagacgcaggagactgggctggggtgggaggctgggagccggagactggggagggatttgggctttggcgtgggctctgccctcagtgccctctgtgcaggtcaataacctgggacagagggacctgcctgtcagcatcaacttctgggtgcctgtggagctgaaccaggaggctgtgtggatggatgtggaggtctcccacccccaggtacccaaggactgcatgtggctcctccacgaatgccctttctacctggattccttgtgccccatgtgggtccctgatgtcccagctgagacacttgttctctgcattttcccccagaacccatcccttcggtgctcctcagagaaaatcgcacccccagcatctgacttcctggcgcacattcagaagaatcccgtgctggtgaggagggctctgggctggccctcactgtaggccccacatcagaggaatttaacccaggagttcatgttccatatccatcctgctgaagtaccctcttgcattcggatatggccgctgccctcaagtcacaccgcataatgctgcctcccaccttcacactcatctttctcagccccatgctatttatctgcccccaggactgctccattgctggctgcctgcggttccgctgtgacgtcccctccttcagcgtccaggaggagctggatttcaccctgaagggcaacctcagctttggctgggtccgccaggtgtgtgggtgcaacgacagagcccctgccccagactcaggcgggacctggcatgtctgtgcccatctgcaagccagggcacccccagagctctgagcctcccccagagccagttcaacaggtttcccccaacccctttgcagatattgcagaagaaggtgtcggtcgtgagtgtggctgaaattacgttcgacacatccgtgtactcccagcttccaggacaggaggcatttatgagagctcaggtagagaccatgtggagggcagcgaccaggctggaaagagggcccctagggctacatctgtggtgctgggtggggggtttgcaagccttgggggaggagggcgaaggcctctgggcaggatagctgtccctaagggcacgggtgctgctgtgtctcacctcttggagcagggcctggggaaggaggggagggagttaaaggttggggagcctgggaggagtctgggatagtaggaggatgggagtgctctgacagggtcacttccacttcagacgacaacggtgctggagaagtacaaggtccacaaccccacccccctcatcgtaggcagctccattgggggtctgttgctgctggcactcatcacagcggtactgtacaaagtgagtgttttatgccactcttgacaccaccagcatctggtcccgctctttttgcagagtgagaaggagctcactttgaaggcagaggcacattcttactgggtcacttcatatgagaaactgcttcccacctgcaatgtcacctgtccccagtggccccctgctttgtgattcccaggcttcctctaatatttctccctttctttcctgctcttctccatcattctacgtgtttcccttgacagcagattatcatataaaagcacagacctgggtttgaatgtcgacatcaccacgggttctttttgtctttgaccataggccagtgtctgctccactctgggccttgatttctcaatgtgaaggtgattctaccccagctcatagaattttggctaaatctaggctgggcacggtggctcatggctgtaatcccagcagtttgggagatcgaggcaggtggatcacttgaagtcaggagttaagagaccagcctggcctacctggtgaaaccccgtctctactaaaaatacaaaaattagttgggcatggtggaggttgcagtgagccgagatcacgccactgcactccagcctgggcaacagagtgagactccatctcaaaaagaaaataattttggctaaatctagatgacatgatgcatataaagttcctagtgcagtgctttgaacctagcaaggatttcagaaatagtgacccctctccctcagtcatctcttttcctctcttccactgaatgggcttcctgagtttcttcttcgtcctcccccctaggttggcttcttcaagcgtcagtacaaggaaatgatggaggaggcaaatggacaaattgccccagaaaacgggacacagacccccagcccgcccagtgagaaatgatcccctctttgccttggacttcttctcccccgcgagttttccccacttacttaccctcacctgtcaggcctgacggggaggaaccactgcaccaccgagagaggctgggatgggcctgcttcctgtctttgggagaaaacgtcttgcttgggaaggggcctttgtcttgtcaaggttccaactggaaacccttaggacagggtccctgctgtgttccccaaaggacttgacttgcaatttctacctagaaatacatggacaatacccccaggcctcagtctcccttctcccatgaggcacgaatgatctttctttcctttctttttttttttttttcttttcttttttttttttttgagacggagtctcgctctgtcacccaggctggagtgcaatggcgtgatctcggctcactgcaacctccgcctcccgggttcaagtaattctgctgtctcagcctcctgagtagctgggactacaggcacacgccacctcgcccggcccgatctttctaaaatacagttctgaatatgctgctcatccccacctgtcttcaacagctccccattaccctcaggacaatgtctgaactctccagcttcgcgtgagaagtccccttccatcccagagggtgggcttcagggcgcacagcatgagaggctctgtgcccccatcaccctcgtttccagtgaattagtgtcatgtcagcatcagctcagggcttcatcgtggggctctcagttccgatttcccaggctgaattgggagtgagatgcctgcatgctgggttctgcacagctggcctcccgcgttgggcaacattgctggctggaagggaggagcgccctctagggagggacatggccccggtgcggctgcagctcacccagccccaggggcagaagagacccaaccacttctattttttgaggctatgaatatagtacctgaaaaaatgccaagacatgattatttttttaaaaagcgtactttaaatgtttgtgttaataaattaaaacatgcacaaaaagatgcatctaccgctcttgggaaatatgtcaaaggtctaaaaataaaaaagccttctgtg

SEQ ID NO: 8 - DNA, 3072 bp, Homo sapiens
gccgccgcttgggccacagtgaaagccaccgttgcccggggatgggtccctgacacttggcgaagtagcagccctgtgtgatcgtgcgtctgagtctgggctgagaccagtcctggccagggtagttaccaggacggtctccggaggccgggattcgcggagggtccaccagcaggaagaaaccccaggaggaagaaacctcagacagatcgccggcgaggcagcgcgggatcccagcctcaggcgtgcgcggacggtgtgcgggtgagtctccccaaaagtggagcccttgtgatgacgagcacaggtccgcctgtgtgcccgtgggctgctctctcaccggtggctcgtagtcgcgtaacgcagaagtagcagtttcagcggctgacactaagaacaatgcatactggcaaagtgaggtgtctcacatctttaatcccagcaatttgggaggctgaggcggatggatcacttgaggtcaggggatcacaccagcctaaccaacatgatgaaactccgcgtctactaaaaaaaagtaccagacagttagcgcggtgtggtggcatatgcctgtaaatcccagctatttgggaggctgaggcaggagaatcggttgaacccgtgtggcagaggttgcggtgagtgtagattgcaccactgcactctagcctgggtaacaagcacaaaactgtctcaaaaaaaaaaaaaaaattcatcagtgcagagttaggccagattcattttcagagtaggagggaatttcaaattttgggtgaaatgtcccaactgccggaaggtgaaagtgttctgtgatgtaaaatttaggtcacactctataaagcttctccttattctatgtgtgaacagctagtctgtatcttcacctatgcatatttaaaaatcaaccttaagaaggctcttggccaccataatccttcctaccctgtagcaagagcccagcctcagactatgcttccttctgcctccgagtgcaatgccttcccccgaatctccaaggtaccaaaccggtcaggggcagctgagacagctctacttgtacgagtcctccccaagcccttgaaatcacaggcatctctgctgtccctgcccttcatccacatcactgaacaattaagcacacacatctgtgtagttttatttaaactgttccatgtgtgtttgtttacaattaacaacatgaatgactgcaggatggatgcagcagaaaggaatgctgagggaggactccagttggaatgagccacttttccaggactaggaatgaactttccccaataccaacaaggcagcctccagggcaagaaatggtaacagaatccatcctgttgacagtcaagatggaattacagagaattctcacctcttttttgactctcaggtggaaacccccttcccatggggtgaagcgcagtctgctccagagacccactgttagggtcggggatgtcacagaaattaacagggcagccaattcccatccagaggggcccaggatgaccccgaaccctctagctcagccccaagctcgggccagggagtgaagcctttgtccccaagcaacagagtgagggtctgtctctaacccggtgggctccagtgaaaggaaaatggcctggaggtgcccacaggagggcgccctagttctgagacaggtctacggctcccagactgtgtccccatgagtaacagagggacacgcagaggggcatactgagtgcctataggggactcacagactgcagatgcacgctgcggatccagaagccggtcaggtaatgaggtgcagaggtgtggggaagacctgggtgcctccctgggtgccaaccagcctaaccagccggggccaccaaacagaagtgcttctgacattaacgcgacacacagaaggtgtgtagggtgggtagtggaagtgaccgcagaggcctctggggattgtagttttggagctagagaggcaggcaagcagttgggttcgcccacacggtgtgcctctcacatctgcacagcgcacacaaccaagcttaggagccgactgttaagatgccccagtgacacggacaagtttctcctctgcaacccaatgagagctgctgaccacgagagcatcgcgggaccgccaaaggattctggaaaatgtggtcccgggtggccagtgtgcgctgaccttcacctgaaggtgagctgagctcaccatgcaagtctccaccctggggtgcccttccccaagcagatgccaggttggggcagaagcagttcagggagaagcgatgcgctcctgggactgccggtttgggggcaacatcggccctgtgtcccctagagtaggagggtgtaccaggatggggaaccccaaggccgttttcagggagaacaagattggcttgaggcaaactcccggaatggagatggggagagtctggtcgcatttccccaggagtttaggggatgaaggctggacttgggtgaacagcaaaagatcccctggtgatagtggtggtgaggatcagaggcttgagccagaaattcccgaggtgtttgtttgttttgttttttttgagacagagtcttgatctgtctcccaggatgtagtgcaatggcatgctcttggctcattgcaacctccgcctcccaggttcaagcgattctcctgcctcagcctcccaagtagctgagattataggcacctgccactgtgcccacctaaattttttttgtttttttgtatttttagtagagacgatgtttcaccacattgcccagcctggtctcgaactcctgacctcaagtgatccacctgcctcggcctcccaaagtgctgggattacaggcatgagcccccacacccagctcatttttatcttttaacttaaaggtttttatttttctctatttttactcttacaggtacggcttgaaggaaacttctggagggtggggtggtgttgaagagaaggcacaattgtcaccattttgttcaacatgggcgttttctttgtgcattgatttgcatttttaaaggtattccattaaaaatatgtttatctattttaa

SEQ ID NO: 9 - DNA, 95915 bp, Homo sapiens
ccggtgcgggccggtgcgggccagtgcaggccaggcccggccggggcgaggcaggtggccaggtccgaggaccgcgtcgcacagcagctttcaggacctggagagaaatcgaggtgggggtgcgtgaacgtggatgggcagaaataacatcttttgtactctaattggaacatagcatgtcctttaattatgaacgcaatgagctatagtagcactactgatttcagagatggcgcaatctcgctttccttccttagtactttgaaattgcagtgggtattagacccgctgctagaccgtgtcattcactgggttaagaaggaagcccaggtagcgccacgtcacagaccccttttagtattctgataactataatttaaatctaatcggcatttaagagcctacaggcttgcccagactgccaaaggcgtctctggcacacacacacgcacacacactaacatgcacacaagcagacacacatgcacgcagacacgcacatgaacacatgcacacgcacacttgcatgtacacacgtgtgtacacatacacacatgcatggttgagaacctctctggagaggaaaggcaacaccagtgtgtccgctatgtagtggtttatcagacagtttattgtggacatggacatgaataagaaaggggcactgctaattaggccaaggcagtggatatgaggtgggactgtccctagcacactgggaccagggctaccctgaggcctgcaggacaccgggagctgtgtgtgagtttgcatctctgtaggcgcgtggctgtgagtgtgggggaacctggtgaaacgcatctgaggaggggagggggtgtctgccactgttctgggtgtgtgtgtatgtgtgtgtgtgtgtgtgtgtatagggcattctgatctctagtacctgggttctagcagatgcctgacctacagccctgtgttcagcctggtcattccagctctcagagagaccttgcccagccatttcctggggtagcaaatggtctggaaccagtctgtcttgcctcccctgagggagacaggcgggctacttgtgtagccttcttacctcactaaactcttccttccttccatgatgatccccgttttacagacacagaaactgaggcccagaagagctgaatatttggcccaggccacacagggagtccagccacgggtgatgaggggctgaggatcggggagggacaggaaacctggcctttctgagccttgctgtccttatctgctgcgtcaggaggtgagaggaagatgtttggggctgagctagcagagaggacactgagcttttggcctctcccctgtgtaaaccccaccatgactccccattgccacggcatcaagtcccagttccatggcctgacattccggtccctgcccccttcagattcattgcccatcactccccgtccactccctgcactccagccaccctggccaccagcccttcctagcaccctccaagacccttctcatctccacgcctctgcccattctgtacctggcaaactcctacgcatcctgcaatgctcagctctgagcaccccacacagagttggcatctgcctgctgtgtgcccccaccgccctcacacatccctgcaggtagtccttctcaggactgatgcagcaaaataagatccgagtccccagcacctagcaccgtgcataaagcaggcactaacaaatgcgtgtcgaatgaataagcaaatgtgtgcgtgcacactccacccgcccccctcctcatgaactgcttgagagaagggctgggtcctttccagctactcaggtggcaatcggagtttgtccaatgtccaggctggagccagagttgaagggaggagcaggctgggggtggtggtggctgcatttggtgttaggaggcccaggctgggcctgtgagctggacaccccaccccaacacctgaggtatctgctccaggtccctctctgcatgctcctggatggggcttggctgtggcttccactcaggcccctggatatccccactgcagcttggccctctgtgactcactctttcttggccctaaaggtcagtgcagggccaggcctcgtcctcttctctgtccatttatcaggtcggaagctcaaggctgacctggctggggccaaggtttatgtgcttgttcaccccacccagcacctctgaccttgtgaaacatgccaggaagggtggggacaggaaggtgacactagggcctctgtgtctgccccggggcactgtcagctgggtcaggatttatgccctgatgttcccacccccagacctggtcaccaggcccacgccctaggtctggtgctgagccatccctgcagggggcccagcaaagcctgagggctgggagctggctggggtgcggggtgggccggggttgggggttggcaggaggcaactgcagattaggtcccaagtgaacactgctagcgtctttgtcctgctgagagacatcggctgggacatcttgcctcctggggcctgtttccgcaactgtaaatgggcattgccttagtagccaccctttggggctcttggatagcacatgtccacagaacctcagctaatgtgcctgcctgcagtgttccccattttcttttggggagctccccttgccagtaccaacgcacatggtctttgctgggccatcctttgcacactgtatctccagacctggggcttgagagggcgcctcctcaacaagggccccaaacgtgggctggggctccaggggcaggaggtaagggaagaggtggttttagtgggtttgctggcagcaatctgaatccaggggttgcagcggaaggaattggagatgggaggaggcgcaaggccagttggatcaggggatacgcaggagatggtgtctttggtcacccagttgctcagtcggaaacctggacagcctggcccctgcccgtcccctcatctcctagccagcggtgagtcttgcacagccctccgcccacccactccagcactcgccacttcctgcctcttcccctacctctactgccccggcctgcttccactacctgcgtctctcaccgacgtcactgcaatcgcctcctcggaggcctctgcctcctctcttctccacaccctcaccctccattgtcactaccttgctcctcacagctggctaagccattatgactaatgactgttctcagctcccagccccatggtttccatcacaccaggatacagtcacattccttgccgtggcctgtgagacccacagagtcctggcactgccgccccctgaacctcctctccctcccctttctctgccgtgtccacagctcagtgagcccattcccacctcggggcctttgcacttgccggtccctctgcctggcacatgctggcttcagtgttcataaagctccctccctcccgtcactcaggtctctcctcagatgtcacctcgtcagagtggcctgtgctgactgccatatctacaatacccttcccaacgcctggcatccgcctcctcactcttgtatgagtgtcttcaaggcacgttcacttgtggctattgcttaatatatttagttgcaggagtataatctgggggcccctgggagacagaccctggcatgatgggtgttgtgatgggggaaaccgggccatgtcctggggactgagagcaagttgctgcccttctgggcctcagtttccccttctgttccgtaaggcccaggctctctccctgcccgctcacgtgtcctgggaatgctgagcctttgctttgtcctggaagtggggttgccatggaaacagaggcaggaggctccagcagaggcagcatccgcctccctttgttagacccagggcctgctttctggggggcccccttctgtggaggagtctgtgcttcttgaggggccagtagcctctacttggccctgctctggccgtcctgctcccagcccccagcttgcaatttgcttcactagattgtaaagcagatgatgaaagggcagtgtaccaggttaggagtggaaggtcaggggcatcaggacccagggcaccgggaagcaggagtgtgttctcacctcaagtggctttagacagttcccccatcgtcctctgtgcccctagccctggcactccctctgcacacagctccgctttgatcaaaccagtgcctggcccacctccctgctcccatgcccactggggcaggatgtgggcttggcggggagtgacacatggcagccctaggcgtggcgacaactggagacatcccgtctgcctcaggttcccccttagggccgggcgatacaggaagggggacctgctcgtgagcacagctgggcgatgggatgccaactccttgcccaggtagccccaggacggcgctgcagcaggagtgtccctgatcccgggtggtcgctctccagcccgccaggctctccgacgggctcaacccgcagcccctggccggggctggggccgggacgccaggcccctgtggggacggttccctccagcagttggcgaggctcggccggccaaggggccggttcctcccgctggcagccgcccggccgccgccttccgcccttgcccgcccgcggccgtccccgagccgctcccggccgggccttgagcgccttttcctcttcccggcgccccggccgcccggcgcgtccagctaagcaggaagggcccgcccgcgcccaaggccagggcctcagccggaggtcgcccgccgccaggggccgctgcggcgccggggacgcgcgaggcctgagggtctcccaggcgcgcccaagacccatccgcgccggccgcctgccctgctgcgtctgcccactgcccctggggcgcgtgatggtcccctcgacgctccgccctggcttcccccattagtgccattagtgcctgtgtgagtgggacctgggttggagggacctgccaagctaaccctaggggacccctcctccagggagccacctccccctcgcactttcgaggggagtggctgcccagagataaccagagactgcagggcgccttgggccacctctctggaaggcacagacaggtgccatccttttctgggcctgaaggctttcccagagagcaggaggaggaagtcccgggaacatcccattaaggagatgacactctcttaggtgtctataatatcgctgctttggaatctcagcggcagaattcaggacccctgccctcagagtttcagtacagtgtagccatgaggcacccggatggcttgggttcaaatcccagctctgccattttccaggcaagtcccctaacttctctgggcctaggtttcccatctgtgagatggggctgctgatggtaccagccccatcgggttgtggcaaggactggacacccagtgcagttaagctctagcacagcacccgaggtgatgattaccatcactcgctacagtggattggactcacagggtcaggagcccagagacttacattggagcacagagattcagggtcttgagaaagatagcaggatctaccttgcagggaatatttggtccaaaattttctcttcctgggaagaaaaggaaaatgagaggccccagtacattgagccacagtggtgaagtctgtgccaggccaagactgaggccttggagatgcaaaccagctaggtggcaggggccagttgcaaaacactttgagccccaggctccccatctgtaaaatgggcactgctgcctctcatgcggggcacgtcagggatggggtgtagcacacataggtgcttagcaaacatggggaggagtctcccctactttatcacacagcaagggaggctttcatggggagactgggccggctgtctccttcttcccaggagagagtgatgacaacagctgtcgggccatcctcgaaaggtgctgggcaggtggagggcagccctcggtgcccctggttgtcccctgagccatccatccctcttccctgctgtggcttccatgccctgagcagcaagtgggaggtgaacagtagttggagagggggcaggtgggcacaccaggtgtgggtgcttatgaaggcacagattcagagcagggacaggttcaacatcagtgagatgggggctttgtgaccatcttcagtagcctcgcactgtacctacatggaactgaagcagaggaggataagggacttgcccaaagccacatggccagacagaggtgtgtaggacgaagtgggccaagcccgtatgtctcttgcatgagcaatgtccatgcctgattcatttctatagacccctctgtatcagcatggagcagcatgaagatatatttgttgagtggatgactgtgtctgtcaggccacattaccaaaggtctatacttgcaacgagggaggggacatccagttttgctttattctctgagctctctggctcctatgctcagctccagacacatcagtggaccctgagatgaacagcaagccctggagacagcattctgtcaggagatggggtggctcagcttggagggggtccccactgctgtccctaattctctgcagggttgtcctggggcagaagggttaggaggagctggtagatctgtgggcaggaccgggaccttgggaagacaggtcccaagcttatgaagaagtctcccagttttactcatagctgccgtatgggggtgaacaagttgggacagctatttagtggaaatgttcatgcagttatttttccaaaagtctttatcggtcacctactgtgtgccagacactggagctgatattattttactggagaatttgatagtcaacaaataaacaaatcgatagtatgacattagatggagacaagtaggaagatgaacaacaaagcaggactggggtcagagggcaccagcgaggggccttggttagacagcggggctgccattgggcgggaaatgggatgatgtgaaaagcgaagcgaagagtgcgccaggcagagggacctgcaggagcaaaggctgggaagtgggaatgtgctgacaagaggcgtggctggagtgtagtgagcgagactcccgggcagtactgtgccctgcaccccagtgccctcttgccttctgcccggtgcagtcaccccttccttactcaagcccgttccacagccccaaagctccacggccccaaagctccacagccccagagctccacagccccaaagctccacagccccagagctgcgtggctccggaaggctgcgtcaaccccagcgaccacacggaggcagcagagaacacggctgggacgagggcggagggtgaggactgaatctgagcaccctggggactcccaggtagccggggctggagacaggacccctcccttgctgcttctttgtacccagcatcacatctctcttcgaaagttcctccctcctaagcagcatgaacagtgcctgctgaaattacagctccactccactgctctggaaggctcatctcttcaagcctccatgcctgcatctgtgaagtggcagcaagcagagtttcatctctaggggggtacatcgcaagtgctcgggaacgttgtcttcttgcaaccatgtgtgcctcacacaactacctgtgtgactttgggcaactccctgagtctcagtttccaccctcgtaaagtgatggtaggactatggtgtggggatcttctgtatgccaggtacacatgcataatgcatgcacagatcctggcacttagtcaatgcccagtgacaataactagtaatcatgacaattgcattgatgacctgggggcttagagtcgggagagacctgctattcggaggagaacattgaagcttgggaagaagaggtgtttgcccaccatatactcaccaggaatgagaggcccaggggtcccctcaagacttttgtccatttgacagatggggacgctgaggtcgggagagggttggcagcctggccaaggccaccctgtggcaggcataggactagaatccaagatgcctgcttcccttcacggctcatccaaccatgtcttggggccctcccttctagggcaggtggtttctcaggctgcagctccggatgttcctttttcttctccaacctccccccgcccacacccatgccagactgtgtaatcttggaaagctgcattcttggaaatctggtcccttctagtctttgaattcttcgaacttcctattggagctgcggcccctagttcccgatggtgcctgggagggagcctcctgattttgatgtttttcagagggaatgaggtgtttccagtaggtgggcagcccagggtgggtgggtggaggtggcagtgtggatggcagttggatgcagagaggaggaaggggacttgggggggcacctgtgagcccccttccacgggacttttccccggggtgcactttcccccttggcttggagaggaaacagttttccatgttcctttctctctgtgtgcttgggagacacccacagccctcttggaataattcctctgaaacctccaatacctccagcgtctcccggggtatttttcttgtggttaaggtggtatttacagtgaaaacagctattgaaacgaatcgcaaaaataatgtcagtgtttccacttttgacaaaaatgggaaggcaggtggtttcatgtctgcgataagcgcattgctcctgcaataattactatttgagataattatgaaaaagaatttaaatacttaaggcatgcacaggggccaggacaactttcttttgccttattcataatttctgctgcaagttggagtcttgtcctgactgggacgtggggtgggcgtgggatgctgaggagcagtgggccagtggcagacccagcactgagacctgctcgaggtttgaggggcatggttgggcccagaaagagtgcacatcttggagtgggacacacctgggtggaagatgaatgttttagcaaggccatcctaggcaactttctctgcacctcagtttccttatctgtaaaatggggtgaatatttgggccttccttagagcattgtatggaaattgaagcagacagtgtatgaaaagcactcagtgctctacatggtctacagccagggctcaacacgcgctgggtcccttcctgtgacatgggaggcctgggtgagcttccgctgctctgttatccactgagatcaaagcccagagtctgagaaggccccaatgagtctgtattttcttccctgctctctcctgcttgaacttcttcccaaaagcagaattcagagagtggcagggcagcaaatgcccatgagattggagagaagcagcctcagggagtcctggtctctgcccctgcgtgagcccagagggtaagctggggccaaggactggaggccaattccacctctgtgtgtggcccgggtttcccagttggaactcagcaggactgggctggactgggagggaggaaccattctcccagtcacctgagatgtccaagcagcacctggctgaccatctgccagtaatgctgtgaaaggggcaggtgttgggctgttggacccctgaagacctctagtcctgagacttaagggtgagtcagaaccaaggtatcctaggggctcacaagaggtcaaggcaggtgctgttagttctgccctggctctgccctgactcatcgcatgggtcaatgcctgactcaggcctcacttgccccatctatgcaataggagggttggactgtaaatgaaaaacccaaagaacaatggcttcaagaaaggagaaatttctatctcattcatatttaagcctcaaggtaggtggtacagatctggcatggggaacagcttccttctagctcctggctccacctaaccaaggaggaaatctggtccttgtggtccaagatggctgccagagttccagccatcacatctaagttctaagtaggagggaagaagaaaaaaggacagactgtgggtatcagatgtcttttaggaaaggctcctggaagctgatgtgggacacttttgcttatatcctactgatcagagcttcatcacacagccacccttagatgccagagaggctgaaagtgagggctttattctgggagcccagctgaaattcagggaaagaaggggaggattgtcctggggtctaccagctgactctgccacaggacaatctcgtcgggtccttctgctttgagtcttggagattctgaggctctggaaaggcacagttttccatgacccaggctttaagaacagaatgtgggctaagctgaaataaatgagttttcaaaattataagattctggaatttccaaacacagtgtgtgtgtgtgcatggcatgtgtgcatgcatgtgtgtatgtggcgtgtgtgtgtggcgtgtgtgccgaggagcacaggtagcagatgtggggctgtcgcagggcgggggctgctggtgccccttggtgggcagcctctctgggctcgcaggctgctccctcagctcctggaatctgctcctgccggcctgtttgtacacgtgcctgtgtgcactagagccccggggccggggtggtgggaggggggcgcccaggaatgcctgctgtttttaaggcagagttgtctgtgcagactccagaggtctggctccgctgacgggtgactagggggtgaagggcgccccagaacaagttccaggcacccaagtgggtgcggagggggttatcagggtcagagctgagcttccatctgatggcctctcggttctgagtcaagtatgaattttgtacctactttgtgtaggttctggcctttaggaggttggggcattttaatgcctgttctggaggcaggtggaggccatgatctgattgggcctacactgtcatatgccctgggcaaaggaaaagtctctgccctccaggagtcaattaatacagtcaattaacaaaacaaataggcaaataaatggcctgcactaagctctagggaacaaacccaagcaggaagtggggtgggagagatggcaggggttggagtgatggcgaggcgatggtcaatgacagactcactggaaaggtgactcttgggcaaacatttgcaagaggaggagtgagccaagtaggcgtctgagacaggggccttccaggcggtaggcacatcccaggcagaggcccccaggcaggcatgggcctggtgcgcttgaatactgtgcaaggccggggagtagcagactgggtgcagggcgatcagagaggccacatggccagaaggtgtgcagcaccttgaagccacagtatggagtttggtgtgggtaaggactttgggcggggaccctgtcaggaggttctgaacagtggagggtggtggtctgacctaggtttacatggcgtgctcctggctgctgtggggagaatgtagatgagatagagggtggtgactcagtttccccacaggctgtcttctcttccccagtgccacagagctccaggtttcccggttctctccagagtcctcctgttctggccccctttggcccttctccacagccattgttctggttcagggctcatcttcccttactggcgactctcttgctcctgcctcctctggtttttaactccctcatgatcgcaaagttgctgcagtggttccaggcgtctctggcaggatttcccgcagagccagcagaggttctggcctttggaccgattggcccatttttatgcctgttctgggggcaggaggaggccatgcactgattggcttggacctggttcatctggaccaatcgtggagagaaaggggcgggatgtcgtagaccggccttgggtagcccggctagccgttcctagtggcccgtgtgtggcgtggtgggaaagggagtaccccgccatgcccacggctgtgcccacgctaggaatgcggtctttcccgggggtagcttagtgtcccgtgggaggcgtgcctggggctccctcatgccccagctgctcctgccccacgccatcttcaggctggattatttaatatatacacacacacacacacacacacacacacacatatacacacatatatatattattatactttaagttctagggtacatgtgcacaacatgcaggtttgttacatatgtatacatgtgccatgatggtgtgctgcacccatcaactcgtcatttacattaggtatacctcctaatgccatccctccccacttcccccaccccacaacaggccccggtgtgtgatgttccccttcctgtgtccaagtgttctcatttttcaattcccgcctatgagttagaacatgcggtgtttggttttttgtccttgcgatagtttgctgagaatgatggtttccagcttcatccatgtccctacaaaggacatgaactcaaggctggattatttttctatggggcttgtagcaaattcccacaaatggggcaggtgaaaacaacacacacttattcttttgacggttctgagggccagacattcaaaatggcttttatgggacaaaatcgaggtgtcgcctgggctacatgccttctgagaagccctttctggccctttccagattttggaagacacctgctctcctgggctcagggcccctccctccatcctcaaagccagcagcgaggccaccccatctcttccactcggacctcctgccttgccccatctttttttttggagacaggatctcactctgtcgcccaggctggagtgtagtggcagatcttggcttgctgccacctctgcctcccgggttcaaggaattctccttgcctcagcctccggagtagctgtaaagcgggtccatcagtcccaggcatgggccaccaagctcggctaattttttgtatttttagtagaggtggggtttcatcatgttgcccaggctggtcttgaactcctgagctcaggcaatccactggcctcagcctcccaaagtgctgcttccctcttatggggaccttgtgatcacattgggcccacctgggcagcctggtgtaatctccccatctccccgtccttgattaaaccacatctgcaaggtctcttctgctctgcaaaatattcccgagattaggatgtggcctttcttcttggcagggcgtgggggagatgcaacattttcctaccacagtggcttcatcctactcggtgctggcatggggactctctaaccccgactcctctcggccgcaggctgccccgatggctcagggtgggtagctgagtccaggcaagccctgtggctgtcccgtccgctgtctcagctgctgagaggtgtgtggtgttggatgtgccctgggtgaaatgcatgagacttgaggtgggaatggtttccttttgctcccacctctgaaccagagcctgttcccagctctcccttctcacccttcccatgcgggccttcccacctgctttctgggctggggagagaaaaggaaagtgtcagtgaagacacaggaattgccccaaacctgcagccatggctgcaaatccaagggtgcacactggggtgtccttggcctgagtgccagcctgcagagagcaggagtgggccacttggggaccccatcccaccaggaagcctgagaaagcccagggtgagcccggccctgtggaattctggagagcccgagaagcatttgcacagtcacccagccgggttgggactgatggacccgctttacagcgcagggaactgaggctccaggtttagggccaaattcccctccctcatccccaagtttccctgctccctcaccacaggcgcccttccgtccatgagggccctctctggaggggccttcttcagcttgcagggaggttttatctgagactcagtgttttaagtgattcaatgaggagatttcacatagaaatctggatttttttttttcaaaaacaatataataacaccaacaggagcagctgagctgcctctctcatctcccttctgctacctgcgttgcctttacagccccagctggtgcagggcctcacctctcttagcccctcctaggacactctgtcccactgctctgaagctggcggggcctgggaagcagggacacacttcgaagcctcgagaagccacgatatcctggtcaaatctgatacagggatatcaatccccagggcagggtgctgaggacaggccctgtcgctggagggacacatggcagctgcccgctaatgcacaggggccaagcgagtgggtggctgcagagaaggaaccatcctgccacagccttctccagatcacaggctttgaagatttccagtccccgcagacttggagtgtagacacccagccccgtctttgactagctctctgaccttcagtgctcccttgacctttctgagccatagttttcccacctgtgaacaggtgcgtgggttgggtgacatgttctataagaggctctccagcccaggtgctgagatgcagccctgagcagcattttaaagtcataaggtgctgggttcaaagcctgtttccatgttaccctccccaaacctccactttcccatctgtaaagaggagtcattggtccccctgcctccttcacatggttgctgttaactgtgatgacagttaacttgaacttgctttattaagcatccagactaaggagaggagggacttagtgtatatgaagtccctgctgtttgccaggcactgtgtttgacagtggaacctcatggccatccagtaagttggattcatccctcccttagtcgcacagggaaactgaggctcaaggaggccatgtgagctgcccccatggggtggcaagtgtggggagatgtctggattcgaacagaggctccttcctcccacctcagcacaggcgagccgctggggagggaatgagtttgcgctccctgaggatttcagtgctggcttccagcctgctgtgatgggcgtgggaggtaggtcgaggtgctgggcagggctgcccagggtgggggcaggaagacaagggggccttgggtgctgccaagaggtattgattccaggcatcaggcactgggctgggtcccagccaagagatgaggtcatgaaggacggggacggtgactccgggggctgtggcgtccccgccgatgacgtgattgccagacgtgaggaatctctgcctggaagatgcaggctctctccttccttctccttgacagtccccttactccagcctgttgtgtctggggaagggaggcttatgggccctgccttgctgctcttgggctgtgtgaccttggacaagtcaccacccctctctgggcttcctcggaactccagggctctggcagaacctctaatggagacctttgatcagttctcacccaaggctctcaatctcttgggaggttcagacaggtagactggactgtctgggaagtgggtcatcagcagctccctgcaaccactcacaactgcctcggcttccccaccaagtcgttaggaatagaaggcagttatcctcctggctccctcaggacttcccccagtatggaggctggagtgtgcagtggggagtcagggctccaggctctgccacttctaggctgggtggcctcagggaaattgtttaacctctctgtgcctagtttcccatcatggtgagggcatgtgtaaagctgccctacacagggcccggcacgtggttggaactgagaaatggtgagtgggtgggtagaataagttgtgctctcatccaatcacaggcttccagagtctgtttgagtttgggtcccagctttggcgatgcttagctgtgaaaccttgggtgggttgccacccttccctgagcctcagtttccccatctgtcaggtgtcaatagtatctcccagattggaatctgtgcggggtaagcttggacacagggcttggcacctgacggcatgaaaggataggtactgcatcaccagaggactgcagatggcagacggacccatcccagggaccagagtcatgaggccaccattctgggacccctcttggctataggaccacaaagccatgcatctctttaaactttccctgtgaacttaacctgggaattgaagtggcttttaggtgaaaaaatattcagataaacaaaaggaggacaagaatacttgcctgcaagtccctctcgtagagacggtcattagcatcgctaatctcttttcttatgcccatatatacatatgtatatttagaaagaaaggaccatgctatttttcattttaatactatatagtgctcatgaatttgtgccattaaacatttctctataataccatttcacacggccgcatagtatccggcgccttggcagggtgtgatatgtgcagccaaaccctccatcaacactgcagtgtttcctaggttttccctgctgtggtgaacatgcccctgatcacccttgccactcaatctttgtctacatctaatgctgcttccttagaatcagtgtcttgaagcaaaattgcctgttcagagtgagcatttttaatgtttgattcgtgacaccggttccttactcccacagctgtgtgttagtttttatgcaaaatgttctgggatcaaaagtgatccatgctacgtttgtttcctccttcatacagaattccccatgctctggaagagctgataccctctagggaggcaggctttcttcctgggatccttaacgccagcctcatcgcctcctgctgtctgaactggatggagttcactctgggttgcatcatgccggccacctcattgcttctgaagcatatgccaaacatgttcctgcctcagggccttggcacctgccgtttcctccgcctggaatctcttcccgcagatagccaccatctatctttttctccacaactcaaactgtatctccagagaggtttactggttacccacgttggcttaaatgtgcctgacccgcccccatcccttcactatcctatctgtcttcatcacggcaggatcactttgggaatgtgtctttttacatatttgtttgcttgtttaaagtccagatctctcaggggtacggtgtggcaccaaataaaggtagtagtgggtggtggctgaaggtcaatcctggtctctccataacagaaaaagcagggacctcatctctgttgctccccgcagctcctcagagcccagactggtgcctggaaatgagaatcagaataactgtgaactcggaaacaggtgggcagtgacccaagtgtgggcacctttgctttcttgttcaatagaacacaaagtggccatttttggggtagggagtgcagcaggctgggcttccttcttcgagtctcagtttctccagctgtaaaatgtgaacaactttctaactagcgtgtgtgctgtgaggaagaaaggtgaggatgtatgtggtgtgcccagcactctgtctagcacacggtagggcagacatgcagagctgctgcccatttccaggtggggggaccgttcttcacattccatatagacgacctcatttcatccttctaacactgtgtggtgtggggtgagtcctatactaatcccattttacaactcggcaaactgagcccagagaggtcaatgtccaaagacacctggctcacgtggggtggaactgatattccaccccagaaatgtgtcccccttgtctaaccactgcatggcccagactagtaagtggcagagatgccttaatagagcaggaatccagtctggccccagaggtactgggagatctttgaccagcccatcttctctacaggcctctgtttcctcatctgtaaagcacacaacacactcgtgtcatgtccactttcaggggttcttggggggaagtgggttgagtctttaggaagcttctggctggagggggactgcagcccccaacccaggataatgggggaagcaaagaatggaaaatgaagacactgggaggcagggcaaggaccagggtctgactcaggcactcaccacgaggtcactgtgctgccctcccctcttccactccccctgcctaccatggcttcctcagggagaaatgtctccatatctggctcctggctgcgcaaagaatggtgaggggcattgggctgaggtggaaatggctcaaaaccctgactcaggactcacaatggctttgtcatattggcaggaatcatgcaaagtgaatttgactaggaataaatgtcaattccagcacttgggtccaaaaagcaaactgcacatggccaggataggaagatatggcttagcactgttcatggtgcttaggggctcagccccgtgtggcacataaaagcaaatgtgcccagaggccacattacctagggcatagagcctagaaggagggagctgattgctgcctccacctctgtactcttcagaaccccctaaatgttgcagctgggatcctttaccgaaggacaggcatggactaggttgtgtccagtgggtgtggccaggcaggagagacttcacttcgtgaggggcaattggaggagctgggtcactcagtttggagaggcagcctcaagggtcctggtcactacctcctccagtgtttgcagggctgccctgaaagggccggaggtgggaggagcaggaaactatgtgggctgggaccctctatgtataggtgtctgatactgaaggaagctgggagctctgcctgagtacgtgcttgttcctagtcctagtttcttagagaagggatatctaggaagacatgtattccatccatccacccatccatccacccacccacccactcatccacttattcagccacctacccacctattcacccacccacctacccatccattcatctatccacccacccacccactcatccacctatccactctcctacccacgtgtctgtccatccatctacccattcagccacccactgacctacctatccatcaacccacccacatatccactcacttagtcatccatccattcaacccacccacccaactgtttatccatccctatccatctatttatccatctaatatttatcaagactttgtactagcctggggagagtgatgaaaattggcaccacctctgccctcacaaagcacaccgttgagctggagtgaagactaaacaagcaataacacctagaaggcaagcacctgactgtggaggtggagaggcggcttgctgaggaggactttagttgtcagtcagctaggagggtgggtgacatgaccttgggctctgtcagtaggaaggggcaggtcatatgggggccctgacctcaagctgtcgttggccttacagaccctgattcctagccctggaggccatccagagcatctcatccagggagccgagaggtccttccaccaccccgctggggtccagcgcagctgggccaggagaagggtggtacatcactcctgcgagtcgaaggcgagacagtgtgtgaatggggcctggactgcccaattccctctaccaaagcaactagaaccttcttctgcattaggtgatgggtacctgcgtgagctgtcatttgaagacagggttccagagcacaaacaaattggagcccctggtcctctcagctggcatctgtggatttggcctgcctggcgggccaggccaatcagagaagagaatgccctattgggcacagtgattggggctctggcatggtcacatgacatgagacaagccaataagcatggatcctgagattctgcttggcgtctcctgggctgtacttcctgctttgtgctgggattggggccatgcggctgtaagtccagagctactgcaggcctcttgccactgtggggaacccagcctaggatgaagcacaggaatggaaacagctgaaagaagcaagacacagggtcctgaccacatctgttggagcctggatccaaccttgcctggatctgcaaccactactgagcttttcatgtacttggtgccaatatattccatgtctccatttttaaaagtaaatttgagttggatgtccttttgcaactaaaacaatcctgacctatatattctttggcattgtccctgtagagaaaactgagacccacagagggaaagtgacttgcccaaagtcatccagtgaactggtaacagacccagccagaagtctcctgcctgtagccagcactcacttcccacggtttcccatgctttaacctggacagtatggcttctgggaagcataagccaggagggggcaaggagccccctgcttgggcagggaagggtgagccagttcttccacccctgcagcaggggtcctgtctctgccatggcggcacctgtgggcaaggagggagccagcacagtcagaaatgagctcagtggtgaaggcgtcttcccaccactgcagaacccagagctccatatcggaggtgtgtcagtgcccagcttatgctgaaattcagctattcatggagccgcagagttccagggggtcccttggcatctatggtaggtggactgggagaagaacgactacactttacgtcttttttttaaaaaagttttccttgaatggttttgcttgaaaaataaataggggttcaattctaatacattgggcttgggtctacagccattttacagagaggaaaactgaggctccatgcagtcagaactttgccaaggacttccaagagggcaatactggctctgggattctgattttctctcccctcccacagccttggtgcgctggctcgccatgtgacaaaggcaagacctcaggccccctttgagcttctgtgggatgaggtggtctctaggagtgcaccaggctcactctctgcatccccggccgcctcctgggttctcctgtcctcatggttacctttaatgaaacaagaagtcatttctgtctttacagaaaggacagatgaatcagagggttgttcagcaaagggactaatgcacttccccagctgacttcgtcattcctttgtgccttgaatgaaattcctctccagtacatgcctttcagaaaaaaagagaacatggtgcaaagaatccagagagatggattgaccctgataatatcaaagagttaatttctgagctcattcctaagctgtcaggggtctggaagactttctggaagccataaataatgcattttaataagggggactttgattcctctctgggggctgaaactgtattgtgattcaggtggcaacttgtcaggacgccaacgtggggtttctctggcacttattaagggattacatattttgggcatgtgcaggtcttcatggtctactggaaaaccatcctgccaaaaatgtttttgacctaaggaaatggacttttagtggaaaacaacccccctctgtctcaagttcattgtttatgagtttcaccctgaatttgatcgaaagtgattttttaattattttcaccattcctttggcgttgtggcggctgtatgactcaaagatgactccagtttcccacctcatggagccccatgtctaagttcactgtggatactggaattctggtgtcctggggactgtagaaaccctgtcttagacaaccttcaggctgagttctgtctggaccaggtttaatctgaaagaaaactcggaagacccgggttctagcctttgccatgaatttgctgtgtgatcttgggcaagtcatttaacatttctgggccacatctcctcctctgtgaaataagaaccttaagtccagtgactctgtggattgatgttttttgaggtttggagaagaggccgttttctgtcctataaaatggggatagtgacactcttctccacacaagaggtgcttggttccttttcaaatcaacaaatatttgttgagtgccagctgtatgtgccggatcctgctgcagaaactgaagacagagacacaaacaaggcagactgagcttatagctgcccccaaaaccatagggcttatgtgctcattccaacatttgtgtgtttctttattctataaaggatgaaaaacaaaaatataggtaaccttggtagacattgctatttagctaaccgatacccatctccccctcttctcagtaatagggctctgattttgttcagagctacctatgcccaggtaaaaacatttctcagcctcccttgcagctagaagtggacgtgggacacagctgtagccaatgaattctaagcagatgttgttgagagaggcttctgggaaactcattttgttgtttgttccctggcaattatttccctttctgcctgggatgtggatgtgatggctggaactctgtagctgccttatgagcatgagaaaggggcacacctgaaataaggcagaggagggtggaatggagcccaagtacttgggaatagtgtagagtaggtgtctaggtctggtctgtatacctcctggcttctagttctatcatgttttaagccactgttatttaggttttctatgctatacagccccgcagacatgcaatggcaaacaaaaacttcagggaaaggcaaaataaaaatctaactagaaatcaagtctgggaaggccgtaggaatgcacccacatgggtcacagaattctgcatagctttacaagctgacctgcaaatttggctttgagcctcctagtggccaagtaaaggaggaaaggccaacatggatttcattctcatcatccccaaaaaggaggtgttgggccgggcacagtggctcatgcctgtaatcccagcattttgggaggctgaggcaggtggatcaccctggccctggccaacatggtgaaaccctgcgtctactaaaaatataaaattagccgggcgcagtggtgtgcgcctgtaatcctagctacttgggaggatgaggcaggagaattgcttgaaacgaggaggctgaggcaggagaattgcttgaacccaggaggaggaggttgcggtgagtggagatcgcaccactgcactccagcctgggtgacagagagagactccatctcaaaaaaaaaaaaaaaaaaaaaaaaggaggtgttgaaaatagagtttcagagtttcagtttttcctagtactcagtcgtgctacatcacaaacagaattttccccagtgtctgggcccagtacccggcagagagtgggccctgatcaatgtttgttaggtgctattgttgactcttctgtttatgtggaatgtaagtggcccctcaaaaccccctttggataaaccaaactaatctgaagtacttttgtcattgtgcatcctctatgtgcccttcccactgcaggaaccactttcagaggtaaattatcaaactgggcctcctacaccccaattcctgtccccgccaaaggcatgcagcccactgtccaaggctctgggtctgtctccctcccaccacccctggccagctttgtcagttacccccctcctgggtcttgaactctctctctctactggcttcttcactcagcctttaaacatgtgtgaacaacatgcatcagaaacataaagccctccctcacttcctttccccatcctgtttctttttcccattcaccaccaaacttgctaaatgagtcctctatacttgctgcctcagcttctacgcctcccactttctggattcatcgccaaactcggagaggactatttgcagaccttatcctacttgaacttcattcattcattcattatgcaaatctcactgaccacttactataggccaggcatcttctaggcatgggacacaacaatgaacagaaaagacacgtggagctgcttccagctgctaaatcgcccagtatttacgctatggagagaaataactcagggcagaggatgcagagtgctgtggggaggcaggggtgtcgtatgaggtagctagggaagacctgtcttttctgctcattgttgggatggagctttgcaaaatctccagtgcccactgtcagtgcaaagtcctgcaggtgtaaatatgcttggcttgtttacagaatagtgaggagggcagcgtggctgaaacacagtagggagagagtaggggaatatgaagttggagaggtggggtgggaggtggcaggtcttcagggtgttgaaggtggtggtgaggattttcgggcttactctaagggaggtaggagccacaggggttgtgggttgtggagcggaggaggagtgtgacttggcttaggttttgctaggctccctctggctgctgtgggaggactgagtgcaaggagtgagggaggaagcaggaggctgaagctgcttgaggggctggtggtgttgactcaggtgggaggtggtgctggtgagggcggctctggatgcactgtgaagacagcacccagggctcagcggtattccacgcaggtacccagccctccttctggaaaccctctctgcattcatctcctgcctttctctgaccactccctctgctccccgagtctccatcaggtgtccacatccccagggccctgtccttagttccttctccaccctcagctcctcctcccctcatcacctcagtagcgcagtcaccaacacctgtctgctcctcccctctccctccctcccaattccctcacctccttcccactctggccttacataatcagcccccccggcctcctccttggcctccctgcctccagtctcctcctgccaacctgtcctgacccacagttcaccctgtaactcagcatcatcctttaaagccctccagtgttcctcaccccaccaccagcctgcaagggaaagtctgaactctgccacttggcactgagccgccctcacccacctccagctctgccagcagcctcacgcatctaccactctccattcctaggtcgcagcactcgccccccacccctgtgtcctcagcgcactgctctcttggcctggaatgttcttttgcatcttgcccacctgcaaactgactcacccttgaaagagaatcacttaggatgcttttggctacaataatccgtccaccaaggacattcatttttatcttaaagtagcctggagatgagggggcagacgaagacatcagggacccagactttgccgtcctcccatgcggctgccccggtgtgttgactttcccctttgggatggtgcttcatggccccaaaatggctgtgaaagcaccagacattgtaaagccaaagcaggaagtgggagtgcaggttacaaaggggctttctttggatgtgcttctctgttatcagggaggacatgttttcccagaagcctccagcagacttcccctgatgtcacatggtcaccccttgtcccattgcagacaaatgattatgggcgtcatgattggcatggacaatcatcatttgttccctaggactatgcattttagccccacaggaaggaatgactgttgcattggacaccaagcaagtttcttgtgtgaagcctgctcaaaggccccctcccctgtgacatcttccccctcccctggagtgtcccgagcctgaacccagggcttagcatttcacagcccttatctcacaaatgtatcccttagcactgtcgcccccattttacagaggaggaaactgagggtcacagctggaaaggatggaagcatacatcgggggtcagaagggagaggggactgcctggggtctcccactgaatttctgctggagacaggttggccaatagaaccttctgcagtgatgaaaatgttccatgctgcgctgtttgatatggtagactagccatatggccactgaacacgtggaatgtagctagtgcaactgaggagtgggttttaaatttaaacagccatatgtggctggcgaccctgtgttggctggtgcaatgttagagccagtactggaactctcagttcttcagttgtagcccaaggatccagaccccaggctgcaggcagaaggtggccaggcagcagacagatagatggctttaaaacgtgtgagcggagtttgccacaccttggccctggagggggagccccgactgggaacctgtcacgagaaatgcaattatggtcttggaaagggcttgtgcagggttgggaaatcattcacccacccagtcatctactggaaatcattcaccctgagaaagaatgagaaacaatgccctagcaatttgttctgttcagatgcatttgcccgtggagcccactccacccaagtggcaggtagtgggccctagcctcccacctaagactcaaactagtccatcaaggcctgggctctgggagttagggcagggtggaagtcgagaggcaacatccaggcagcccccttatattactggaggggaaactgaggcccaggtagggacatgccagtgatagaggaggtagtactttaacccatatgacatagggctggacacctgtcagagtcctcatgtggcctcttcagcacccaatcctgtcctcaccccactatgcagtgatcatgacatattgaaggtgactatctttaccttagctctaccatgagcgagcactgcttggcctgaacaaggaggcacagtctcatttcttttgtcagagtgatggagccatagtaagtgtctaagccaatcactgcatgaggacagtcaccctgaggcaaagccaacatccaaagggctgtagaggagaaagagttgtagagagacgaagttggagccttgatcaaaccatgcctgaaaccatctacttttggaatgttctgttatgtgatctaataaattccccttacagtttggactagttaaaatgggtcttctgtgacttgtcacgaaaggcatccttcctgatgtaatatctgacatccattctgtcatctactccacaaattctcctaagatagtagcgactattcctaaactgtagatgaagaagtccaaaaagtgacagaggtgtaccccgggtcactcagtccatcaggggaagaggaactgaaaaattgcaactgtgccagatcctatcattttactccattttcacaacatgtctgtgagtcagaaattagtgcccttttttacagacaacaaagaatactgagactcagagatgagaggggagctgccctactttgcatgatattccggcaggagtaatgggaccagttattctgagccccagtttagagggattaaagagctctgacagtcacttttttgcatgagctccaaccagccagtgtgagtgtgactgcttttaattccttctcttgatcttaaaggacttggatctaagaagctggatgggtgttcttcttttcttttttcttttcttttctttctttctttttttttttttgagatgaaatcccgctctgtagcccaggctggagtgcagtggcgtgatctcagctcactgcaacctctgcctcccaggtccaagtgattctcttgtctcagcctcctgagtaggtgggattacatgcggccgccatcaaccctggctaatttttttgtatttttagtagagatggggtttcgccatgttggcctggctggtctcaaattgcttacctcaggtgatctgcctgcctcggcctcccaaagtgctgggattacaggcatgagctgctgcgcctggctgatgggtgcttttcaattgcagctggatttaggtagctgtatcagcaattgccatgtaacaaaacatcccccaaatcagtaacaataattaaaaacaaagttagaaaataaccatcatttattgtttacaagttcaagtctgctggttggttcttctcattgtcttgaggaaatgggaattcattgaagagatagtgggagagcacagaatcactggggtcagttcagaaggtggccagaagatccaggttagctgatgatggacaaactctcctccactgtgacaccaactctgagtgcacttctaagaattgctcacatgtgtgggcaccaagagacacgtaagcctgctttctctgtctgtagcggctaaatctgaagacatctgcattagttagctattgttacatgacaaaacaacccaaaacttgcttgcttaaaacataaacatttttgggaggctgaggcgggcggatcacgaggtcaggagatccagaccatcctggctaacacggtgaaaccctgtctctactaaaaatacaaaaaaaatagctgggcgtggtggcggatgcctgtagtcccagctactcaggaggctgaggcaggagaatggcgtgaacccaggaggtggagcttgcactgagctgagattgcgccactgcactccagcctgggcgacagggcgagactccttctcaaacaaacaaacaaacaaacaaaaacaaccacttttgttattatgcttgaatctgtggctcatctgggcagttctgtggtagtcatactttggaataaccatacagctattaaaatgaatgaacttgagctaccaaggtcagcatagataaatctcaaaaaatacaacactgagcctgactaagcaaggtgcaattgatacctctgtataaaatgcaaaatcagtcaaaataatactgtgtataattcacagatatatgtctacagagagcaaagggacagaaaagtgaggggctcaatcatcactgaatctggcattatgtttacaaaaaagggaccagtctgaagcgctctctggggagctggcagggacatgtggccttcctccagccttcctcagtcttctaaagcctgtgggtggctctctcaagacctagagtcctgggctggacatctggccagctcagcccatatccatgcctgcatggagctgccatagggcagaaagcagggagctggagccttggacttccatggtgggaggggagtacctctttctgccaagaggacccctagaatggcaaaggggagattctgagagacatctgggggcttgaagagagagattggatgctgccagctaaaaatcacagcctttcccttacctagatcaaatccccctttactcttcatatgctcctccctcagggcaactcggggggtctcctcctctctgaagccctctgggatttgcattctgattcagtacctccctctctggggcttttccagagcttctttccttcgattcctctcttagggtttcaagaaactttagctgtgcagcacacatgaagtctattgtaaacagagtgtggaagaatgtaagggctgaaagacgatctggagagaaaggacaggtggatggaaggaaggatagaagcaggcgggcacctccatgaggctgaagaggctgtggcttcacccacctgtatgcgccccccacagctgcagcacccagcaggccctcagtgaatttttttgactggctggctatggaattccttagggaagatggtgataacgacagttccctggttttcctccacgttgacaatgactgtcaatcaactttgtgtctttggacactttccctggagattgcaggtcttggctgcaaggggccccctctccccagcagcttccttctctacacactgcatctgtctccctcctctcactttcaggtgtactcaggtcttcgctctgtccacccagtcttcccgctgccaccctcgctgctcaggttgcttccctaggagcagagcctgagacaggggttgggtgcctgtggttactgatggagagaagcaggtgaggcggaggatgacaccaagcaagcatgagggtgcaggagaagtctagactcagcctgacctcacgaggggtgctggggggtaaatggcaccgcggagctgaagtccagtcctacaggatattgtaacagctgcaggcagccctgggggtgcgagtgggatgatacataaagcttcgtggtatttccagtgcttttggtgcttctccagttaagcgtggctgtgagtcaatggtggagaccttggcaatggctgagggatgggtgtacctcctgacaagggggatctgggcttggcaccaacaccacctgctgccttcaccagcccggccactcccatactccttggggacctgggctagacttctgtcctagtgctgtgcatagctgggccactaagtttcgtggagaccccaatttgttttcaatagaaagagagccttagatgaggggagaagccattgatgtgagtccattgtgcacctggggcccacaaccctgcaggtccatggtcaacggctcttggcagtggagtccctgcttccagaacacgggctctccagctccccatgacccacactagcccattcccttcatttatggcaactgttgggcccctgtggacctctgagttttcagcttcctctgggagtctttgatctctaaagacccttgggctcagacattgtgtttctgtgcttcaagtgacgatctctttactgagcacctactgtgcgtggcactgcagcctgctgctttatgtccaaaggtggcaagtgactctctgcctttgcctgcacaaagcttccacttgctgggagcaggtggcagtaacagaggtacacagatttgggaagttacgtcaaggaactatttatagaatcttccacaccctggagacccttggagcacagacctctgtcctgaaccccaggcttctgtatccagtggcttccttgcatcttctttgggatgtgccatgaacaccccagacccagcacacccaggctgagctcaggagggaggctgggggaacttggctgcgtggggtccactcctgccacagtgggctgtgtgtttctgggctgctggctcctcccctgaccccaggccttgtggagactgtggccagatagtacccccaactcctggcctgtggtggcttagtggggatatggaaactgacccaggcgaggccagagaggagccctcctaggaaggggagtgtgtgagtgactcgcagaaggcctgggagcgggtgcaggaccacagtgggaaacagaggcccacttgaactggaagggcatgggctggggtggggaggggagatattcaatcaggggactatttccagagaaaagggcacagtgtctagagcccattgtgcaggacgtcaggactcagggctggtggccacaagggtactcctcctgggcctgaggagccaggagagaggaagacaggaacagagaagagggctgcgagacggatgctctagccaggggttctcttcctcttccagggactctacgcggaaaatatctttccctgctctgagctttgtggcatttcttaattcctctttcaggcccgtgtctgtgtgtgtatgtgcatgtatgtgtgtgtgcatgcgcacgtgtgtgcacgcatgtgtgtgtgagtgtgcatgtgtgtgcatgcatgtgtatgtgcgtgtgcgtgtgcgtgtgtgtgtgcacgcgcctgggtgtgcacatgtacacatcggtggactgccacatgcacgtgtctacaggaatgtgtcatggagccgctgtgtggtccgggcaggaggtggtggtggcttggcccgatggttgcggtggagaccaaaagctggggatgggtccctgagagatggagaagaacctagggatttggcggtgggttggatgtggggccagagagtggctggtcaggacagcgcccaggcatctgtctcggggccctggctgacttgcagctgagcaggtgagggtgtagagggagcagggcgtcccccggctgtcccctgggcctgccccacagggagaagggtggccctggacccagactacagcagaaaggcaccgggccttcatggcagcctggaaggaaggtgctgtcctctctccagaggtgggtgccaggggcagcggtctgtccagggcctgcagtcaggcctcaaagaaggaactataccagccccctcggctgctgccccagcctaggaacccggggaccctgggtgagtcaggagccagccccctccgtctgccccaggaggccctgagtaggagaggagggccctggggtggctgagcacccccaaccctgagactcgcggccagtgcctcacctcttccctgccacctctcctctgatcgcatccagggaggagctcagcactgttcctgccaccggcccatggctgtcccaccgggctggggcaggcagcccacctcatccaccaacctccttgtcacacacactcacccacaaaacatactcgcaactcatacccacattctctctcataaccctcacacacaggcacacactcacatccacacaactcacacacacttacacccacacccacactcacaactcacatccagagtccatctcacaaccctcacaccaacacaattctcacactgtctcacacacacactcacaccccccacacacaactcatccagagttcatctcacaaccctcacaccacacaactctcacacactgtcacacacacactcacacactcagacccacactcacatccagagtctatctcacagccctcacacccacacaactcacacgctctcacacacacacacaccccacaactctctctcacacacacaaccctcacacccacacaactctcacacacacactcacacactcacaccccacacacacaactcacatccagtctatctcacaaccctcacacccacacaattctcacacactctctcacacacactcacatacccacacccacactcaccactctcacacccacattctcacaaccctcatacacaggtgcatacacccacacagctctcacacacacagactcacactctcacacgtgcactctcacatacactctcacacacaactctcatcccacattctctcacaaccctcacatcctcacacccacacaactctcatatactcacactcacacacacactcgtaacacagtcccgtgttctcacacatgctcggaggctcacagcctcccatactcctgcttcctcactgtgccgcaccctgggctcccctgttgccccaccagccccctgtgcccacactgcacagtcacactcatgagcatgcacactcactgatgcactgcctcatggccgcatccttagaggctggggtcacacacagctgcacactggctgagctccctcaggtgcacaccccgctgctccgatccatgcgtttcacccacgagtttacgcaattccaagtgcaaatcattcacatgcaccttcactctggagttttcaccagaaccctcaggcccctgtggcagggcgctgtctgcctccctgggtagcctgggacaccgagagccacctgaggtgactgcagtgttcgtccccccatctctgcagggctgtattgggctgggggaggagaggggcctgtgaccgagagtgtagggccggcccatgggagtgagatgggagagcactggggagctgctccaaacccacgaagggagagctttgtccaggccaaagctggctgggcatgagagagagcttcccatcacaggaggtatgcaagcactggccaaaccactctctgatagagaaggcgtggaggggcctccagactgccttagaggtagatggggttggagggagagtcctgcagaagcctccggccagacaccctgggagccagaggtgggggtagaggagatgggccagggcagagggggcaggagagggcgggcaggggcaggtaagggtggggccggcagtcccggagggtgggggctgtctcgccgtggctgccataactcagccgggatggacagtttcctttctcctgcctgatttactgcctgctttggaggggtgaggcccattctttgaacttcaaagggagcactgagtgcagccacactggggtgacagcctgctgagctcgggggtccgtctcctggtcccccggagaggcctcgggtcctgggtttatggacacgcaccaagccttgccaagcctccatcctctcatctgtaaaatgtggtcctagctcccagcccctgagaggacaagatttacctccatggcctattttaaatgccaagggctgtgacacccagaaacctgttctaatttcttagtctaggaagctctaatcaggacacggagggacctgtcacttctcctgattttaggtttgcttacgtatttcttctacccatgattcctttatcatcttcacaaagtcagaaatgaagggaagaattcatatttttttctttccctattttgcaggtgggttaattgaggcccagagacattaggcccgcctcctaatcacccagagaggcctctagccccgtcgctagtctctgcctgaaacggccccaggtcctgtgcacacagggatgggagccaggcagcatctgtttgctgtttttcatcccttttgctgaaggacgggctggctgcgctttgccactgagccccatgtaaccacagccgccttccccatctctgggcctcagtttccttgtctgtaaaaagggcctgtacgttcgtgctctgaaactgttatttggaaagaacgccaagccccatactggcagctgtggtgcttgggtcaggcctgcagatgtattttctttgtcctgtgttacgtaaaacatcagggcaggtgttgacgttcaaatgtaggaggtttcccatacaaatttgggtttccaccttctcttgaagaattagaaactttggttgtactggtgatcccaagctgctaacctcaggctggagctgggggcattgccccactaaggaggtggacgtgtctcccacaccacaccccttttgagccagggccctcattaatgtgctctgcctggccccttagctgcctctgtttgtgactcccagctcatctgaactaaccttcttggactccctgctctgtttctcacctgccatgtgaccttgggcaagtcacttagcttctctgagcttcggagtggactaaagtatgtgatgcctggagcgggctcagcacaggcctcttggcattttgtctgtgctcaggaggcgtcatggctgactgctgctgagctcggtggggacagaggaaggagacctctgccctgccctcctgcatggcatcagatggaggcagtgggctaaggggagcagctcaggctgtgaagccagagggaccagcaagtagaaccctgggaaatcagagacccaaagaggtgccattgaggagggaggctgggcactgagagagctgctgggaggccaggaaatggggatagtgtgagaatgaccctgcctgaaggggggacaaaaaggagctggtcagaccgcagctcatctgggagggggcgcaggggtggcagggtggctggcagagggcagaggaagccaccaatgccctccgaccacagagtggggatgggacccatggaggctcttgagctgggggcacctctgctctccaaagtcaacagagatgcgaaagtatgcagtcacctagcgcctctcctcagaggttctggggcccatggacagaccagtgccaggggagggcgggtctgggtctttaaacctgcccaccctggatgtgaagctgtccctgcccaggtgagtcagccaggactttgggtctcagcttcacctccatgtggccctggtagattcccttgcacccctgaagccttggtttccacatccataaaactcagggatgaaccacttggtctagaagtttccttcagtgtaggcaagttctggttcttcatcttcaagggtgaatgtgttccttagaggaggggtatgggggcaactgccttcagtcccctgctggtgagtggtgagcggtgagcgtacagccagagctgaggttctatttgtgtgtctggtagggggaggggtggcaagggcattctagggagagggaaccctcccaatccatctttcggtgctgccactaggcagaaatacacaaagacagaatatttgttaagcgtttactatgtgctgggttttgtgtggggccccacagagcagacacctcagacagaaatgcaccaactgcctcgtgtccccaaatgtggcagccaagggcctccccagctcgcccagagaagggagctggttgtaccagaaggaaaccctcagttgggaatgtgtgctgtcttttagaaatgatttgggggccataaattttcagtggcaaagcaaccctcagacttttcataacgctgaagagtttagacttgtctcgaggggtaacaatttcacccaagtagtgcaccagctccaactatttgttattgcaaaggttgatttttttccccttaaggtggaatcttcagatttcatgctgtgctttaacttgttttatttcacccggaacacaaataaaaatagcccaaaagatgtatggatcgacttgagagaagtttcttccttcctccttgtgtggagggaggacggaatgttgagtgttcacatgtcctgggccttgctttgggcgcatgagagcccctggcagcctctgcccagggctgggtggggttgtaaggacccctctaactggttgcatcctcaggacagctcccccacaacttagccattttacagtgaggaacgaagactcagaggcatctggcaatccatccacagtctcaccgctgggcattttggtagccaaggtttaaacttaggtctttgtgactttaaagcttgtgtccgttttggggcaaatctcttgaatctcgagtcagcactcaccatctgaagccacgctcaccctctctccagctgaagtgggaactttgagtgtgaacaagatcgcagggggagaggatgtttagcatagttggttccagggctgatttgaagtctccttaagcaccgtggaagcaccgtttccatgccaacagctgctctgtgccacttacaggcatttatatctactcgctaaagcaggcccttaaagaatgccaaagggagcactttgggctcagaagcagctcatttgcattctctttgcatatccagtaatttttctggattctcccaaaatgggccagctgacacagtgaatgtgttgtctctagggcctgacttgacaggataaaaggtctcaaaattgtgctgtttgttatcagaagggagggtctgcggctgctgagccttgtgggaggtagggggcctgtggctaagccctggcttctgcaggctgccccaggacagggcatgcaggcagacacagggctcaatggggtggggagcagattctagctcagtcagccagaatgttctctaagcagagctgttgagatgaaaatcttcgacttttgtgagcaccacgaggtgctttatgtatgttatggtgcattctcccgtgagtgagacgtggttgtcctattccacagatgaagaagggaagtcacttgcttcatggccagggaagggctccagcaagacatgggctcctgaaagtgacagtgtgtgaaggcccggagaggcacaggacctggtgagctgagcggggggagaaggcattccagggtgaggacggaggtgtggaggggatgtattcactatcacaaagaaccaccaacaggggaccttaaacaagagaaagggttgctttctcctgcagcctctctccttgcttgtagataccgtcttctccccgggtcctcacatggtctttcctctgggcatctgtgttctaatctcctcttcttataagaacaccaatcagcttggattagggcccaccctaaggacctcatttcaccataattacctctttaaggcctgtttgagatatagtttccattctgagatactgggggttaggacctcagtatgtggattttggagggtgacacaatgcacccaaagcagtggaaattgtcatgtgggtgttggtgggaacactgagaagggaaggaagatgtaagacagtggatgggggagagcttggttctgggagccttgcctgacaagctgaggatttggtcctctcctcctgtgtgatggacacatgccatagtccccatggcagggagtttcaggatgaaaaggactttggaagtcaactaggctgatgccagctgggttggactgggttgggggtaccaggggaggcagctgtctttccaggagcagcacactcaagtgtcgggttttctctgaacaggccagttttctgggggcttaggggccctccagtctggcaaaagtaaccggtcttgctcagggtgcaagaacaacatctgactcatctccatgtgcccagcctgtcacagcacggagcctggcacggaagaggcactgattggtgtcagtcaaaaaccggatgtcggtcaggacactggctctgagcagcaggtggcttctgttggttatatttcttgtcagcttaaaaaatgtgttttttagcctgggctcccagctaaacacagagcctgaggcaagggtttaggacttggcagtttattttgaggcgcaatcccaaggacaaggaggattgaggggagtgagatggaagcccccaaagccagtccaagggggcattattgagccagtcactgctgtgggcaatgagggctcaagcctgctgggggccctctgtggagtgtgtcgggtgcctcaggattgtcctcccagggagggggttaagtccttatggagtggagcgtcccttccctccccgcacttctggtttgcccatgtgtcagcatggctctgggggaaagtaccctgtcccatttggcggcttcagcaggcccatgagagatcatcagggctgggatgtgaggcactctaggttgatcctatgcagaactggttgttgcagacacagctggagggcaggcatggcccagcacatgtgaggtgggagacaagagatgtcagatacattttccaagctggcaggaagtataattaatggaagccacctgtcactcggagccaatgtcctggctgacatttggtttttcacagacactaacgggtgtctcttccatgccaggcttcatgctgtgccactctgggcacgtggatctgagtcaggtgttgttattgtatcctgagctctggacgtcagttaaggggaccattgccatcctcatcgaggagtgctgggaagaggcctgtatagactacagggcaggcacagagcagggacttgccatttctgcctggggtggatatggggtggttagggtccccccatatcaattgtggatcttagttacaatcacccaaaagtggctctggcttgggcagagagaaaggtttgggtggttgtggcagctgctgctgctgatctaccctgcacctgttctcctcccctcctgcctgggggagggaagtgtcacccatggatcagaaccctggaggctgtgaaggcgtgctctaggcagaatggaggcatccaggcaaagaagcatgaactgaggcccctgtgggcacctgctagaccccagatctgaaatctggggtgctgccattcttcctgggcacacagataagcacatccctcaggctgacctgcagttagggactgagttctggcccctgggctgtggacggaagtaatgcctgccattttgaggtctggcccagaaaaggcgaactcctcctgcagacagtctgtctccactcactggctggaagatgccagggtgccctccaagccgcacagtgaagacactggtgcacaacatggaaggaacctcagtcctgaagtgaccgcgtgaagctgagccccttggccaagcctccttgaactacaacaagagcgagaaatagatcttcatggtgatgagctgctgagatttggggctgttagctttctccaaccaatacaaaaactggtaatctgaaatgggcattaccagaagaacctgtaaagtgtggcattggctgtggagtgacagtgtggaaattgatattagaggctgtgaaatatggcagtccacgttatgaagtggcaaagtatttgggagaacagttgcctatgatagctgggaagacagagcataccagcattgagcctgtagctccaggggaaatggttggaaggaattaacagattagtgtgtcttggctaccatgggctgcatttggcaaggtcttacaggaaagagatgagctcaggagagtcacagctggtttgaaacagaaacaaaagggaacagaaagaggggcttttcagggttggaaaattaagcacatctggaactgaaacagtaggaaataagagcgagagacacttcagactgcagtgaagattagaagaaggatgtgacatttccactcaattacatagccttgagattgtcattattatgttgggaggaaaaggcagggaggcaaggaagcagggaaaaaataaatggggctggacaattaagcctaggaaagaaccacgggtatgatcattgactggcatataggactgacaggaggcgaatagatcagaaagttagctatggagggaattgcattgataaggacacaatgatcctggactcagaagagtctttgactgaaacttaaaatacccttggggtcccctactatccacaagcaggaagtaggttccgaaaattctgtggcatctgaggagggaactccactgcactcccacatcagaggcggccgcggaggaaaattaacaaagaagagctcataaagggtgaactcgggtcaggggggaatggagaaaattttactttattttattactttttttgagatagagtctccctttgtcactcaggctggagtgcagtggctcgatctcggttcactgcaacctctgccttctgggttcaagtgattctcttgcctcagcctcccaagtggctgggattacaggtgcacaccaccaaccccagctaatttttatatttttagtagagacggggtttcaccatgtattggccaggctggtctcgagctcctggctgcaaatgacccgcctgcttcagcctcccaaagtgctaggattgcaggtatgagccactgcacccagctggacaaggggttttctttttattattattattattattattattattattattattatactttaagttttagggtacatgtgcacaatgtgcaggtttgttacatatgtatacatgtgccatgttggtgtgctgcacccattaactcgtcatttagcattaggtatatctcctaatgctatccctcccccgtccccccaccccacagcagtccctggtgtgtgatgttccgacaaggggttttctaggagagcagagccagagtctagtcaggggacacccttggccgccagggtagagaaatctctcagtccctgcccctgtgcaatggactctgcacaatggactgcttgctgttgagtggttgccattcctttctcttcggaatgggagtttttactgaggttatcttatccctgcctcacgatcacattgtgtgtgtgtgtgtgtgtgtgtgtgtgtgtgtgtgtgtgtctatgtgtatgtgtgtgtatgtgtgcatgtgtgagtgtaaggggatgatgaacacattttctctatagttcacaggccaccagacaatgcggtggctggatgagttttgggttgtatcccttggggagagaatgagctttatctatgtgtgggaaggagggcctcatgggtatgtggtggcaagggtggactgtggcagagactgctagtggagagcaatatccatgtcgcctcctttcctcctgggtactgaacgaggccacattccctgctcctagcagttagcaggggtcatgtgattgaattatggccaaagcaatgtgggcagaagggacacacaccacctccaggcctggcctccaaaaccctgcatcctcctccccatgttctctgttttcattcgccagctggaggatgccaaagtaaacttggtggccacatgtcaaagacggagatgcacaaaatgggaggaacctagatccctgaatgactttgtggagctgagcccctaggccaccctgcattggatgtgaaatgagtgagaaataaacctttggagtttcaatccactgtgatctggggcctctttgttacaggattaatttattttgactcatacacacttctcttggccccctccaagcctggatgatctttaaaagtcatgttaatcttctgtggaaaacttgtggctggtcctgttgctcatagagcagtcacaaacccttactgcagcccacagggcccagtgccagccctctcctatctttccagccctttctccttgccctctccctcttgttgtctgttctctggttatgctggcttgctttctctccttcaaatatcccacgctgtcttctccctcagcatttcccttctgttccttctgcctggaattcttctcttgccctgtgttgtcagggtcacccctagtatcctttagatcttagctcaaatgtcacttcctcagggaagattcccagttccttcaggtggatcgagttccccccatgtggatcttagttacgatcacccagaaatggctctggcttgggcagagagaaaggtttgggcagttgtggcagctgttgctgctgctgatctaccctgcatccattcctctccttccttcttcctaacagacaccagtttagttcagaggaatgatatgtccttgaagctccttccccagatgcccttctggctagaggtggccactagacccagttctgtctagagggatgtgacactctgcttggtgggttcctaaaaggctattgtttcctgaaaaggctggcacaggcctttccctctctaccctcccatcttcttgctgcctgcgtgaggatgaaagccacatactaaggatggaggaccacgagctggaaagagcctgtgatctagatgacagccacaagcagctgccccagccctggcctgccaacctccagggaaggccaaaaccctatttggcaaagcatggaaacagggttgtctttgtccattttctgttgcttgtaacagaatatctgaaactggtcaatttataaagaaaaggaatttatttcctacagttcttgaggctgagaagtccgaggtcaaggggctgcatctggcaagggccttcttgctgctgggggctctctgcagagtcccagagtggtgcaaggcatcatatggtgagggggctgagtgtgccagctcaggtctctctttctcttcttagaaagccacttgtcccacccccatgataacccattaagccattaactcattaatccatgagtagattcatctactcatgaggacagagctctcaaggcccaatcacctcttaaaggccccatctctcagtactgccatattggggattaatttcaacatgatttttggcggggccaatatttctgtttttcatcctcaaacatatacagagcccctacaatgtgtcaggcccagggccgtgtgttggagacacagcactgagccaaatcgaccatgattctgccctcctggagcagtcttgggaggagaccagatgtcacacacacacatgcatgcacacacacaggcgcacacacacgcatgcacacgcaggtacacacacacacacaagaagttacaacctctggaggtgtggggagggctatgaagatagtgaaatggtgcagagagagacagtaaccggagacttgctgtaggttggggagagaggtgcagagcagggccaggcagtcttctggtgcaggcgacactagctcaagcagggaggttggggagtgtgaagcagggtcactgtgcaccatgtcaatcccaggggaggactctaaacacctcgcccactgcactttgagttgtgttaatttatcacttgcatgagtccagtgagacaacactcacctacggcaagttacacaaaccagacttgttaattagagataggtagcaagggacagcagagcctaggattcagggtgagctggtcccccaggctcgggaaagctgccctgggtggatggagtcttgtctgcatgtgccccatttgcactgcagctgaagggctctggaaagcagttggctctgggtttcatatccccgggacaatgcaacttgctgagctaaatctctgtaggacatcctgctctaggagggacaggaacagagcccagggtgttctggccaggtccttcttatccccggatgttgcatccccagcacattctacagcgattcttaaaacttcaagtaagaatggcatgagagagttgggtgggtccaagccacccttagtgccatcctgcagggagaggtcagatgaacagagtggagacgagagtggtcctgggggaaggcctggctgggctaaggctgcaaccctgagggagcgcactgcctgtgtttgaggaccaagtgcaggcccggtggaagaagcacatccagtgagggagatgcatggtcaaggataacacagccagaccaggcagagttccctctgagtgaattgggagccacgggaggttgagggcagggagggacattctctgatgatgttttaaaaaggtcactcttgctgctgagtgcatgagagactgtagcgggtgaaggtgaaggcagggagaccaatggtggctgaggctgggacacacggtggtgaaactagtgggaagccatgggttggaagaaatttaagaagtaaaatcaagacttggtgataacttgaggagggtggaggggatgagagagacaaaggtgaccccctaggattctggcctggacccctaagtggcgaggggtgccatttactgtgatagggaagaccaaagcatgaacaaacttgcagttcagtccggaacacacaagattcgccttgcttcaaggggagagggagacaggcatttggatatgctggtctggggcccaggagagatctgctttcttgttcttcctactccttccaccactgtctctagaccccttctccgtgcctgttcctgagctggggatggaaacagaggctcaacctttcctggatttctaaagcttatgtccactggcgcccctgtgcatccttcttggtatcacatagggtatagtcttagctgctgtgattaggagactcccaaacacagcggcttaaccaaaagggtcaagataggagacacggcaaggttgagaacaggttatttctttcactttatggtctagtaaggtgtttcagggctaggaggggactctggtatcaagacctctgtctctgagttcaaggtggctgctcctgtgctcgcctcccctcagacagctgggaaaggaggggacatggggaaggcacagttttttttacaggtgcacctggaagtggcgtgcgcctctttggctcacctcccattggccaggacttcctccaatgcccgtgtctagccccaagggaggctgggagatgcaatctcctgggggatggtggggcatcatgatcccagaaaactggtagagggttccttattgttcagaagaaggagaatgtggagatttatggacaaccatggtctctgccttcttctctgggaattggaagccgcgcagtacagcccaggggaatctccctcacgacgtcccaagacaagtagcctagcatgtttaggtatggaaggtcttctgggaaccacaaatgagtggttaattttagcaagcaggttggcttcttactcagtctgggaagcctgattatgggaccttgtgggagattctcctgaatgtttttaccaggcagagtccctggatcccctctgcagccccaccagctgctcctccaacctggcttgcatacttcccctgatgggaagctcactccctcctggatacctgtccctttctttggcctcctgactgggaggaggtgctcctcatagggagctctgattttcctcctgtgatcagtcccctcctcccattagtcctggctctgccctccattctccccctaccccagaacaatcctacagaaatttggagtgaacaacagaggcttctaaagcaccttttctatcagtaaaagagaaacatatgactgaatgagactcctgggacatttgagttctcatggccagggtcaacccccagatacctatgtgctatgacgctggtggtccagtgtcccagctctggactgggctccaggccaggctcagccaaagcctggctgtgtggccctgggcaagtggcttcagggctgagtctaactcccaactctgaccctggtcctggggtcaggtgtgccacccatctgggcctcatctccaaagcagaggtagtgatggacagtactgaccccatgaattttctaggaggcttaaagaagctgcttacagagaacttagcgtgctgttggctacagtagaagagttggagggcttctattttgaaatattaatgaatagttctttttccccaaatagcttgtgctaccccttggtccctttttgccttttccttttttccatcaattcagtgaaccagcttcttcttagcttttggtttcgaaaacctagacccaatgggaacggaaaatcccagaggaggtctttaaaaaggtaatgagagttcaccaggtgctgagcactgttcccactgctgtgcacacgtggtctcctggaatcttaaggccagtccgtgaggcaggtgctctcattatttccatttcacagatgagagaactgaggcccagagaggttatgtgtgttgcccaggggcacacagctagcgatgtcacagggtggtgactttcgggggcctggattcttcaccaccgtgcccttctgccgtagactgtggtgagcctggagtccgagtctccccagtctcctccctgcctgctccagctcacagggaggtttcccagacttgggggtggtggagacgaggaaggaggctcagggggaagctggctgggctctgggtgctcaggcgggctgtgggctctgatagcaggcaggtcttgctctgccactccatgggagtggtggctggtggagatcttccctgggtggggcaccggaggatcagagggacctggaggggcacacaggggctgtaggcacatgcaggagagttgcagggctgacggcctggtggcctgtggggtactcagcagaccaggccagactgaatggctcccacctcaggtgctctgggggaaaggtgggcataccagcctggccaagattaaattgctatgagagcaggactcaagaaatgaatttgagatataaaagaaaccttttgccgggcgcggtggctcatgcctgtaatcccagtactttgggaggtggaggcgggcggaccacttgaggtcaggagttcgagacccacctggccaacatggtgaaaccctgtctctactaaaatacaaaaaaaatttagccgggtgtggtggcacatgcctgtaatcccagttacttgggagacggaggcatgagaatcacttgaacatgggaggtggagattgcagtgagccgagatcgcaccactgcactccagcctgggtgacagagtgagactctgtctcacaaaaaaggaaaaaaagaaatctttattaaaaatttcttgaacacctgaggctgtggctggagtgccattcaggcggtgtgctcaatgcatgtccattactctggtcttactgctgtttctgtgcagctgcgagggcgaaagggagttgtatttgtgtgtgtgcctgtcgcatgcatgtatgcctttgtgtgtgtatgtgtgtgtttgtgtgtgcctgtgagtttgtatttgcctttgcatgtatttgcatgactgtgtgtatgtgtctttgcgtgcatgtgtgtgtttttatgtgtctgtgtgcaaggcatgcatgctgtgttgcctgcacccaggctggctgtgcacagccacactccctccccgcccccagaccccagaatgctgctcggtttctcaccctttcatattcaaatactggcctagccccagcatcccctgggcatttatgggctgatcatgtattgttggtgcaggctgagtgggtgagctcatcgccaggcttgggatgggaattcctgccgcatccaggggacctggggctccccgatgtgctccagaggggcttgcctaggtcctgccctatcccaccccatgccagccgctgcctgggtgcaccattcattcaatccagaaatatgggacaatgcaaacaacaactcacatttgtatattggacactcactctgtgacagacacagaagccctttccatgttggctccattttggctccattttatggatgaggaaactgaggtagaggacgatgccccagggcagcagttactagctggaataatttgaacacaggcatttggtccctgaaggcacgccccaacaattgcactgctgccagccgcccctcatcccccgccctcccgtggctcagctgttgggggcaggcgcagagctcctcgggaggctgggtgccctcctcgcccctccccgtcagccccattgtctgcccaggcttcctgtcccccagtctctgcagggctctcctggggtgcgtgggggaggcagagggcagagctgggaccagtactgacctgcccagcaggggaggtatgtaagtgaggctgctgggtgcttctgctggacttgtacctgaccctggtatctagagttgggaagagctgctattgcccttagctgcagacatggcccagttggagactggctcgggttctgaacccacaccccatcacctcagatgcctctgttccacccctggctgcaggggaagagaagcaaggggtctctccctaggtccaggcagaaattcatgaatgcaaggagctggttagcacagttagcatcttgtctgtagttgccacgggatggctggaaagatggggtggggcagagctttggagtcagatccttctggctttctctccctcctctgcccactgccaagtcagcaaacatctcggagactcagtttcctcatctaagaaatggaacaacattgcatccccaagttgttgcaaacaccaagagtttccctctgggaagggcctgcatatgaaggtgagggctgtgaggatgatagtggcgatgataatagttattagagtatcctaatagaagcaagttatgtgttcatcatccctcgggcacacttctaggtgctttacacctactatcttatgtgattctctcagcagccctaggaaggtcttatttttattcccattttatagatgaggaaactgaggcccagagaggttaggagacttcctgtgttaggcagctggtaagtggtggatctcagagctgagatcctgggagccaagagacaggagtggttatccctgccaggagggtgggaaggctgtctggggaggcatcattttacctggctcatctgagaagggcctgcatatgagaaggggaaacattaaaaaaaaaccaaaaaggcatttctacaaaaggcaatttggtcccctgtgcatttgagattctgttttccttggagtcctgggatgccttctcctcttgcctctgtgatttccctgagcctcagtttcctcatccatgaaaaggggataattatggtttctgctttattttgcagctctgaggattaagtgagataaaggtcttagcacatagcaggtgcttgtcctccttgagtttgcatctccccaccagcaagcctgcctatgtccccttgcctggatcctgaggctcgggtgtcagagaggctgccctgcaggcgggaagaggggtcaaggatcctgttactgtcgggcgggcccagctctcagacaatgggaatcccattaacctccgctagggagatcaccatctgtccaaacagtggggactaggtgtcccacagcctgagagtctgaagcatcacgcaacattgcatgctccctccccatatattatcaacagattcacctcagccaaccgcaccctccctgcccttagtctccctatctgtacaaaggcatcagcttctctgctccaggttataagcacacagctgttgctcccaaagctctgtgatgtgagctgaggttcaggtatgactggaaggaccgccaacagtccctgaccctactcactttagatgtggggaaactgaggcgcagcaaaggaaaattagtcatttgcagtcactgagtaggccagcagtggggctgagagtcagagccaggcctttgagattggcgaggcgtctgggtactgtgagtgccatcagggtaggatacagccagggcttcagtgacaggggcttgccagcaggggtgacgcccaggtgaggaggagctcagggtttacagggagggcagcccaactcaaggcgggctttggcctgccattgctcaggcaccgtcctgggtgctcctgcctacagggccagagagacttcccaaggccagtgtaccaggctgttaaccccaacgttcctgaagccccagtcccactgagccaggctccctgctggagcacgtcctacattccccatctccaggccttggcttatgctgcgcccagcccagaaggccccttccctctgtcaacctaatggagcttttccagtctaatttcctactgcgcttcccctccttccctccactctgcccttctcgctgttccttgagagcatccaacacatctgccacagggcctttgcacttgcagttctctcccctgggagcattcttccacacagaccttcactccaaggtccctgctccaggggagaccaggaacctttgagccttagtttccccatccatgaaaaggggctgatgatggtccctgcttcaagttgcagctctgggaattaagcaagataaaggtcttagcacacagcaggtgctcctccttgagttcaggttcttgagttcagatagcctctctgaccatcgtatctaaaatagaccccatggtcactctctgtcctcttaccctgttttatttttccctatgtatattggtttcttgatgtgtatttactgcctgtctcccttgctggagcaggagcttgggagggcaggggccatgtctgtcttgtccactgggggatgctagtacccccagtgtccagtgcatgggagccccactcaagaaacagccgttggatgactgagtgaatagatgtatgaagaaccttctaatgtggccctcattaaaatgcctcatcaccatcattttatacctttcttgcaccaaacaaattgggaactcctttagggcaggggcatgtgttgtcctgctacgtgcccccagcacctatcatcaggtctatgtcagatgatgtgctcgataatccacaataaataagccaatgtggtactgtgtttgcaaagacagctcccacaaattcctcccttcctggccaccatgcctctccaaggtgggacgtgtcccttcctcccacccatagcctgggctacttcccctccccttggacacatgactttatttggccaatagaaggtgggggaagtgatggctgtgcctcaagacaccttggggcttctgcttcactcttgaagcacagcctcagatgccatgcacagaagctgtgattggggcacatggaggagacaaaggggaccttggtgtgagaggctggtctaccactggggtgggcgcacgacagggaactgagaggaccactgagtgaggaggctggcctaccattggggtgggggcacatggaggaaactgaggagacacccaagttatggggctggtctaccatgaaagtgggagaaggtggaggaaaccgagagaacccccatatggggaggctgctctacctttagggggacacgtggaggaaacagaacccgcatgtaaggaggctggtctaccataggggcgggggcaggtggaagggactgaggggactctcgtattagagggctggtctactgtgggggttatgtggagggaactgaggggacccccatgtgaggagactggtctaccattaaggtggggtcacatagagggaaccgagggaatgtccatgaaaacaggctggtctaccactggggtgggggcacttggagagaactgaggaaacccctgtgtgagaaggctagtctaccattggggtagggggacttggagttgaactgaaaggacccctgtatgaggaggctggcctaccatcatagtgggagcacatggagaaaactgaggaagcccccatgttaggaggttggtctaccattggggcaaaaatcacgtggcgatgattgagaagacccatgcgtgagaaggctagtcaacaattggggtagggggacttagagtagaactgaaagaattcttgggtgaggaggctggtctaccattggcatgaaacgtgggatgaaaagggcaatgtggagttaactgaggataaccatgtgaggaggctggtctaccactgacatgggggcacgtggagagggacggaggggattcttgtgtgaggaggctggtctaccattggggaggtcacatggagggagctgaggggacctctggatgaggcaagtagtctaccattgtagtggggccacgtggaggaaactgagggtatacccatgtgagaaggctggtctaccattagggtggggggccatgtggaaataattgagaaggcccgaatgtgagtaggtcattctaccattggggtgagagcacatggagggaactgaggggatcccagtgtgaggaggctggtctaccgttgaggggtccccatggacgggaactgaggggaaacccatgtgaagaggcttgtctaccattcggggggcacatggagggaaatgaggggacccccatatgaggaggctggtctatcattgagaaggccacatagaggggaactgagggaacccatatgtgagaaagctggtctactgtgggggggatgtggaggaaattgagggggcccacatgtaaggtagtttgtctgtcattggggtgggagcactttaagggtactgaaaggacccccatgtgaggaggctcatctatcgttggttgggtacatatggagagaactgaagggacacccaagtgaggaggctggtctaccataaaggtgagggtacgtggaggaaactgagagagccctcatgtaaggaggctcatctaccattgggctaagggcaatatggagataactgagaaggccagtgtgtgaggaggctggtctacccttgggatgaggagggttttctaccactgaggggccatgagaagggaactgaaagaatccccttgtgagaaggctggtttaccattaagaagggaatgtggacagaagtgaggggacctcatgtgaggaggctggtccaccattagggagggccatgtggagggaactgatgggaccccagtgtgaggaggctgccctaccattgaggaggccgtgtctagataactgagtaaactactgtgtgagaaggctgatctaccactggggggccaagttgaggcaactgagggggcccccatgttaggatgctggtctacaactccggtagaggcatgtggagaaaactgagtgaaaacttgtatgaggaggctgttctaccattgaagtaaaggcacatggaggaaacttagggagaaataaaggcacatgtgagaaaactggcctaccttttggggggtcaccgaaagcaaacttaggggaccctcatatgaggaggcgggtctaccactggaagggtctccatagagggaactgaagaaaccaccgtgtgatgcagctggtccacaatttgctggggtggggggcggggtggggaggcacacatggaaagaactgaggaaatggccatgtaagaaggcttgcataccattgaggtgggggcatgtggatggaactgagaagacccctgtgtgaggtggttggcctttcattggggtggcagcacatggaggaaaacagaggaaaccactggtggggaggcagatctactattgggaactgtggagaccttcatgtgagaaggctggtgtaccattggtggcgccatgtggaaagaaataaggggattcccgtgtgaggagactggtctatcattgggggccaagtgaaaagaactgaggggacccccacttgaggaggctggtctacaattagggtggggggacaaggaaaaaattgagggatctgcaattagggtggggggacaaggaaaaaattgagggaccttcatgtgaggaactggtctactattatgggggcatgtggagagaactgagtgaacctctgtgtaagaagggtggtctactattgagggcgccacatagaagggaactgaggaaacacccattgtagaaggaatgtataccctttgggtggaggcacatatagagaactgaggggacccctgtatgaggaggctggtctaccattggggttggggcatgtggagggaactgaagggatgcctgtgtgaggaggcttgtctgtcattgaggaggccatgtgaagggaactgaggagaccccgtgtgaggaggctgatctaccactgggatgggggcacatagagggaactgaggggtccctcgtgtgaggaggctggtttaccattgagtaagttatgtggtgagaacaaggggacccccatgtgaggaggctgttctaacattaaaaaggtagggaactgagaggatccagtgtgaggagactggtctaccattgggtgggcacttgagaggaggctgagtcaaaacaactgtgaggaggctggtctaccaccagggtgggagcacatggagggaactgaggaaactcttgtgagagaaagctgctttatcattggggcagaggcacataaagagaaactggggaatccctgtgtgaagaggctggtctttcattgagggggcatgtggagagaactgagaaaatccctatgtaaggaggctggtctaccattgtagatggggcacatggacagaagcactgtgtgagaaggctggtttaccattggaggggggcatgtggaggcaactgagaggaacaccatgtaaaaaggctggcctaccactgtggtgggggcgcgtagagggaactgaggagtcccccatgtaaggtggctggtttaccattgagcaggccacgtggagggaaatgagtggtcccttatgtgaggaggctgttctatgactggggtggggccacctggagaggagatgagtggacttttgtgtaagaaggctggtgtacattgaggggggttcacctagagggaactgaggaaacacccctgcaagggaggaggctggtctaccattggaggggactgtgtggaggaaactgagtgggcccccttgtgagacatctggtctaccattatgataggggcatgtggagtaaactgaggggtcccccatgtgaggaggctggtctactcttggggtggtgtgtgccttggaatggaaatgaaaaaaaccccatgtaaggaggctggtctaccatggggagtacacgtggagggaactgagaggacccctaagtgaggaagctggtgtatcattgagggtccacatggagggtactgaagagacccccatgtgaggaggctcttttattatcgggatgtgggcacatggagaaaactgagaaaaggctggtctaccactgagggggccctgtagagggtactaaggggcccttcatgtgatgaggctggtctactattgagggggccaaatggaaagaactgaggggaccatcgtgggaggagactggtataccattgaggtgtaagcatgtggaggaaattgaaagaacccccagttgaggaggctgtcctacctttagggagtctcatggagggtactgttggaacccccatgttgggaggctggccaaccattgggtctggggcacttggagggaactgaggggaccctggtttgaggaggcacctgtgtgatgggggctttgggaggaagctgaggtacccctgtgtgagtaggcttgtctaccactgggggaatcacgtggagagaactgaggtgacccttttgtgaggaagctggtttactgttggggtgaaagcacatggagaaaactgagggtacccccttgtgaggaggctggtctaccatttaaaaggccacatggagagaactgaggggacatctgtgtatggaggctggtctaccattgagggggcaatgtggaaggaattgaggggacccttatgtgaggtggctggtctaccattgagttggggacatgtgaaggaaagagaggggatcccccccgtgaggaggctgttctatcattgggggaccatgtggagggaactgaggggaccccccccgtaagaaggcttatctaccactggggtagcagcacattgaagtaaatgaggggacccccgtgtgacaagtctggtctacctttggggtgggggcacatagaggggaactaaggggatccccgtttgagaagactggtctaccatcagggtgggggcacttggagggaactgaggaaacccctatatgaggggattggtagatcactggggttaggaaatgtgtagggaaattgaaatgacccctgtaaggaaggcacatgaaaaatactgaggggatccccgtgtgaggcagctggtctactattatggtgagggcacatagaggaacctgaggggaccctcgtgtggagaggctggtctatcattgtggtagagcccacatggagataattgagaaaacctgtgtgtgaggaggctggtctaccattgggtgggtacatgtggggaacagaggggaagcccatgtgaggaggcttgtttaccattggggtagggtaacatggaggtgagtgatgggactcctgtgtgagaaggctggtctacctttggggtgggggcacgttgaaggaaactaaggggacccctttgtgagaagaccagtctaccattggggggcacatggagaaagctgaggggatgcccacgtgagaaggcttgtctatgattggcttcggggcacatggccataactgaggaaaccccaatgtgaggcgggtggtttaccattggggttaggaaacacggagggcaactaaaagaactccagtgtgagaaggctggcctgccattggggggtacatggagggaattgaaaggatttccattgaggaggctggtctaccattgggttgggggcacgtgaaggggaactgaatggattcccatgtaaggaggttggtctaccattgtgtgtggtgggggcacatggagaaaactcagaggacatccatgtaaggaggctggtctattattggggtagggacaagtagaggtaactgaggggaatccctgtgtagggagactggtctaccattgagggagccctgtggagaaaactgaggaaattccatgtgaggagcattgtctaccatataggtgagggcacgtggaggaaactgagagaattcccgagtgaggaggctagtttaccattgaggtaatcacatttaggacaccaaggaaaccctcatgtgaggaggctagtataccactggggtgggggaatggggaagtaaccgaggagacccccatgtgaggaggcatgtttaccattggggtggaggtacatgagggaaattgaggggacccccgtgttaggaggcttgtctggcattaagagaaccacgtggagaaaactgagggaacccacatgggaggaaactgatttaccattgggatggaggcacgtggggggaactgggggaacccccctgtgagaaggctggtctaccattgaggaggttacgtggagggaactgagggggcctacatgtgaggcggctggtctaccactggcaggtagcacatggagggaactgagggggtcctcgtgtgagaaggctggtctaccattgaaaaggctacatggagggaactgaaggggctcctgtgtgaggagacaggtctaccattgagggaatcatgtggagggaagtgaggagaccctcctgtgaggtagctggtctaccattgggttgggggcacttgaagggaactgagggggcccttgtgctaggaggctgatctatcattagggggggtcatatggaacaaactgactggacaccaaagtgaggagagtggtctaccatagaggttaaagcataaaaaggaaagagagcctctgtgtgaggaggctagtctaccattgatgggggcacattgagggaactgaggggatccctatctgaggaggtgggtctaccattggtgtggggagatgcggagggaacagagaggattcctttgtgaggaggcttgtctacaactgaagttggagcacatgaagagaactgagggaacccctcatgtgaggcagatgatctaccactgaggagggggatgaggaggaaactgacaagacccccatgtaaggccagtctgttattggggtggagggcacctggaggaaattgaggggagccccatgtgaggaggcttttctatcattgtgatggggaaacgtggagaggaactgggtggatcttcgtgtgaagaggctggtctaccattggagggggccacgtggacataactgaggaaatccccatgtaaggaggctggtctacctttggggagccatgtggagggaagtaagtgcacccccttttgaggcatctggtctaccactgtggtgggggcacatggggaaaactgagaggatccctatgtaaggagcctggtttacctttgtggtgggggcacgtggaggtaaccgagggaacccccctgtgaggaggctggtctatcattggagggtggttatgtggagggaatggaggaaaccttcttgtgaggaggactgtttatcattggagatcacatggaggaaactcagagaacccccttgtgaggagtctagtctacctttgaggtaatcatgcttagggcactgagaaaacccccatgtgaggtggctagtatacaattggggtgagagaatgtggagggaacctgaggggatccccctgtgtaaagcgtctgatctaccattgagggtgcatgtgaggggaactgagaagatgcccaagtgaggaggctggtctaccattgagggggatatgtggagggaactaaggggacccctgtgtggggaggctggtctaccattgggatgggggcatgtggtgataactgaggggacccccatgtgaggaggcttgtatacctttgagtgggccacatggatggaactgaggggacctacatgtgagagggctggtttaccatggtgttgggggcatgtggagggaactgaggggatgccaatgaaagaagtctggcctaccattaggaatggggaatgtggatagaagtgaggaaacccttgtgtgaggagactgatttaccattggggtggggggacttgaagtggaactaaaaagacccctgtgtgaggaggtgggtctaccactgggggtcatgtgtaggaaactgagaggatccctgagtgaggagcctgatctatcattgaggggaccacgtggagggaactgaggaaaccctgggtgaggaagctggtctaccattgagggggccacaaggatactgaggggacccccgtgtgaggaggctggtctaccattgaaaaggccatgtgaaggaaactgagagaatgcttgtgtgatgaggctggtccaccactgatggggccacgtggagggaactgaggggtccctcttgtgaggtggctggtctaccattgggttgggagtgagtgaaggaaactgagaggacccttgtgctaggaggctgttctattattgtggatggaggtgatgtggagggaactgagtggacacccaactgaagagactggtttaccataggggtgggggcatgtggagaaaacagagaacccccatataagggggctgctttttcactgagcagggcacattgagggaactgaagaaattcctgtgtgaggaggcttgtctaccactcagtgggctatgtagaggaaactgagaggacccctatgtgaggtggccagtctaccattgtggtgggggcacatggaggaaactgggggtatcccctgtgtgaggtgtctggtctaccatttgggttggggccttgtagagataagtgagaaaacctgcgtgtgaagggactgaggggaactgaaaagagtggtctaccacggggttgggggcacctcaaaggaagtaagggaacctttgtgtggggaggctagtctacctttgaggggggctacatgaaaggaaacagaggaaacccatgtgaggaaagtggcctacctttgcagcggccacaaggagggaagtgtggggaccactatgtaaggagactggtctattattgagggggccacatggaggggaatagaggggatcagcatgtgaggaggctggtctaccatggaagaggatgtggagggaactgaggggacctgcatttgaggaggttggtctaccattaagggtccacatgaacaggaactaagacatctgtgtgaggtggctggtctactattgttgggggcatgtggaagaaatggagtggacttcccccttgtgagatatctggtccaccattgtggtggaggcacatggaggaaactgagggactcctgtgtgaggatgctggtctaccattgggctgggggcatgtgaagagaaactgagggaatccccatgtgaggaggcttgtctaccattaaaagggccacatggaggaaagtgagggcacccttgtcttagaaggctggtctacctttgagtgaaccacatgaagtgaactgaggggaaccccttgagaggtggctggtctattattcttgggagcacgtggagggaactgaggggaccccatgaaagaaggctggtctactactgcgattggggggtatgtggagagaactgaggaaactcggtagtgaagctgcttgtctaccattgggtgagcacatgggagggaactgaggggacccccatgtgaagagtctgatctaccactgtgatgggagcatgtggagggaactgaggggacccccatgtgaacagtctgatctaccactgtgatgggagcatgtggagggaactgaggggacctttatgtggggaggcttgtctatcactgtggtaggggcttgtgaagggaaacgaccccttcccccaccccttgtgagcacgttggtctaccattgcgggggcttgagaagaaaactgaaggaactcctgcgtgaggtagttcatatacctttgaacaggccacatggagggaattgagtgcacccacgtgttaagtgtctggtctaccactgggggaagcatattgagggaactaaggagatgcccatgaaaggaggccggtgtaccactggggttgggtcacatggagggaaatgaggaaaatcccatgtgaggaggcttgtctaccattgaggtggggggactgagaagacccccatttgaggaggctgatttttattcagtgagccacgtgaagaaaactgatgggacccccatgtgaagaggctgattaaccattggggtggagcctccactagggtggaggcatgtggagaaaactgcaggaaacttcaagtgagaaggctgatctaacatttgagggaacccccgtttgaggaggctgttctaccactgaggtgggggcacctggagaggtaatgggtggatctttgtgtgaggagcctggtctaccactggggtggggatataagaagacaaactgagggaatctctgtgtgaggaggctggtctttcattgagggggcacgtggaggaaactgagaagatcaccatgtgaggaggctggtcttccatgggaatgggggcaagtggagaaaactgaacaggctctcatgtgaagtgtttggcctaccattatggtggggtcatgtggaggaaactgaggggaccccaatgtgaggaggctggtctaacattgagagggcacatggagaaaactgagagggttgccatataagcaggctggtggtaccacatggagaaaactgaggtgactttgttgtgaggaggctggtatacctttgggggggccacgtggaggaaattgaatggacaccccctttgaggtgtctggtctaccattgtggtgggggcacgtggtggaaactgaggggaccccatctgagaaggctgtctaccatttggggggctaagtggaggaaactgaggggacacccatgtgaggaggctggtctaccatcgaggtgggagaatgtggaggaaactgagagaacccccttgtgaggaggcttgactacctttggggtgggggatcatgaagggaactgagaggacccccatattaggaggctggcctaccattgagggaaccatgtggagaaaactgatgggaaccacacatgaggaggctgatctaccactggtgtgggggcacatggagggaactgagggaactcccatctgagaaggttggtctattattgggtggggttatgtggagggaactgagggaacattcacgtgaggaggctggtctaccattgggaggccacctagggagaactgaggggatccccatatgaggtggctggtctaccaatgggggaatcacgtctagggcactgaggaaatccttgtgtgaggagcctagtataccagtggaatgggagttcttggaggaaattgagggcacccctttgtggaggtgcttgtctaccattggggtgggggcacttggagggaactggggagacacccatgtgagaaggctggtgtaccatagcggtggggacacgtggaggaaactgaggaaacccctgtgtgaggaggctgatctaccattggcggaccacctggaggaaactgagaggacccccatgtgaggcaactggtcttccatggtggggcacatgacagaaactgagaagacattcatctgaggaggctggtctacaattgagggggacctgtggagggtagtctgtgtgaggaggctggtctgcccttgaggtggccgagtagaaagaagagaggaaaccctcgtgtgaggaggctagtataccattggtgtgggggcatatggagggaactgagggaacctcctcatgtgaggagggtggtttaccattgggaaggctgtattgatagaacccccatctggggaggctcatctaacactggggtgggggcacatggaaggaactgagtggacccttatgtgagaaggctggtctacctttgtggtgggggcttttggaggaactggaggggacacccatgtaaggacacttgtctattattggggtgggagcacgtgaagggaactgaggggatgcttctgtgaggagagtggtcttttgttgagggggtcacatggagggaaaccgagggaacccccgtatgaggaggctggtctaccattgagggggccacattaagaaaactgagggtacctgatttgagggggcttgtctactatttggttgggaggtaaccgaggggactcctgtgtgatgaggttggtttaccactgtggtgtggggcatgtgtagggaagttagggaccaccatatggggaagctggtctaccactgagagggccacatggaggagaactgaggggaaacccatgtgaggaggctggtctaccgttgcaggggccacatggagggaagtcaggggacccccatttgaagagacccatcttttattgagggggccacatggagggaagtcaggggaccgccatttgaagagacccatcttttattgagggggccacatggaggggaagagaggggacccatgtgtgaggagactggtctatcactgggggggcacatggagaaaaccgaggggacccctatatgaggagtctggtctaccattaagtgtccacatggacgggaactaatgggacccttgtgtgaggaggctagtctaccattagtggtggcatgtaaagggaacttggacccccatgtgaggcagctggtctaccattcatggggggctgcggagggaactgtgtggaggctggtccacctttgagcgggccatgtgtaggaatctgtggagaccccaatgtgaggaggctagtctaccattggggttgggggacaaaaagggaactgagggtaccagtgtgaggaggctggtctgccattgatggggctatgtggagggaactgatgggcaccctgtttgaggaggctggtctatcatttgggtggggaaacatttagggaactgagggggtcccaatctgaggagactggtctactattgaggggcccaaggtggagggaactgaagggacctccgtgtgagaaggcttgtctactggtggaggcacatggaagaaagtgaggggacccttgtgtgagtaggctggtttaccattgagtggtcatgtggaggcaactgaggtgacccttgtgtgtggaggctgtttttccactggggtgggcacatggagagaactgaggtggtgggggccagtgagtcatctggtctgcctttggggtggaggcttgggaaggaaactgaagggattcttgtgtgaggaggctggtctaccattgatgggaccacgtggagggaactgagtgggtccctatgtgagaaggctggtccaccactggaggtggaggggcacgtgtaggaatctgtggggaccctaatgtgaggaggctagtctaccactggggttgggacacacaaagggaactgagggtactcctgtgtgaagaggctggtctaccattgacagggttacatggagggaactgaggggacccctgccttgtgaggaggctcatctgccactgggaggccacgtggagggaactgaggagacctctacattggggggccatgtggtgggaactgaggggaccaccatgtgagggggctggtctaccattggggggacacttggagggaactgtggggactcccatgtgagggggctggtctactattgggtttggggaccatgtgaggaggttggtttcccattgtgggggtcacgtggaaggaactgagggggcccctgtgtgaggatcctggttggcctttggggtgggggccatgggagaggaactgtcactccagaagacagctaacacccattgtgtcttgaaattttcagcccagctgaatggagcttcatgggtgagtccaggcaagaccagccagaaacctacctgtatttgctgactaacagaatagaaagtaatggtaaatcagtgttttaggttgccccatttgggggcggtttgttgctcaataggtcactgctcatggtccatgttcctagttggaaaactaagagctcctgaggcaggcccggctttgcaagagaacccaggttcccacagcaggctggcctatcagtgacatccctttcaaagggaggaccagggatccggtgactgggatctgattattcatgaactcattcatttggatctattttctgcccaactcagggctgcaggctgagaatccagagatggtcacagcctctatccttgtatgtactccccaattcataagcgagacagacaggaaaaccaccaatgacagtgtgaggtgggctgtgagggtgatagtgaggatgattactatcacgatagttaatagagtgtaataataacaagttatgtgctcaccatgccccaggcacgcttctaagtacttcacatgtaccagcttatataattctcacagcagccctaggaagaagatcttgttatgttcatttccatttcacagatgaggaaacagagggacagagaggttaggcgactctccttaggaagtggtggatctcagagcagcgagggagcccagcccagagaaaggcccagagaagggagcgattatctgccaggaggaaagaggaaggcttttttttgggaggggtcatttgatctggcctttgaaggatgcttaggagtccaccaaccagagaggcaatggaaatatgtgcaggcctgaggcaagaagaaaccagagtgagcccagccagagacataacactgggtctgccttatccttgggtatgggagccaggcaaaagatggaatgacagcctaagagacagaagcggggaactgcaggacctgggagggcagtgagtggcctgagaaaccatctctgcaatttaaccctggtgaaaatgggaagtgacaatgaggctgctcagccccagagtcctcccctgaccctctcaggatcctgatcctctgtgaggggcagccctgccctgggagagacacagggataggctggggtgacaagggcctgtgcagatgagcagcatggggggatgtggctttggcgaccacgttctcttctgtattcactcttcgtttggccaatggtttgactcagggcataaatagtttttgctccaagctagggcattttgggaatgaacaggggcatgattaacagctaccccaggatgacaggtgcaaatccagacatttggtcacacagattacatggcacctctcatgagcttgacaattattaatccatttaatcctcctgaaaacctcaaaaagaaggttgttattatccccactttgcagatgatgaaactgaggcacagagaaaagaaatgcatgcatattagcacctactctggattgggcactgagctaggccattttacataaatcttgtttaaccctgacaatagatatgcaaaagacatgctgggaaccctgtttactgatgacaaaacaggctctgagacccaatctgtccaactgatcctcaaccttagcctcttccgctgcccgactgggtctcttaagaacatctgtccgatctgaatctctggcctgcctgtgtgtgtgtgttttttaaatttattttcagtcccctcgccctccttggattgcagcaaggaaagaggtgtgtcttccgcagaaaaatgtgcatgttcttttaggtgagatgggaacaatgcggggagggggcctggctatgagggcaggggctgtgggtggggtgggggagtggactgttggcagcagaacctgctaggtaggctcactagactcagacacgcacgctctctctctctctctcaagaaaacaggtgcacaaattattaggttggtacaaagtaattgtggtttttgctattaaagtaatggcaaaaactgcaattatttttgcaccaaccaaatacatccatgtggatggggcagccttttccaagggattccaccatgcagggctggatctggcctcctggctgtgtgactttgtgcattgtccttccctctctgggctgtggtgccccagctggaactccaagggctgagactcaagggccttgtagagccttggctctgtacccagctctgtggtggattcagggttagggggcctgggttcaaatccagaccctgccttttcagatgtgtggcctccgagcaaggtatttagcctgcctctatgtgctcacctggaaaatggggtgatgaagaagatgatgatgataatgggaactccctcttggagctgctgtgcagatgaagtgagtgaatataagatggatgcttagagcagtgcacggaagagctgtgctgtttgttattatcttctaggggaaacacaagaaaaccaacttagggaggaggcagcctgtcctggaaggggaggtccccacaaagaacactgactccagccagctcctatcttcaggccaaagtcccagcccagggtttgctgtgaggtgggggcctctagagtctgaagggcatgtctggtgtgggcaggcccaacctgaccaggcaccagaaacagacaggacattgtgcactgataggagtcctacaggctgagggagctgtgcccgggcacccgctgggaaccaggcggcagtggagggtggggagtgggccttgtgcccgggaatgcggccccaccaccacagccagagatggaggggactacagcccccagccagcccggcgtctccccagtctcagtcagttgggtgccacctttgagatttttgccttatgagtgagcattactataatttatttcatggttgtcttaatttttaatttatttttacatttaatttttgtttggatctgagctgtgctcacatggttcagaaatcaaaagtttagtaagtgctttcaggggagtctgcctcccatcctgtctcccaccccggcccctcccccaaagccatgattattattttacatcaacgaatatgaactatatgtatttgatatatttttccaattcaaagacaatttttagtatgcaatgcacactgccctacaacacgcttttctcacttagtatttttaacttctctacttaagtgagtgtaaatgaaaaaatacaccaccaccttctgtaaacagaaggtagctatgacaatagcacatggtgatggagcaagaccattacgttccagtggggtcctgttgtctggggagcccctgagctcaaggtctgacctctactccctagttccagagggactagcaactgttgatggcacactgaggacacccaacaccaagctgacactttggccgggaagtaatcaaaaggactaaaaagatttggacaggaaatgcctctcctcatcctggtcctggtgtatagcagcattgccattccaacagtggtgtaagtccacactttgggaaaccctcatctagtccaacaaccctggcactttaaagacgggtaaactgaggctcagaaagggtggaggacttaaaatgatgcagctagttggtgcagagcctgggcaacacctcaggttcccaggaccctatctacagcccctggactaggcaaatgggctttgtttggaaacaaatgtgcccaatccctgctcctcctcagccccctccccaaccccaaattttcatttagtgaacctctacaatttcatctagattatctaatttgttggcatacaattgttcgtagtattccattttatttctttaatattccattttatttctttaaggttggtagtaatgtcccctctttaatttctgattttaataatttgagtcttatatactttttcttggtcaatcttatacattctgttaatctttttttcagcttttggtttcattgattttctcttttgtttttctattttctatttcattaatttcctttaattaatctttatgatgtccttccttcagcttgctttaaatttagtttgcttttcatttttcactgtcttgaaggtggaacttagataattaatttgagatctttctcatttttgaacctaggaacttacaactataaatttccttctaaccactgatttaactgtatctcataaattttgtgatgctgtgtcttaattttcattcattttaaatattttcatttcattaaaagtattttctaatttcccctgtgatttctcttttgattcattaaagtgtgttgtttaatagccacatatttgtgagtttccaaaatttctttctgttaatgttaaccaattttattcttttatggttagagaacatacgttctatgatttctgtccttttaaacgtattggtgtttattttgtggcctaagatacagtctatcctggagaatgttccatgtacccttgaacgcatattctgctgttgttgggtagagtgtattgttttgttttgctttttgagacggagtctcactctgttgccaagctggagtgcagtggtgtgatcttggctcactgcagcctccacctcctgggttcaagcgattctcctgcctcagcctcccaggtagctgggactacaggcgggactacagtcatgcaccaccatgcccagctaatttttgtattcttagtagagacggggtttcaccatgttgaccaggatggtctccatatcttgaccttgtgatctgcccgcctcagcctcccaaagtgctagggttacaggcgtgagccactgcacctggccgggtagagtgtttgatagaagcctgttagggctagttggtttatagtattgttaaagtcatttgtttcctttttgatcttttgccaattttttgtgtacattattaaaaataagatattgtaatttataattattattgttgaactatctttctagattagatattctagaattagaatatctaattctattgttgaattatttttcccttcaattctgtcagtttttccttcatgtacactggggctctggtgttggctgcacatatgtttataattgttatatcttcctgatctaaagagtatttcttatagacagcatatagttggatcttggtgttttttttttttttttttttttttaaatccagtctggaaatctctgccttttgattggattgtttaatccagtcacattaatggtattattgatgtcattgaattaacatccaccattccaccattttactttttgttttctcatgtcttttctgttcctctgtcattattactttatttcctattaagtgatttttaaaatgtagcatgtatacctctttaattatttttactacatattttttagttattttcttaatgattgctctagggctttccctatacgtcttacattttcagaatcagctttagatttatattaacttaaattcagctagaaattgaaatattacttcaatgcagctctattcctccctttcttttagtgatattgttatacatatctataaatattacaaacaaaataatacattattatagaattattattttatgtaattttatatttttgaagacaatatatcatcttaaattttcagaatcacttttagatttatattaccttaaattcagttagaaattgaaatattacttcaatgcagctctatttctccctttattttagtgatattgttgttacacatattgcatctataaatagtacaaacacaatagttcattattataaaattattattctatacaattttatatttttgaagaagctaagagtagaaagaagaacaagtatatcgtatagcttttgttatgttacccttctggtgggcatttctggttgtcttcattggttcttgtggatttgggttaccatctggagtcattttcttatcccagtacagcttttctctcacacatctccttgtgctgtaattggtaaatatattatatgtctgtatgatagggccaataatacattatatgcaaattgcttcatataattactttttaaatcaattaatggaaggaaaaagtacgcatttgtagtgccttttatacttgcataattgctttttttcatgtggaatcaaataatcatcaggggtcatttgttttcagtctgaagaacttcctttagtatctgttgttaaggctgatctgctagtaaataaattatcctagttttgtttatcttgtaatgtcttgaattaaccatcattttcaaaagacagctatgctggatctaggatgtttagttgacagtttttttctttgagcactctgaatatgttatcccattgccttctgacttccattattcctgatgagaagttcattgttaatcttatcaggattctcttgtaaactgagtcatttttctttcattgcttttgaggttttcttcttgtctttgggtttcaacatttttactctgatttgtctgtttgtggatctctttgtgtttattctactcagagttcattgagattcctagatgtatagattaatgtttttcagtaaatttgggttgctttcagccattaattcttttaatatcttttctgattctttctccttcttctttccttctaatactcccactacatgtatttgttgtgcttaatgatgtgccacatttctctcaggctctgttcatttttcatcatttttttctctctgctcttagatttcataagctctatcaacttttcttcaatttcactaattcttctgccaggtcaaatacactgttgagctcctctagttaattttttgaaaatctcagttattgtacttttaactcccgatttccattcgattattttaaaaaataatttctatctgtttattaatatctccacttaatgtggctttgtcatcatatgttcctttactcctttaatcatgatttccttaaagttatttgaacatatttacaattaccacttttaagtctttgtgtgttaaatccaacatatgatttctctcacaggcagtttcttttgcttgcttttttacctcctggtgtatgagtcatactttcttgtttctttgtatgtctcttaagttttttgttgttgaaaagtagacattgtaaataatgtagcaactctggataaattagtccttccttctggaacttatttacttgtttacttttttgtgacttgctggattattttagttaagttgattttcctgcatgaaggctctggtattgctcttagagggtacatccttgggtatgcccacagtcaccctgagatgacagtggtttttgcagggctgtctttaattttatctttctctgaccacactcatctgttaagttccactaattggtggctgattgccctattgttttcaacactacatatatttctttaaagactgatcccatcaaagccagactcctttgagcagatagttcctgaggtcagtgtttgagatctgttgtgacccccaggaggactctttccagctgtctctttccttgattctctccagtaaaatagctgtttatggtttagcctatatctccaatgaacccatcaatttcctcccagttgcctttcaccacaacctgcaatgtttttgagaggggtcttaggcttaaacttgtccacatttggttgcaaatgaagtcagttcctttggggagaaatttagagctctctcttctatggtctgcttcttcctccaggcaaaaatctctgaagcaaagctctagtgctggaagtgtggcaatggtaaacttttctctgaatgacacaccagatttaggaattgagtgctcagtgtataggggaaacagcctcaggtctcctcagcttgcctctctgtatggaatccttgctccatcagtggggcaagagtgattgggtctccagtagtctctgtggatctgtgcccaaggtagaacctccatgccatgagttgggccggatagaagaagggagccctcactgcctggctgaacttgcctggaacatagaatcagcaacaggcagctgcgaacaggatgagaaatgctgacattgtgcgcctctcgggaagctagctcctgactaggagctggaaggagaggaaaccctgtgttcttggctgtacccatatggagtaaagtttctgtctcactgagctggatgagaggaggaataaagtgatttttttgtctttttgttgtatcagttactgtgggtttaaacacaacagactcttgctgttcttcctgaattttagtatatttgaaaaaataaatgtttattaattagctgtacacccttagaattacttccagatacattaaatgattgttaagaatttttttttcaccagttactctgggagtggtccataggatatctcacactatcatgcaggaagtagaactcacaaagatattgcctcataatagtttttagaagctacattacttcacctttcatatttaggtctacgattctcctgaatttatatttttgtatatgatgtgaggtaggggtcaggtttcctttttctcctgtattgaagagaccatcccttccccattgcccagaagagtctcctttgtcataactcaaatgttcaaatatggctgggactgtttctaaactttgtatgctgctgtactgatctatttatctattcttgtgccaagagcacattgtgttaattataaaaactttgtgatcaatttttatattgaacttggctattcttagcctcttatatattcgtacaaaatttagaattattttatcaattttcacaaaataacctgttgtattttttattggaattgcattgattgattctttagattacttaggtgtaaactcttgaacatgcttttatctccttttatttaggtcaagagttggcaaaccatgactagtgggtcaaatcttgctgatagcctgtttttgtatgaccctggagctaagcatcattttcatttttaaagagacttttttatatgaaaagaataacatgtgaaagagaccatatcactgaattttaattactattattttaagatttttgcttatttgttcataaataagattgggctgtagttttctttcttatgattcccttgttgagtctagggtttggacatcaacattatactgctctcataaaactaatgggggagtttatctctttttctattttctggaaaatttgcagaaaattattttgtttctccatggtttttgtagaatttgccagtatatttattttctgcatgaaaaatatttaaatacagatgaaaatttgaaaatggttaaatgacatttctatttcttcttgtcaccatttgatacattgccttttaaagaaaaatttgtccattttacctaattttcaaatttataggtataaaattgtttgtaacatcattttttaagtgtctataggatctatagaaatatctcctttttaattcctattattaataatttgtgtatttactctctcattttcttgatcagttttgtaaggagtttattgaccttattgcttttttcaaaaagataaacttttggcattattgatcatctttgctatgttttctgttttattaatttctggtatttattattttccttctcttactttctttgggtttattttgttatccttttctaacttcttgtgatgggtcactgatttctcagcctttcttcttttcaaatactagaagtattaaattagccattaatcattgcattagctttagccaaaagttttgatatgtagcattttcattacctttcacttaaatatattttcgaattttattgtgattccttctttgatctattggttattttcaagtgtattttttaatttcaaaaaaagtgataatttacaatacaattaaggtagaaatatattaccccctgcctccctcccaaattattgatttctaccttaattgtattttggtgacagaatgtattctaggtgatttcaaatctttgacctgtgttaaaagttgctctgcagcttaagatatgatcaatttttttatcaatgctccatctgtgtttgaaaaaaacaaacattttgtacttgtagatgcaatgttgtatgtgttaggtaaatctgtttcttgtagaaagcatatagctgtatgcatataggatcatattagtatctaccctgccaatctgtaatttacatttaatataatgacatttaaatttaatgtaattaatttttgcctggtaagggctatgtctgccatttgcttttcgttttttccctctgtttctatttctccattttttccctcatttcctgtggttacttagacaattattagaatcacattttgatttatctacagtgtatttgtgtgtatctctttgtatagattttttgtggttactatagatattatatggtacatacataacttatcagagcctactaagtattgacattttaccaacttgagtaaagtgcagaaacctatctctcttcacattcctttgccctctctcatttataatttgtcttaaatatttgctctgcatacattgagaactacatcagataattttaaaagttttgtgactccaacaaaattttgaaaactcaagaggagaaagaacatctactgtatttacccatactttcattctttcttttccttcttgatgttccaaaattcctttttttaaattacttattttctctttcaagaacttcctttagccattattttaggttaggtctgctggtgacaatctcttagttttacttcatctaagaatatcttgattttctcttcgtttctgaagaataattttgtttggtataggattctgagttaagtgttctgttctttcagcactttgaaaaatgtcatgccaatttcttctggtctctatggtttctgatgagaaatctactgtcatctgaatggttttctcacataggaaagtgtcatatttctctcacagctttcaagattttttctttgtcttttgttttcaggagtttaattgtggtatgtcttggtgtggatatctttgagtgtatcttatctggcatcagctcagctcttgagtattttcagtcattatttctttggatactttttcatcctcacactttttcctctcctctggggactttgatgacatgttagttttttttttttttttttttttttttttttttttttttttttttgatagtcccataggttgcagaggctctgctgttttttttttttctgtttattttctttctttatgcagataaggcaatgtctattgctctatcttcaagttcatggattctttcctttactccctccattctgctgttgaacctatccattgagtttttaattcagttatgtattttccagttataagatttccattttgtccttctatatgtcttctatttctttgttgaaattttctattttttcacttgtttcaagtatgcttataattgctagtggaagaatttttatgatggctgctttaaaatccttgtcagatcattctaatttctgtgtcatcttagtgttggcatttgttaatgtcttttctcattctagttgagtttttcttggttcttggtgtgattgtatcctgaacattttgtgtgatacattaagaagctctgaatcttcaattaggagtggaggtctaggtttttttgttgttgttgcttttttttttttttttttttgagacagagtcttgctctgttgccaggctggagtgcagtggtgcaatctcagctcactgcaacctccgcctcccggattcaagcgattcccctgccccagcctcccaagtagctggggttacaggcatgtgccaccatgcctggctaattttttgtattttagaagagacgtggtttcaccacgttggccaagaaggtctccatctcctgactttgttatctgcccacctcggcctcccaaagtgctggggttacaggcataagccactgtgcccggccggtccaggttttttaataggcctccatggacatcccccagagctgacagtttgttactgctgggcgcggaaagtcctcagtaggcctctgccgacacaatatggctttgagggagagggacactttgttacctctcatgtggcttccactgacataatggggcaggtttctcattaccactaggcaatggtgaaaatcttgttttccacttggccttctctgacaacacccagaggggagaaggagggacaacttattattactgggtggggacaaatgtcctggctccctactcaacttttgctgataagagtggggctgagtacacaggtttttttgttttttgttttgccatgtaggaatagggctgtttggagggcagttattttcttaaaattttctgtctggctaggttgcttctttcctggtcctttggctacagaaatcaggctttaagtaggactttaaaatttctataaccattggtgtttctggtttttctagcacacagtccgagatctaggaggcaaaaggacacttcagggagcacactgttaatgttgcttcttgggtctcaaggtctttagctgtctgctctcttctctccactttctggcgtcttaccattgttttacatatgaaatgaggtttttaagctgtagttaagagaagaataggccaaattgcaactactccatcttgtcctgtgtgaagattttcattcttaattcaatttctttattatagttgtattcagattttctattttttctttaatcaattttgtttatttgtgtctgttggaaatttgcctatttcctctaagttgtctaatttgttggtataaagttgcttataacattttcttataatccatttcagggtaagtagggatgtctcctctttaattcctgattttggtgatttgtgccttctgtctttttttccgggtcagtctagctgaaggttcatcaatttaattaatcttttcaaagaaccaaattttggttttattgatttactctactgtttatttcttattgatttctgttctaacctttgttacttgctttcttctgttttctttgcatttagcatactcttcattttctagtttcttaagatggaaagtttaaatgtcctgctaaacactagtttagtgcatcccataaattctgatattaaaaaaattaggtcaaaatattttctaactttcttcattatttattttgcactcatgggttatttggaagtgtgtgagtttccaaatagttgaggatttcccaggtttctttctgttgttgatttctaatttaatttctttgtggttagggaacatattttgtatggcttcaattttaaaaatgtattgggacttgcttgtggcctaacatatagtttatcctgaaaaatgtcccgtgtgcacttgagaggaatgtatagtctgctgttgttgggtggagtgttctatagatgtctgttagatccagttggttgttcatgtctgctatttccttgttaatctccttcctgagtgttctatccatgattaaaagtggagttttaagtccaactattgttgaattgcccatttctctcttcatttccgtcagttaaggtttgtgtattttagggctctgttgttggaaaaaatatgtttacagttacatgttcctgatagaatgatccatctattatcataaaaatgtccttctttgtctccaattattattgttgaattgtctattttttctttcaattttattagtttttccttcattttgaggctcttattagatgtctatatgtttataattttaaaagtgaggcagttatatctttctgatgtacttaattttttcattctaacatgtcctttttgtctctagcaatatttttttagcctgaagtctattttgtctgatattaatgtagccactgtggctttgtatagttattattgtacagtatggatctttttccatccctttgctttcaactaatttgtgtctttaactctaaactttgtctcttatcaacagtttatagttagatctcacttttttaatgcagtctaaccatctgtgcctttatatttgggtagttaaatcatttgcttaatgtaactattaatatggttagacttagattggccatttcactattgttttctgtctcctgtcttttttatttctctgtttttccttgactgctttccttcatgttaagtgaatattatttagtgtaccattttaatttcaccgatttttttctatatttttggttattttcttaatgattgttatagagatttcaatatgcatcttaacttatcacagtctacttcaaaaaatttttaaaattatgctttaagttctggggtacgtgtgcagaacgtgcaggttttttacataggtatacacatgccatggtggtttgctgtacccatcaacctgtcatctacattagatatttctcctaatgctatccttcccctagccccccatcccctgacaggccccagtgtgtaatgttcccctccctatgtccatgtgttctcattgttcaactcccacttatgagtgagaatgtgtggtgtttggttttctgttcttgtgttagtttgctgagaagatggtttccagcttcatctatgtccctgcaaaggacacgaactcatcctttttatggctgcatagtattccatggtatatatgtgatacattttctttatccagtctatcaatgatgggcatttgggttggttcaaagtctttgctattgtcaacagtgccgcagtaaacatacatgtgcatgtgtctttatagtagaaggatttataatcctttgggtatatacccagtaatgggattgctgggtcaaatggtatttctggttctagatccttgaggaatcaccacactgtcttccacaattgttgaactaatttacgctcccaccaacagtgtaaaagcattcctatttcttcacatcctctccagcatctgttgttccctgactttttaagatcaccattctaactggcatgagatggtatctcattatggttttgatttgcgtttctctaatgaccagtgatgatgagctttttttcatatgtttgttggctgcataaatatcttcttttgagaaatgtctgttcatatcctttgcccacttttttatggggttctttgtttttttctgtaaatttgttcaagttctttgtagattctggatattagtcctttgtcagatggatagatgcaaaaattttctcccgttctgtaggttgcctcatcattctgatgacagtttcttttgctgtgcagaagctctttagtttaattagatcccatttgtcaattttggctcctgtgccattgcttttggtgttttagtcatgaagtttttgcccatgcctatgtcctgagtggtattgcctaggttttcttctagggtttttatggttttaggtcttatgtttaagtctttaatccatcttgagttaatttttgtataaggtgtaagaaaaaggtccagtttcagtttttttgcatatggctagccagttttcccaacgccatttattaaatagggaatcctttccccattgcttgtttttgtcaggtttgtcaaagatcagctggttgtagatttgtggtgttatttctgaggcctctgttctgtcccattggtctatatatctgttttggtaccagtaccatgctgtttttgttcctgtagccttgtagtatagtttgaagtcaggtagggtgatgcttccagctttgttctttttgcctaggattgtctcagcttacaggctcttttttggttctatatgaaatttaaagtagttttttctaattctgtgaagaaagttgacggtagcttgatggggttagcattgaatctataaattactttgggcagtatggctattttcatgatactgattcttcctatccatgagcatggaatgtttttccatttgtttgtgtcccctcttatttccttgagcagtggtttgtagttctccttgaagaggtccttcatatcccttgtaagttgtattcctaggtattttattctttttgtagaaattttgaatgggagttcactcatgatttggctctctgtttgtctattattcgtgtataggaatgcttatgatttttgcacattaattttgtatcctgagactttgctgaagttgcttatcagcataaggagattttgggcttgagacgatggggttttctaaatatacaatcatgtcatctgcaaacagagacagtttgatttcctctcttcctatttgaatacctttatttctttcttttgcctgattgccccggccggaacttgcaatactaggttgaataggcatggtgagagagggcatccttgtcttgtgctggttttcagagggaatgcttccagtttttgcccattcagtatgatattggctgtgagtttctataagtagctcttgttattttgagatatgttccatcaatacctagtttattgagaatttttagcatgaaggggtgtcgaattttgtcaaatgccttttctgcatctattgagataatcatgtggtttttgtcattggttctgttcatgtgatggattacatttgttgatttgcatatgtggaaccagtcttgcatccagggatgaagctgacttgattgtggtggataagctttttgatgtgctgctggatttggtttgccagtattttattgaggatttttgcatcaatgttcatcagggatactggcctgaaattttctttttttttgttgtgtctctgctgggtttgggtatcaggatgatgctggcctcataaaatgagttagggaggattccctctttttctattgtttgaaatagtttcagaaagaatggtaccagctcctttttatacctctcgtaaaattcagctgtgaatctgtctggtcctggactttttttggttggtaggctattaattactgcctaaatttcagaacttgttactggtctattcagggattcgacttcttcctggtttagacttgggagggtgtatgagtccaggaatttatccatttcttcaagattttctagttcatttgcatagaggtgtttatagtattctctgatggtagtttgtatttctgtgggatcagtggtgatattccctttatcattttttgttgcgtccatttgattcttctctcttaccttctttattaatcttgctagcagtctatctagtttgttgatcatttcaaaaaaccagctcatggattcattgatttttttgaagggatttttttgtgtctctatctccttcagttctgttctgatcttagttatttcttgtcttctgctagcttttgaatttgtttggtcttgcttctctagttcttttcattgtgatgttagggtgttgatatacgatctttcctgctttctctcgtgggcatttagtgctataaatttccctcaaacactgctttaaatgtgtcccagagattctgggacgttgtgtcttttttctcattggtttcaaagaacttatttattactgccttaattttgttatttacccagtagtcattcagtagcaggctgttcagtttccatatagttgtgcggtttcgagtgagtttcttaatcctgagttccaatttaattgcactgtggtctgagagactgtttgttatgatttccattcttttgcatttgctgaggagtgttatacttccaattatgtggtcaagtttagaataagtgcgatatggtcctgagaagaatgtatattctgttgatttggggtggagagttctctagatgtctattagatctgcttggcccagagccaagtacaagttctgaatatccttgttaattttctgtcttgttaatctgtctaatattgacagtggggtgttaaaatctccaactactgttgtgtgggagtctaagtctctttgtaggtctctacaaacttgctttttgaatctgggtgctcctgtattggatgcatctatatttaggatagttagctcttcttgttgcattgatccctttaccattatgtaatgcccttctttgtctcttttgatctttgttggtttaaagtctgttttatcagagagctaggattgcaacccttgctttttttttgctttcaatttgcttggtacatcttcctccatccctttattttgagcctttgtgtgtctttgcaagtgagatgggtctcctgaatacagcacactgatgggtcttgactctatccaatttgccagtctgtgtcttttaattggggcacttagcccgtttacatttaaggttaatattgttttgtgtgaatttgattttgttattatgatgctagctggttattttgccttttagttgatgcagtttcttcatagtgtcaatggtctttacaatttggtatgtttttgcagtggctggtcccagttgttcctttccatgtttagtgcttcctttaggagctcttgtaaggcaggcctggtggtgacaaaatttctcagcatttgcttgtctgtaaaggattttatttctccttcacttatgaagcttagtttggctggatataaaattctgggttgaaaattcttttctttaagaatgttgaatattggcccccactctcttctggcttgcagggtttcttatgagagatccactgttagtctgatgggcttccctttgtgggtaagctgacctttctctctggctgcccttaacattttttccttcatttcaaccttggtgaatctgatgattgtgtgtcttggggttgctcttctcaaggagtatctttatggtggtctctgtatttactgaatttgaatgttgggctgtcttgctgggttgggcaagttcttctggataatatcctgaagagtgttttccaacttggttccattctccctgtcactttcaggtacaccaatcagacgtagatttggtcttttcacatagtcccatatttcttggaggctttgtttgttccttttcattcttttttctctaatcttgtcttctcactttatttcattaagttgatcttcagtctctgatatcctttcttcagcttgattgattcagctattgatacttgtgtatgtttcccaaagttctcatgctgtgtttttcagcttcatcaggtcatttatgttcttctctaaagtggttttctggttagcaattcctctaatattttttcaaggttcttagcttccttgcattgggtagaacatgctcctttagtttggaggagtttgttattacccaccttctgaagcctacttctgtcaattcgtcaaactcattctccatccagttttgttccattgctggcaaggagttgtgatcctttggaggagaagaggcattctggtttttggaattttcagccttttcgtggtggtttctcctcatctttgtggatttatctacctttggtctttgatgttggtgacctttgggtggggtctctgagtggacatcctttttgttgatattgatgctgttcctttctgtttgttagttttccttctaacagtcaggcccctctgctgcaagtctgctggagttttctggaggtccactccagaccttgtttgcctgggtatcaccagccgaggctgcagaacagcaaagattgctgcctgttccttcctttggaagctttgtcccagggaggcacccaccagatgccagctggagctcttctgtataaggtgtgtgttggtccctgctgggagacatgggggtcagggatgcacttgaggaggcagtctgacccttagcagagcttgaatgctgtgctgggagatctgctgctttcttcagagctgtccggcagggatgtttaagtctgctgaagctgcacccacaggtgtcgtttcccccaggtgctctgtctcagggacatgggggttttatctgactggggctgctgactttttttcagagatgccctgcacagagaggaggaatctagagaggcagtctggctacagcagctttgctgagctgtggagggctctgcccatttggaacctcccagcggctttgtttacactgtgagggtaaaaccacctactcaagcctcagtaatggtggatgcccctcctcacaccaagctcaagcatcccaggtcgacctcagactgctgtgctggcagtgagaatttcaagctagtggatcttagcttgctgggctctgtaggggtgggatctgctgagctagaccacttggctccctggcttcagccccctttccaggggagtgaacggttctgtctcactggtgttccaggcaccactggggtatgaaaaaaaaaaaaaaaactcttgcagctagcttggtgtctgcccaaatggctgcccagttttgtgcttgaaacccagggccctggtggtgtaggcaccggagcgaatctcctggtctgagggttatgaagaccgtgggaaaagcatagtatctgggccagagtgccctgttcctcatggtacagtcctttaccacttcccttggctagaggaggaagttccctgaacccttggtgcttccctggtgaggtgataccccaacctgcttcggcttgccctccatgggctgtacccactgtctaaccagttccaatgagatgaaccaggtaactcagttggaaatggagaaatcacccaccttctgcgttgatctcactgggagatgcagaccggagctggtcctattcagctgtcttgccagcagaaatctcctgtctacttcaaattattaatactggtaaaatataaactctttgttccagcatagctctattttcatatctctcctttgtgctaatatttcaaaacctattatattcatatatgttataaagcaaacaatacagtgttgcaattattgctttatgcaatactatgtattttaaagacgttaaagaaatgagaaatatatatttatagtcttttatattaattaatgtgcaggtataccttgttttattgcactttggagatactgtgttttttgacaaattggaggttagtggcaaccctgtgttgagcaagtctattggcaccatttttccagcagcctgtgtttacttcatgtctctgtgtcaaattttggtaattctcacactatttcaaagtttttcattattttatctgttatggtgactgcaatcagtgatctttgatgttactattgtaattgttttggagtgccacaaactgtgcttatataatacagtgaatttaatcgataaatacgtgtgttctgactgcgcccccaaccacccattctgtgtttctctctctcttctggcctccctattccctgagacacaacaatattaaagttacactaattaataaccctacaatggcctgagagtgttcaagtgaaaggaagagttgtacatctttctctttaaatcaaaaactagaaatgattaagcttagtgaggaaagtatgttgaaagccaagataagccaaaagcaaggtctcttacaccagttaggcaagttgtgaatgcaaaggaaaacttctcggaggaaagtagaagtgctgctccagcaaacatacatgataaaaaagtgaagcagccttaccgctgatatggagaaggcttgagtggtctggatagaagatcaaaccagccacaacacttccttaagccaaagcttaatccagagaaaggccctaatgctcttcaattctatgaaggctgagagaggtaaggaagctgaagaaggaaagtttgaatctagcagggattggctcacaaggtttgaggaaagaaaccatcttcatagcagaagtgcaaggtgaagcagcaagtgctgatgtagaagctgcagcaagttattgagaagatccagctatggtaattgatagaggtagctacactaaacaacagattttcaatggagataaaacatacttctactggtagaaaatgccatctaggactttcacagctagagagaagtcaatgcctggcttcaaagcatcaaagcacaggctgactctcttgtgagaggctaatgaagttggtgactttaagttgaagccagtgttcacttaccattccaaaaatcctagggctcttactaattatgttattaattaggctaaatttactctgcctgtgctctagaaatggaaccacgaagcctggatgacagcacatttgttacagcatggcttactgaatattttaagcccactgttgagacctactgctcagcaaaaaatattcctttcaaaatattactgtttattgacaatgcacttggttgttcaagagctctgatacagttgtataagtagattaatattgtttttatgcctgctaatacatccattttgcagcccatggatcaagaagtaattttgattttcaagtcttcttaattaagaaatacatttcataaagctatagctgatatagatagtgattcctctgatggatctgggcaaagtaagttgaaaactttctggaaagaattcaccattctagatgccattaagaacattcatgattcatgggaggaggtcaaaatgtcaacattaacagaagtttggaagaagctgattccaatcttgatagatagctttgagcggttcaagacttcagtagaggaagtcactgcagttgtggtggaaacagcaagagaactagaatgagaagtggagcctgaggatgtgactgaactgccacaatcccataatacaattttaactgatgagaagttgcttcttatggtggtaaaataaagtggtttcttaaaatggaatctactccatttgaagatgctgtgaacattgttgaaatggcaacaaaggatttagactaatacataaacttggttgattaaggcagcagcggggcttaaaaagattaactccaattttgaaagaatttctactgtgggtaaaatgctatcaaacagcaccacgtggtacagagaaatctttagtgaaagagtcaatcaatgcagcaagcttcactgttgtcttattttcagaaattgtcacaaccacccttcctttagcaaccaacaccctgatcagtcaatagccatcatattgaggtaagatcctccaccagcaaaaagattatgacttgctgaaaactcagatggtttttttaaagcatcttttagcaataaaagtatttttaaattaaggtatgtacatttgtagacataatgctattgcacacttaatagactacggtataaaggtataattaaacataacttttatatgcactggaaaaccaaaaagtttgtgtgatttcctttattgtgatatttgctttattgcagtggtctggaattaaacctgcaatatcttttatgtatgcctttatttaccgtttctggtgtttttcatttctttctgcagattttagtaactctctgaagtcatttctttttagtttggtagacttcttagagaacttcttctaaggtaagccagtcagcaatagattctgtcagtttttgtttttctgggaatgtttttattttgcattaatgtttggaggatagtttttttgggtacagtaattttggttgatggtcttttcctgtcatcacttggaatgtggtatcgcactgccttatggtgtctattgtttctagtgagaagtcaggaaaattaattttactcttgctcccctatacatgagtctattttctcttgctgctgttaagattttcactttctccttagctttcaacagttttactgtggtgtacctatgtgcatatgtctttgtatattttcagcttggggtttgttgagcttcttggatgtgtaattaaaaatgtttaaattaaatttaggaagttttggccaatatattaatatattaaaaaattctttctgcctctttctctctctctgtgtatttttgggactccctttatgcatatatttgtgtgcttcatattgtctgacaggtctctggggctctctttatgattttcagtctctttaactcttagtttttcagattgaataatttctactgatctttcttcaagtttaagaattatttcttctatctcaaatatgctgttgaacccttctaatgatgttttttcatttcagttatctcacaagagtgcaataagctacccagacataggaaatcaggcttaagagtaaaaacaagaataaaaaactggacagagacatcagaaggcacactgtgtaagggagacagatatcacacttttaaccaggcaagttactaaataaacagctccagaatttcattttggttctttttttataactcatatctcctaatcagtgatctctttttgttgatttgttgtggttatactttcctttagttctttaaatatggtttctttagttatttgaacatatagtgtatttgaagtatttttctgctaagtcgaacatccaggaaccatcagcaatagtttctagtgagagtctttttcctgagtatgggtcacattttactgtttcttttcatgtctcatagttttgttgaaaattagacattttagataaaatattgtagtaactctggattctgatttgttcactctgacagttgttgacactctgtttgtctgcttgtttatttagtaaattgcctagttaaaagtgtgaaatctgtctcccttacacagtgtggccgctgatgtctctgtccagttttttattcttgtttttactcttaagcctgatttcctaggggtcatccctgtgtctgggtagcttaaaatgatcgtgcagaggttgcgctcacacactttgagccagtatggcttttgtcttctgctgatgtatgtgtgtgggggaaagagtgcattcaaagttcaggatgttttcaagtctgctgtggttttcactttcttctgggcactgtcatgtctcttagacaactgtgcatagactcagggttggccaacatgtgtgcatagccttctccattctttatttcacacatgctgctgggactctctttgccccagtcacaacgacaactcagaatagtagagctattggcccgcctgtttccccattctgagattatcactttcaccaagtagccatcacacactgctccacattgaatgagccacctttaaccatggcagcctcatttctggttctcataccctagagaaccctctgtgtcaactggatggggggattgggaacagccctaggcactatagtcacagtcttaccctgttactagttgaatatcagtaagttttcaagcatgacagctctcaaatggctgtatgtatatggcccgtgttcagcatgcctaaatggttggtctgtcggttttatccagctcttcgagcagagtgtttgctcacatcctcacacaaccatagctggaagtcttatgcattcccaccacagcatattatttttattactacccttcatttaaaaaattgaactgatgaaattacatctgaaattatttcctttttgcctgaagaaaacctattagtgtttcctttattcatgtctgctagtgacaattctgtaatttaaaatgtatccgaacttgcctttattcatctttgttcttgaaagatattttctctggttataaagttcttgggttggtagttattttctttggcacattggtattatcattctattgtcctctgtcttttgtatttcttgtggaaaagctagcactcattctaattgttactttttaaaggtaatttttgggtacttctgcctgtttttaagactttctcttagtcttcagttttcggcagttttattttgaaatatttgtgtaggctttgaaaaattgtgcttgggatttgttggaatttttgaatctatagatggatttttttcatcacctttggacaattctcagccattttatcatcatttattgcccctctatctcatagcttctactggattccaatgaaatgtatttagaccttttactgtgttctctctgtcttttattccctcatttgttttcctctcacagttttatctcattgtgcttcatttaagacattttctttttaatctatcatctaacttaattctctctttagctgtgtctaatccactgttaacccatccattgtgttttttaatttcagtgtttatattttgaaattggggaatttatttatatttagctcaaatctgccattcattttttaaaatatagttttcaattctctgctgaaattatcaatcttttctgttgtctcctgggacttataaacatagtaattgtaaagacttttcctgatcatctcaatatccagaacctctgtgtgtctatttctatcgtctgttgactgctggtttcattcatgttgtcttgtctcttcatttgcttagatatgtttagctatttggtagatattttatatgctaaattgtttgccaaaataactcgaggcctaggattgtaggtattctctttcagagaatatttgtgtttgcttctaccggtatcctagtggacactagaatttggcatcacctcaatgcagtttcacagattgagagcttctgggtgtccagatgactggaagctggactcgccaacttcctgttcacttctgcgcatcagatctttgttaatgcaatccacatatacagtttgctttttgaactggtacctcccatgggccagttagtatgagttaaggtgaggcaggggcagcaccaggggtgggagaccataggacagagccaacaccagcagacttggcagggagggaaccaaaaggagcagcttccaatttagtgtgagaaagattcctccccctggagctgtccagggagggtttcccaggtgggaggaagcactttaccatggcaggtggggagcagggtttgggtgctggaggaagtgcagaggggaatttgggcatttaatgcggtatgagagacagggaactggattcctttgaaggcctatgaggttctatgtcttcctggcagaaacaattccatctgattggtgagaagctcccccaggctgcctcttgagagcacaaatgccatttgtatcaccttagcactcaactcattgctgtgcgaaactcatttcccatcaaagggaaaggaattatttttaattttaattttagatttagggggtacatgtgcaggtttgttatatattacatgatgctgaggtttgggcttctattgatcccttcactcagatagtgaacactgtacccaataggaagtttttcagcccttgccctctccctcctccttttggagtccctgctgtctactattgtcatctttttgcccatgtgttcccagtgtttagctcccacttacgagtgagaatgtattatatttggttttctatttctgtgttaattcacttaggataatggcctccagctgcatccatgttgctgcaaaggccaggattttattcctttttatggctgtgttgtattccatggtgtatatgtaccacatttctttattcattccaccgttgatgggcacctgggttgattccatgcctttactattgtgaatagtgctatgataaacataccagtgtaagtgtcattttggtagaacaagttattttcctttgtgtatatgcctagtcatgggattgctgggtctaatggtagttctattttcagttctttgagaaacttccaaactgctttccataggggctgaactaatttacattcccactaacagtgcacaagcattcaggaaggtaatctttttttaaatgaggcgcaggacaagcatcctggttgtttccctcaaggccagctaccccattgcccatcttgccagcccctccacctccctgagcttggctctagcctgtctttaatccttgcacagctgggcttggtccagcctcagggcctttgcacccgctcttctcttgcctggggtgctctttacccagttcctcacagctctcgcctcgaatgttatctgctcctgactacccagtctaaggtggatctccttcattctccatcacagcaatgtctgctacttcctcttttttatttctcaaatccccatctgcaattatttaaattacataagtatttgtttctggtttgcctcttcctttataaaaggaaaccccacaggctcagtgtattagtctgttttcatgctgctaataaaaacatacctgtgagactgggtcatttatacaggaaagaggtttaatggacttacagttctgcatggctgggtaggccttacaatcacggcagaaggcaaggaggagcaagtcatgtcttacatggatggcagcaggaaaagagagagcttgtgagggaaactcccccttatagaaccatcagatcttgtgagacttattcactgtcacgagaacagcatgggaatgacccactcccatgattcaattacctcccactgggtccctcctacaacacctgggaattgtgggagctacaatttgagatgagatttgggtggggacacagcaaaaccatatcccttggggacctgtctatccttcacattgcactgggactggtgcagagctaatacccatgctaacaaatgcagagggaatgggtaagtgaataagggaggtagagagggaatgaataaatgagtcagtgattagtgcctgtgatcttagagcaccttgatgtaaagctcctgggtgggggcaagaggagggggcatttgggcctgccccctgctgagaaccagggattcacatgtgtgtaaacccaggctgtgtctaattgcccagaaagctttattggtggcctatgatgtgctgggagtgaatcaaaactgactgaatttcctgaagctttggcaaacacaataaataactccattatatactgtcatttaatatcctctatgataaaacagctcctctatgttagaaataaaacagagagggggagaaagtgctgggaggaccagctgcaatttaaaatcatgtacatatctccccaggggtattacagaaaaataaaatataacacattgcatgtcatattcattctaatattacagacaatacatcccttgttatatttatatgttataacactgtaatatagtgtaatacagtaatatgacatataatacaatatgttatataacatgtaggtaattataattatatgatataataaattatatgtgatgatgatatagaatgatatattgtattatgtgctctattacttatattcatatggaattctgacctcctgcaggcaggctcaaggctgacttccatgggaacatggggagtgccttgggccccctaagattcagataccaggtagcctcagttctggtcccgtgaccatcactgcatgtctccaagactcagctgctcaccacaaaggttgtggggatgattacatgaaaagggatgagggaattatccttaataagcacctactgggtgccagttaattttcacacccagcagaatgagtcttccaacattgcaggctgacattccttttaacttattatgattattattgacattaagaaacagctgagaattggagggcccagcataatcattatacagacgcgaactctcccgcacctctgccccagcagcagccgttgttgtcccattctgctgctctcatttcatcccaaagtccttagttgtgtgtgtgtgtgtgtgtgcacgcgcgtgcgtgcgcctagggggaggggctggaatgtttttaaggaaatcctggactttacagataaggatttaaaaaaaaaaagtaaccacaaaactctcatggcatccaaaaaaattgacaataattccttgctatcttctagcttagtccatgttcagccacccatggtcctctcaagggtgttttttcacactcaatttattcaaatcaggatccccgtaagatccacatagtgcttttggttgataagtctcttaagtgtcccttataacatgtgctcctcctgcttttcatttccatgccatttatttcttaaacaagcagggtcaaagtgtgtcctatggacatgctttggaaatgaatgaatgaatggtggagtgagtgaatgcatgacggctcacactcatttctctttgcaggaaaagtgggcaagttttgagttcaacgtgaggcctcaaggatgtgtgcaacccatggtacttgaatttacttattgactgttttttggaaatccttatttcccaaaactcgtggaaggagctgacttctggcaggaaacgtggaactggcagcgtgtcgtgcaagcatctgcaatcccagtcctgagctggacttctcagagaggctgggcattatttatggagatgtcggagtgacagggggaacttctggccaggaactgccggtggtgtcacatccttaacctggctgacatcggaacaccctggggggagcatttctccaggaaaggatggtgggtcaggagcccgcatggtgtcttttcaaagcaataataaagatatcagaaggg

SEQ ID NO: 10 - DNA, 152590 bp, Homo sapiens
gttgctactcagaggtgcggacaggagctgagcgctgctgctgtcggagcagacgcggcgttcccgggttgtgctcagcccctgcagctgccatcggctggagaagtccaggttaggaaacgcatccggggaggggatcctagagaaggggcgcagccaaatacccgggaggtgggataggtgggaggggagtcgctggactcggcgccagggcagatggtggacagggcgcgctggcccgcccggcagttcccaaggaacctatgttcctgcagaagccgcaggtgtccgtcttgggataactgcggagggagccaatccagcccagcttgggcgggagcatcgcgtgccctggtccagtggaacgggagactggccagcgagcctggactctgagctaagcgtactggcgggcgacgccgacagcgtccgcgctaagggtgggggactgggaagtggggagtggggcactcggccgggatggagagaatgcagttcactaactgccacctgagagccctggtccccgctgccgccacagcgggtctgtttggcagtcagggcgcgagctggtgagcggatgcgtgggcggagggactggcgctacccacccagcagccacccactgcaggtgagtgcccctcccagggcgaggggaggagaagggcctggccgctagccctagggtcaggctctggtgaaaatgggaagggggatgggggctgaataggctactttgtgatgagactcccgtccctgtgacacttcagggtcctctggggatctgtcattcctcttgcaagctctcttgttctctggtccctctcctcctctccttatttcctcctctcctctcctctcctctcatctcctctcctctcctctcccttcatcgtgtctctacctctatctccgccggtgcctctctcggtatctgtctctcagtctctgccttctctgtgtctcgtacggtctcctgtctttcttggtctctcggtcctgagcgctctctcgccctgtcactgatgaccgctggcttttggctctccgtgctcgctcttcgtgtgtcccggccacgcacggctcaccagctcgttttccccagacgcggaaagtctaccttcggcgtgcgggtttcccaagcgcgccgggccccgcctgcggccctccggcgggctctgtctgctggaggcgctccgctaaccctgctgtcgcctctttccaccagcgcaccgcctaggcaagccagctgacgccgggggcacagaccaccctccactgagtgcggagcagccaaggtgagtgcaccgatgccccttccgcccctccgatccctccccagctgccctggttcgagccgactggagaaatgaggctgcaacagcgaagccagcctgcggccgctttctcctctaaagactggtgggagggcccgggaggcccctcgggcggccgcagctctttggctgcccgctgccccatcccggagtggaaaccctgagtttccaggcttcgggctggcggggtcgcgggcagggcagcgcggcttcccctttaaggccggagccgctcgtcgccgtgagtgtgagggtgtgtgagtgtgcggcgtgcgtgtctcctcctccccgagtgacacagcagtgagaaatgcctatcagtaacttaaacccccgaaactccaccttccgggcgcgcggcgcggagccgggcggtgggaatggagcgagcagattgaggccgccactgcagcgccgccagcatgaacttggccgcgagctgaagcggccggcggcgggcgggcgcgggggcaccggccgctagccagggggtgatctgcaacagggctgggttccttggcggccgcctgagtccaggctgcccgcgccggcggccgcccgcccctcggacactgcccccgccgccgccggagctctgcagcacggtaaggctgagggcgggtgcaggaagtctgactgttctgggggttccggggtacacttgtagcccccagttatggtccccatcgctgaggatcggggtcccaggggtgcttcgagtcggtagaccctaaagtttgctctgagcacacggcccacctggcgctgcgggcggccacccccttctcgaaccagcccggctgggctgggcgcagctcgaaacgccggagaccacggcctttggctcggcgcccgtcgggcgtctgaaatccggcggggacagccacgtaccggggaggaaaggtagaagggcgcaagctcctcgggctacgctgggctactgggaggctcccactctgtcccagcacccccgggtcgcttgcagcctgggtgtcaccggcgacggtgccttcacatgccagctgcctgagcccaggccagtaggcagtgggcgctggatgaaggatttccccaccccaacgctgtttgccgcctctgagcgagagtgtggagtgtgcgcgccgaatccgctgccctgcactccctcccctgccaactcctgggaagcgcagcccggagctgagctggtgttcagggcagcccggactgggttcctgcggagcagccccggcgcccctgcgtcagagtccgcgcttcaggttccccagcatccgcgcgacgacagagctgggcgcccggcgccggctagcgcgggcgggaagccccccggagcgccgccaaatacttttctcggccagttggcttggccaggctccgtcccaatgcagtgtgtccgaagcctcctggaaagctggagatgtcgtctgattctgatccgtgattaaattcggactgagcagacactaataggattagcctgccagaaagctcggccctgaagccatcggaacctgtgcaaacacgcgcctcgggctggagcattcactcccgccccgccgcgcttctgcagctgggtgcggctgacctgggcacccggagtgtgggtgtgtgtgagcgggcgggagcacagcgtggctgggggacgtggggagaaggggctgcttttgctggggtggcttgtcgttgttgtttggcaccacggtgccccccgggggcgcggtccccacggtgaacgtgctgctcacgggtaggcaaacccaggccggctccgggacattgtctgcaagggcgagcgagccgagcttactagaggcggctgcgctggaacaaaggcgcaaagtctccctgagaccaagcaattttgaaagagttggctagggagagggcctgggtctcccggggtagacccccgcgggaattgcgccgcccccagcggccccggcccgcgcctggggaattgtgttccctggttgcggtgagccggcgagcgacatcgcagcggcgcggcccagctcttggcaggcgtgggttgccgcccgagtgcccaccggccgggcggggtcgaccgtgcacccgccggggcttcccggccgccaccgcagctctgggcccctggaggccgcgcagcttctttccttccctccctcccacctcttcttgtctttatagatcccccctccctcccacccccgccgccgccgccgccaacaatccgctttataaaaagcccctttgtttcccaggaggctggagagagggaaggggaaaagggacgcagaggcagagggcgggggcggctgtctccaagtggtttcgagccgctcgggacaggagggcaagtgtaggcgatgggggagggggctgtgtttcgaggaccctctgtgggaacccacgaaggcgcacggagcctcagccccggccctcgctgcacgcccggcctgccagccctggacaccctaaatcctggcggccgggacggccgagtggactgcactgcgagctggcgggcgcgcgcagaggccctaggctgcaagcgctccgcggggtgggcagacgcgactcgccgatgcgctcgccgggctcgggcatagggggcgccctttccttggtttcgctttgcagcgggcgcccctcgccgccggagctcagggcagctgtcgcgcccgccggtggctaagacggaggcggcagctcggaggcttaggccacccgcgtctggctacacgcctcatttcttcccgcgccctcctgccacaccctccgccccaccacacacaagggctcaaactctccgagcgccctttgtttggaggcgcggaggcagtgggagccgccacctccggggttcgtgtagcctaggcgggcagtgaggatgagcgtgctactctggactgcgcgctggcctgctgcctctgcacctaacccagcgcctgacactaaagctgccagctttagttagattgaccatttagcgggtccttgtcccttataactgcccccctaaaactttcgagaaccagggcttgcactgaggaatgtcaaatataatgttagaagtaacctttcgccattctgttggcctgctccgcccctgtgccccaaagtggtcggtgtctctcatagagtttgttcgggaagggaatactgaaaagaaaaaagtgacaaataaggaaagtgggcggggcccaggctcaggctggtgggtctcccaagcgaagtcagattccacccgctctctggccgcctccgcccctcctacttccatttaatctgatgtcgacgttttatttgtgcctttttgcatatctttctcctactcccctcccctcccatctctggaggttattgataagtgctgctcaaacatttgttctctgcgtctttggagtagaagatgaagcgttaacaccctcaacgcgcatacacacatcccaaatgcgcgcatacacacatcccaactgcatctaaaaccacaagaaagtaatcaaagggtaaactactggttctgccttctcctccctcctttgtgcttctcttctggagcaagatcattggaaaataaagctgctgatgtgcgagatggaacatatggtgcctccataagagagaagctgaaatggccttgaacctgccggacagaccagctgtttgctgccagccagagcagctaatcagcttcttccccttaaagtaacagccctcttttcacttcatgaccagtttgcatattaaataggatattctccagaggggaaaagtgatgggctcctatactgctttgtgcttggtggttctccaatgcctgctccctgctctgggggccgccctgccctctcccggtgcctgcctgcgatgtgcgagtgtttctttcagtactgaagtaagaatgttgctcaaagtggaacttgggacagacgaggcaggaaaaaagaaagaaagaggtggggctgagagatttccagatgcctgggaggaaatctctctgttttgttcagcttcggaaaaaactagcattctttcccccctttccccctttaaaaatatcacaaagagctgaagcttttccttacaagatctccttaaaaatcatcctcttccggctgtgaccattttcagtttttcttcagtacaatgtgttggggtggggggtggggaagagtttggcgttggaagaagaaagcctttaggagatacaaggaaattccatgttaggaaatcattagcaaagggtgacttcgtctgttttcctgccactgacgctgacagtgacacagatgtgtgggttgaaataggaacgtcattgaatttttacactccaccaggaaataccctgtttctggggtgggggtggggtctacagattcactgcaacttaaggtaggagattcactactgtcaatcctttttactaaggaaagggatttttttagcttagccagcatgtttaatgtattttcttcccttttaaattgatcacctaaaggcataaaatgcacctgttaatggatggtccctaggaaactcaattactatttggggttatgaaagggaataaactggtcttagacaagtggctcttctgaaaatagctggactatgcctcttctttaaaggagcctcaatatacagtaaaacctttttttattattgcactttaagttctagggtacatgtgcacaacgtgcaggtttgttacatatgtatacatgtgccatgttggtgtgctgcacccattaactcgtcatttaacattaggtatatctcctaatgctgtccctccctcctccccccaccccacgacaggccccggtgtgtgatgttccccttcctgtgtccatgtgttctcattgttcaattcccacctatgagtgagaacatgcggtgtttggttttttgtccttgcgatagtttgctgagaatgatggtttctagcttcatccatgtccctacaaaggacatgaactcatccttttttatggctgcgtagtattccatggtgtatatgtgccacattttcttaagccagtctatcattgatggacatttgggttggttccaagtctttgctattgtgaatagtgccgcaataaacatacgtgtgcatgtgtctttatagcagcatgatttataatcctttgggtatatacccagtaatgggatggctgggtcaaatggtatttctacttctagatccttgaggaattgccacactgtcttccacaatggttgaactagtttacagtcccaccaacagtgtaaaagtgttcctatttctccacatcctctccagcacctgttgtttcctgactttttaatgatcgccattctaactggtgtgagatggtatctcattgtggttttgatttgcatttctctgatggccagtgatgatgagcattttttcatgtgtctgctggctgcgtaaatgtcttcttttgagaagtgtctgttcatatccttcgcccaatttttgatggggttgttttttttttttcttgtaaatttgtttgagttctttgtagattctgtatattagccctttgtcagatgagtagattgcaaaaattttctcccgttctgtaggttgcccgttcactctgatggtagtttcttttgctgtgcagaagctctttagtttaattagatcccatttgtcaattttggcttttgttgccattgcttttggtgttttagacatgaagtccttgcccatgcctatgtcctgaatggcattgcctaggttttcttctagggtttttatggttttaggtctcacatttaagtctttaatccatcttgaattaatttttgtataaggtataaggaagggatccagtttcagctttctacatatggctagccagttttcccagcatcttttattaaatagggaatcctttccccatttcttgtttttgtcaggtttgtcaaagatcagatggttgtagatgtgtggtattatttctgagggctctgttctgttccattggtctatatctctgctttggtaccagtaccatgctgttttggttactgtagccttgtagtatagtttgaagtcaggtagcatgatgcctccagctttgttcttttggcttaggattgtcttggcaatgcaggctcttttttggttccatatgaactttaaagtagttttttccaattctgtgaagaaagtcattggtagcttgatggggatggcattgaataaaccctttttttttaagattctgattttttttttttctgcaacagtgcattgcacagatcattagcctaggagctgggaaacttgtgttctagaaagttctgcccactaattaacagagtgatcttggacaagtccatcctttctctcccccaatcccatgacctctgagtctgagtcccttccagttctaaaacactatggtttgtgaatgaaatagtcattttctgggaaagtgaaacatcaagttcaaccttgtcattgggaaacagctagacagataataaaaaggggctgatattttgaagggcaaggataaaaaggaggagtaaaaaaatggcagaaggccaatcaaaacaatacaaaagtgtgaagtgttcacctttttgtgtcttttgcaagtgtgaacttctaacccagaatcagagacagcggacatcagaaatcaacccaaagtttctcttgtccagtactcctattgatggcaggcctcctaatcattgggttggtatacagataacgggatctaaactctttagagtagactggcatatttccaaaggactcatctaatgtagagcagatttgctgctttgcagttatttagtgaaggtttcaaagacaaaaaggccttccatccacacacacgtgcaccactggggtgtgggttctgaacccattgttgaaccttttcttttcttcctaatccagctgtttttttttaaatcacatttccaactttggggatacagcagccatgtaagaacctgctgctgtcctacttgatgttaatattgattttttaaaggggcaggggtgaacattatgaagaaggactctttatcctctgagttctttggcaattatcttgctgccataaatgttgatacacatataatggatgtaactaaaaaactccttatccaagcagaaaaggctgagtgtttgttggagcagatagaatgctgagagtgtgaatagaccaacccagatgtcactggggagggagataaatgatggaggaacaggagccggttactatggatcagcacaataaaccaattcccatcatacacctctcacaacgccaccgaggggtaacctaggcagcaccagtcaactgtatggcaggaaaaaagcattgcaaagctcaattggaactggcctggttttgtaggcattgggtccttaaacatcttcagtacttcgaggaggaaaatttcataaatccgaatgaacctgaagagactgtgttgcaaatacttattacttcttatttttgttgtgtcattgttgttctttagtctgtaaaggtgtcaaaggaagaagaaaaggccccatggagctgtcaggacagttagtcagggggttgtccatggaggtaagaaacagtagcttgtgttataggatatttacatgccaagattggaggtgcatagtcctgtggggtcctgctcccaaattaccagcccagggctgctgaagccccaagagcattttcttccagaggtggagacagaagcaaaagagttgggttaccttatttccctgcctccacccccccagctctggttgctttctttctccccttcacagagcctccctggtttccttcaaacctcgagttttctcctaaaatctgacatctttataacatccaaagcaatcagatatgaaacagttcaaaaatattccccccgggggagggaatagcaaggggcctccctggctgtaggcactgagctcccagagtaaaggcttccagagacagggcctaaggagggtttgggagcaagaagcaaaaagctctttgcaaagtttaggagagctttccttgcccagattggctatcttgagcctccctgaggccccagcttcagactactccctcccttcctcggcctgcaagagggtgggctcttcatacccctggaggaggacccccgacccacccaccaaggcaactcagtcctgcccggctgccctctgacctggacacagccagtgcccctttctgcacagcccagttggagcctcccagacccccatttccttggtgggcaggtggggtaagctaccttaccctcccatgtgccctgctgcttgttctgccaagtaaataaccagtaagtggattttgggaaaggccattttcttaaggctgagaattgttccctgaggttcagagaaggatggagtggaccaggtgatatcatcttgttggaagagggcctagcaggccagccgttgattttttcccctttcttccacctgtgcgagtacctagacactagaccacagggacagttttctgctgattttggaagagatcattggaggccacagcacctgagctagttaatggcatccaggtcaaaaaggcctggtggccccagcttgtgttcacctgtgagaggaaagtgtgggtctttggagcataaagacaggaaaaaaacaaagtcaagtaattctgaacacattgaggaattccaagttcttggtccaattgtcccagctccaccctcaccccacaagtaatgcatttctattttttcctgcatttgaatccgaaattccactctcagcttcggcagcgtgctgtgacagagtggggaggaggaagacaggacccagctctgccttcctttctgtggctatgccagtcagttgaccattgcacctgtacatagttagcacaggtgcaccacctcacctgcaaactcagatgttgaaagatggagaatcttacagctggaagagtaaaaccccatgattttacagaagaggaaactgaggcccagagaagcgtctgactttcctatggggacatagtaaagggagcccaaagttgacagaaccctggtctctagttctcagtcaagtgtagaacatccattttgcacccatgtgtgggcagacaggctttccttttgaggcagagcaaatgtggtaaaaagaaatgcagccaatggagggggagcgcttgtaactgtggcgtaatataatctaccctgtatcaacgtgtgctttgctcagcattgttaggacagcaaaggggcatattagaatctgaactcgaagtctggaagtagctggagaatggagattgtaaattaagaattagaaggtagtgtgtgtctcgttttcgagttgctgtcagagagtcaggcagccagccctgtggagggcttggctgggtgggctcctctggcaatggtgggaggttgtttgggtttggctcttaatgagatctcagtgttaatatctgcctctggaagttccagcaccagcctcggaattttaagtgggacagtagttttggtgcagttgccaacgtcacatggtttgcgtgtctaattctgaaagactggcatgctttatgctaggcttcgggaggagggcacagcgtttctaagctgcttgtctgtcaaggattaatttaacctctaattactacattttcttcgcagtttgctgcacgaacatgttgtaacaaagctcaaagaagtatgccattttatttccctgccactctaaaattaatttccggaatacggagtcaaacctgacacacttggtgttaaaataattgtgctgacattcgagctaaagtgaacaatctggttgtttctagtgatcccccagccatggggtaaagagcattatcatgttagttgccatgacagttctcgaaatgagccctgaaaatatcaaggagtgtcactgcactaatcccaccaggggagcaccagacacaaaggtaacacccgagcacgtggctggggtgttagttttggagtatgactgatgccctgtgcaatagggcagccagggagtcctttctcacccactaatagggctcgtggtgaggtcttgtcccacagcacgaggtgagcacattatcaaatcggaggctcccaagagcctgcccctggggccaaacctgttctgagtggctgtgacaatgaaatcacaagatgaagttaatggggattctccaggcaggcttttctccctcctcctgcctgctcttcctgggcgtcccgcaccagcaatccccaagagtaacagccctttggcagtcccacatatatcttttatccccaccttcccaaacagcagcagtggatcccagagtgggaggcccgttccccattctgggtgcttgagaagactgcattctcaggccctggttggggagacttagcagcattgttggttgcctagtttgggtccaccgaagctgatttgtgggatttgagagttggccaggttagccatttgagttctcatctccttgctcaggtggttgtgaagagctctctctctctctcacacacacacacacacacacacaggtacacacacacagacacactcacacactcaccctctctcaggagtagaactttgccaagatagcaaaggctaggtctgaagccctattctgcatacggctggggacaggctcactggcattttcagccatgcctttggctgccaaatcccgagcaaatcgagtttaggttcagtacccctacattttccttaccggtttctagacttgcctcctgcttctcacaccccctctccaccttacctagaaagatgccatcctcagcccgctgtaccttagtgggattcccttcctctggagaatctggagcctctaacttgaattaaaagatgcaagagttaccatgccttggagagaatctgctgtttagggcacaggtaaggaggtattcagggcttagggaagccctctaatccacaccccaccctccaccccaccaaatggtaccatgcctggcataaagctggtcctatttatgagttagagaactgcctggttgccaaggtttttctgagcttgccctcagggaagctaaccccagttggtctcttgaacctcaaatcataacaaaaatgactccctatcctctgaagcaggagtggctgtttgcctcttagggatcacagacttctttgtgaatctgatgaaagctctgggtcttctccttagacaattgaaaaataacacgcaatgttgcatctaatttagggtactactaggccttaagcccactcatggttctctcgaggatcttttgtcacaggttaagaaagcctcaatatgagctttcggcaggagacattgaccaactgtgggattttaggcaagtctgtgaacctgccaagtctcagtgccctcagttgtcagatggaaatatcagaatgtcagttccaccaagtttggagcattgtgggagattcaaaagagacggtgttggtgagatggtcctgtaaatatcaggctcagggcacactcatgggttgctctctttagtgtcagtgtttactatttattttgcatttccatttgatgtgagaaatttaacaagagaaaatcaggcttcttttgacttgaaaagtcattttgtccctttctttgatactgcataagttacgcccaggcaaactggcattaaagagactctggcttgggagggacctcaaagagcatgcagtgtgtccaggatctagacagttttagagatcccaattacccagccctcggcagttccagaatgggtcaaggatgtgtgtagccagtccagtgccttgaggaggttccacatttgcctgctgcagaagtgagaaaatgggatctgaggaggcagatagttgtttggtttttcacatttcagtacggtcacaccgggcatgagaaggtaaagtggatcctgggtgtctctctcatagtcactgaaagggcctagccagaccctcatgaaaactgggaagtagtctcaccccaggatctgtccagggccccatcctgaggaagtggggtcgtgtccttttggagaggagcctcaggttgggcctgctggtgtgtggggggtctgcttaggagggaagaggatggctggactccattcaaataagacttccacaaccttccccgtctaaccctggaagtgtggaaagtcttctcatggcaaggccacgagggctcatatatcaaagatggggaaactgaggcccagagaggagcaggtgctggccctgggtctcatgacaagtcatgaagacatttccttggcccttgttgatcctgtgcaccttccaagttctctgtctggctcctcacaatagtgtattttcaattctcctagaaacacaagcccatcatcatattaacctggccctgatgaatgctcaggtcctcaaagtcagccctagaaagtaaatagcaggtttggaaagccctttgaaccctcagagggagatcctggccttgctcagcctgttgctatgcagttccaaagtggaggctgccacgcatttgcagagcttttaagtcccttcccccaccccatgtgcattttaggaaccttttggaaagaaatgtgttgctaggagcttgggctttccctctcctttagaaagagagaactgtttttgctttgaattgccttgcaaacagattgaggtgtctccctacccattctttcttttgttaaaccaacccgatttgccacgggtagttaagtggagatcatgttgaaaaagagtgcttagcacagggtcactacgcagagtggctcccattcccatccttggcagagcatctcacccttaatttcattattaatctggagggagaggaatcgtgcaagtcagttgaaagcagatgccacctaggaattttaggtccatcacgtcatcaaacaaaatgagagtagtttgtaaattggaaagtttggcagtgggtggttgccctttggaagattcactgtttcagaccagctttctgagtctgggaggagtccctggtgctacagtgggaagaatacccacctgagggccaccgacatgtggtctggcttcagctttgataccaactagccatggcacttggggcaagctatttcctcagactgggcatcattttctccatctgtacaatgaaggaatggtgtaggggcatccaaagggctcctccagctctggcatttctgaattctccagtagcaagttaaactctaagttacttaaaatatttgaaaaggataagtaataatttgttctttttgaaattaccagagacttgaaagcatggggttgtatttttgtttgggtaggtggggactgtgactgttacataagtgataacagttttagaagttttagctaaagacaaagttgacatgtatttatgtaggaccaaataatagaaaaaaattcctttagagaccccttgttttatgcttgaggatgctgcagctgaagaaaaatatcatgcttgcccaggcttccctggcaagctgctaggagctgaggtggtccaggacccaggaggcccagcttgcaacccactgcttgccccacaccgcacttcctaggatcttacagaagaagcctccaggccctcaactccaaatgggacctgcagtcagcagaatatagggctgagtgattctgatttctagctatcagatactagcttatcagaatggaatttttattctccacccctgcccccaacatccaagggttctctgttaacagtaaatatttaattttcttggttttgtaccaatgcctaatttaaaataaaacagattttttgaatattggggggtggtccttaggggcttgttatttggatttattttatttcaaacagatgggctgttttaggtttgacttcatatttgctaattttcattatggaaaaaaaaaaaaaacaatcccaagccaccccacccttatttttgtactgagtaacagtttgtcttgtctaaaagaagcttttattttctcaactgtttgcacccagcgtattcagccttattttgtatttttaatcacataaatgtgttggccacctatagcttatgggatgttcacaaaatgcgccccactcattcccgaacagccaccaactttgggactgtatctctcagctccagcccagctacctcttgtctagttcccagccatccactcctctggcctgaagccagactgtatggaggtgcagagtcagagaggccttggccttggagggaggcaccctggtgcctggcccagctctactgccttgctgtgtgaccttgggcaagtcccttcccctctctgggcctcacggttcccactgttacaaagaggaggctgacctaaaggggctttgtggaattttcctcttattatgttagattgttatatttggaagatgtgacttgaccagtacagtacatgacctttaaatcctttctagaagcaatatttagtgatgtttctgaaagagttaggaggtctatatctctgagatgaactagtactttctgaaatttatgaaaacaacagttaccactctttgaatacccactgtgcctggagactcttgtcctgctgtttcttagaaactcacccatcagctgtgagcattttctaatggtttcccctcaggcctttaatctttgatctcaataccttctccctaggagattaattgatcacttctaactctttttttaatttaatttttcacttgacataaattcagactctcagaatatttgcaagaataatacaaataatgtttaaatacctttcacttgattccccaaatgttaacattttaccacattctatgttatatctaccaccccctcacacacacacacacacacacacacacacacacacacaattttattctgaactttatgagaacaaattgtaggtatgatgctcttttatctccaaatactgcattatatatttcctaacatttcctaaaacgttctcctgcataagcacatattgatcaaaatcaggaagctaatagtggtactaatctatctaaagactttaatctaaaggctttattcagattttgccaattgtcctaataatgtcctttatagcaaaagaaaatccaggatcatgcagtgcattcagtcgttttgtctctttagtgtcctttaatgttgaatggttcctcaatctgtcttagtgttttgtagcattgacatttctgaagagtacacgccagttattttgcataaagtccctcagtttgagtttgttgcctgatgtttcctcatagttagatcagggttatgtactattggcagaaataccacagaagtgatgttgtccatcagtgtatcatatcaggaggtccacgatgttagttccattcatcctattcctggtgattgtcactttgatcacttggttaaggtgatgtctgccagatatctccactgtccagttcctatttcttcccgttgcaattaatgagtatcttggggaaataaatatattttgaggctgttagtatcctagtacacctcaaactttcactcactagtttagcatttattgatggtctgtgcctggggcaagatggtcagtgcattatgctggttgccaaataatgaatttctgattccatcatccattctacatttattagttgactttctactataagaaagaacttttctttcactcccatttatttacttatgcttttatttatattaggttgacttgtgcatttttactttgagttataatcctttcctatcattatttattttgatgctcaaattgcctgaggtttgtcccgtgggaactccttcaaactagttcctatgtctttctgacatgcccctaatcatcctctgagcgcgcccttaatttctggcacatctgctccaggctcatcttgtgctttccctgccttagccttaatatcagccattttcccatggaatcttaacttcttttagtgaagaatggtatttaaaaactaagatctgggtactaaaagcatgcgcatttctacagatgtggcattgttactaaaccctctcagtccacaaagctaggaaaataattaactcacatctatatctattcctttttatttattattttggtaatatctatttctctatctatctatctacctgcctacctacttacccataaaccatgagttcacactgataacctccaaattccaatacaacagcaaagttcattctatcttcccccttcccatatttgtagtttccttgcaaaacagtgagaaatctctctgccattaccataatatatttactcacttaatcctagaatatatagaagctagtttcagagttgctaacccatgactctatgaagaagccaattgacaagagtacaatatttgttcagaattatttttgtcttttcgtaagagtgaatccttcaagcactgttaaaaagttacctgggctagttcatctcccgggccccactgaggtcatttgaatatggtttagttcacttgtttctgtttagattcctttttgtctgccccccacccctgaaccatctttctttgttaattttaattatttttctgtgagcatgtgaaataataacatagtttcaaaagttagaactgtacaaaaagaaatcctcagaaaagtgacatctcccattacttctgtcctttccacctcattccactcatttcctgtaagtaaccaacttcattagcttttctgtgtttccttttgcacaaatgaacagatatctgtgtattttcccataccccttccttacataagggtggcttaatagacatactcttttgagctttgcttgttcactcaaacgcatgtcccagaaatcactccatatagagatcttcttcattctttcattacagctgcatagtactgcattgtgtagatgtaccatagattattcaaccaacctcctatgtgtagccatttagattgtttccaatattttgcaattaaaaataaaacaaacaacccagtacatatgtattttcatattgttagaggtatatcttaaagagtacatttctataagtgggattaatgtgtcaaaatgtaaaaacaaatgtagttttgttaggtattgccaaattcccctccagaaagattgtaccaatttgcattcccattagcaatgtatgagagtgtttttttccccaaagcctcaccaacaaagtatttgctttactttttaatttttacaaatctgataggtgagaaatggtatctcagtgtagtttaattagcatttttctaattaggagtggcttggaacatcttttcatatgcttaagagcccttttgatatttttatgtgtgtgaattatctgttcatgtcttttctccctttttctattgggtttttagtcttttaccctcaattttaagagtatttttctgtgttaggtatattagctttttttatttgtgatatatgttgcaagtaatttcacttaattggtttgtggtttttttcaatgtttgttttgttttgccatgcaaaaaatttttttatgtcgtcaagtatcagtcttttcttttatcatatccggatttgaatcacagttagaaagcctttcctcacatccagtttaaagagaaattcaccaaattttcttccagtatttgtatggtttcatgttttacatttagattcctaatccatttggagtttattcttatgaatggtatatgggagggatcttactttacctctttccttttttctttttgtttctcttttttattcttttttagagacagggtgtcactctttcacccagtccggagtgcagtggcatagtcatagtcagtggtggggtggtgtgccacaaccacacttggctaaatttttttttttttaatgttttgtagagagtggatattgctatgttgctcaggctggtctcaaactcctgggcttaggcgttcctcctgtctcagccttccaaaatgctgggattataggcatgagccacagcacccatccccttcccttttttcaagagactacccagctatcgcagccccattttacaaatgttcatcttgctccagtgatttgaaaagtcaccattattatatattcagtctccacatatacttgggtctatttctacatgcatattttattccactggtcaatttgcctattcttcttccagtaccacactgttttaattatagaggctttattgtgatttttaacagccttttattttgagataattgtagagtcacatacagttttaggaaacaatactagaaagatcctatttacccttcacccagttcacagccaggacagtcacattgatacactccatccaccttattcagagtttaccagttatacatgcacttatttgtgtacatgtgtgagtatttaattcaaagcagttttatcaaatgtgtagagtcatgtgaccacagtcaagaaaaagaaatagtgccatcaccacaaggatatgcaatcctttgtgttgctgttttataccaaacccacttccctcctgatctgctctaccccaacttctgaacccatggcaactaaccagtaatctgttctccattcctatagttttgttatttcaagaatgttatgtaaattcaatcatatagcatgtgatctcttgagattggcttttttccctcagcataattctgatagtggtgtagtgcaatacaggagtagtccattctcacaggtgtgtagagatatctcattgtcatattaatttgcatttccctaacgcctaatgagattgaacatattttctggagtttatttttcatccatataacttcacggaatgtctgttcatgactttggcccattttctagttggattatttgcattttttctcttttttttcactgttgagttttgcaagttctttatatattctagatacttgtattttgtccaatatgtaatttgaaaatactttctctcagtctgtatcttatctttccctccttttaataggttctttcacaaaaagactattttgggggtcagatttttgtggttgagtctaagaactctaccccaagtcttaggtcctgaaaattttctctaatattttttaagtttgatggttacacatttaaggccataatcgattttgagttgatttttgtataaggtgtgaggtttaggttgatgtttattatttttttgcctatggatgctcaatggctctagtagcatttgttgaaaaggctatccccacctcactgaactgcttttacacctttgtcaaaaattcgtgggaaatatttttatgggtctatttctgggctccttattctgctccactgatctatgtgtctatccctctgccaataccacacagtcttgactaatgtagccatataaaaatgttaatactgggtaaaagtactcctcccattgtataattgtttctcaaaattgttttaacctaggacttgtgcctttccatatattttagaataaccttgtctacgtctacaaaaaactttgctgagattttgatgagaactgcattaaacctacaggtcaattcaagaattgacatctttactatgttgagtcttctaggcagtaaacatagtatgtctcctcttttatttaggtctttattcttttatgagcacaaaaaaggtgtttattattatttctatttgatgttcaactctttttttctgaattctttttattaaaattcaaaaatgtcaatattttcaagggaaatacaataagtgaaaatattttaaatatattcttataaatgtattcatacttgttgatgtagtataagactgcagcaatagagtacaaaatttgaaacacttcagattacaaatattttgtcccattttattttatttttttttttttttattttttattttttttttttttgagacggagtctcgctctgtcgcccaggctggactgcagtggcgcgatctcggctcactgcaagctccgcctcccgggttcacgccattctcctgcctcagcctcccgagtagctgggactacaggcgcccgccaccacgcccggctaatttcttgtatttttagtagagacggggtttcaccgtgttagccaggatggtctcgatctcctgacctcgtgatccgcccgcctcggcctcccaaagtgctgggattacaggcgtgagccaccgcgcccggccctgtcccattttagagtagagttttaaaaaatcactattttcataaagaaaatatagagtttttttaaagagagaaaagaaattgcttataaatgtcagttgcaagtataatttattgtgattggaactactatcaagatttacttcgtatgtaaatttctttgataaattttatggattttaataggtcacaggaaatctcattgtgctcctctttgattttttatattttattttattttaagttccaggatacatgcacaggagtctttatttcttacaaaagcattttgtaactttctggatgcagatcctatacacattatattatattaaatatctaagtattgcattttctatgcagcagttgtaaatggtatgtgttctcttaacacagttttattgataccattcacataccaccgaattcacccatttaaaatattcagttcagtggcttttagtatattcatagttgtaccatcatcaccagtatctaatttcagaatattttagttaccctgaaaaggaaccacatatccattagcaaacatcctcaattaccccctgcccaagcccttagtaactattaatatgctttcggtctatatggatttacttattctaggtatttcctataaataaaaccataagataaatagccttttgtgactgacttctttcccttagcataatgttttcaagcttcatccatgttgtagcttgtattagtacttcattccttttctttgccaaataatattccacatattatttgtgatacaccatatgttgtttctccattcatcagttgatagaaatttgagctgttatcactttttgattcttatgaataatgctgttgttaacattcatgtacaagtttttgtgtggacatatgctttcatttctcttgggcatatacctaggaatggaatttttgcatcatatggtaactctatgtttagcattttgaggaactgccaaactgttccaaagtagttgtgccatttaacaatctcaccaacaatatataagagttccagtttctccacatccttgccaacacttgtaaatttctgtcttttttattatggctgttctagtgagcataaagtggtatttcattatgattgtgatttgcatttccctgttggctatgattttgagcatcttttcacgtgctttattggccatttgtatatcttctttggagaagtgtttatgcagagcctttgcccatttttatattggattatttgtctttctattgttgaactgtaagcattgtttatatattctgaattctagaccttcatcagatataagagttgcaaatatttgctcccattctgtgggtcatatttacacttccttgatggtattattcgcagcacaaaaattttaattttgatgaaagctaatttatttagtttttcttttctcacttgtgctttttgtatcatatctaagaaactatttcttaacccaaagtcaaagatatatttctatgtttcttccaagagttttatagttttagttcttacatttagatttatcttccattttgagtttttaaattttaaaatgtttagttaataaaaattgtgtatattcaaggtgtacatgattcgatatatgtatatattgtgtaatgattaccacaatcaaattaattaacacatccattacctctcataattaccatttttttgtgtatatatgtgtgtggtgaggacacttaaaatctgccctcttagcaagtttcaagggaacaatgcagtactactaactatagtcaccatgctgtacattagattcccagaacttattcatcttataactgaaggtttgcacactttcaccaagatcttcccatttcccccacctctaagacattaacaaccactattctactctctgcttctaggagttcagcattttaaatttctacatataagtgagaccatatattatttgtcttctttgtctggcttatttccacttcaggtcatgcaggttcatccatgttgttgaaaatggcaggatttcttctttatgcctgaacaatactacacacacacacacacacacacacacacacacacacagagtttatgcttgaacaacatagtggtttggggtaccaaccccctgcacaggcacaaatccacttataacttttgacttcccaaaaacttaactaccaatagcctactgttgcctggaagcctcaccaataacataaacaacacatatttcatatgttatatgtattatatactgtgttcttacaattaagtaagttagagaaaagaagaggttattaagtaaatcatatggaagagtaaacatatttactattcactaaatgaaatggaatcatcataaaggtcttcatccttattatcttcatattgagtagactgaggagaaggaggaagaggaagggttgctcttgctgtcttggggatgacagaggcagaagtgaaggaggtggaagaggaggcaggagaggcaggcccacccagtgcaaatttatggaaatacatcataatttctctctaactttttgcttttttatttctctaaaaaatgtttctatataataccaatccttcttccaccatttgctttagcttcaggtcctgtatcatagaagggttcatgctgtaaaggaagtcagaagctgtcttgagtaatcagaacccttctgttcaattgtctaatgtcaatttgtttcccagcactgcttcttttatgtctttgtcctcatggtccagcactagttaggaagcactcatctccataaagttgtcttctgttatttcctctggcatggtgtctattagctctataatttctccaagatccatatcttgaaatccttcaacacccatcttttttttttttgccatatccacaacctctttcatgatttccctgtttattgtcataaattctgtaaagtcatgcacaacatctggacacagttgctttttccagcagtaatttactgtttcaggcttgatggctttcacaggtttttctaaacaattatggcatattcaatagtgtaatccttccagactttcatgatgttctttctattgaggttctcttccaaaacattgacaatctttctatacagtaacctgtgtggtgagtcttagaagtccttatgaccccctgatctaaggctgaattagaattgtgtttgggggcaagtagaccacttcaacaccttcagtgttgaacccatggagttctgggtggccaggagcattgtccaatatcaaaagaactttaaaaggcagtctcttactgacaaggtacttcctgtcttcagggacaaaggatcgatggaaccaatccagaaaaaaatttttttattgtccaggccttcttgctgtgcaacaaaaagatcggcagctggtgtttatcttttcccttcaaggctcaggggttagcacctttatagataagggcagccctgatcatgaacctggactgcctttgcccgaaattgcaaagttagactatcccttcctgccttaaatcctggtgctcgcttctcttccttactactaaatgtcctttatgacatttttttttttccagtataaggcactttcatctgcattaaatcctgttcaggcagatatcctttcttatcaatgattttcttttttctttctttctttctgttttttggataacaaaggatctccaaattatattgaaaaataaatcataattaatattactcaaaaattttcagcatacttttcaaaaatgatttatgtaaaagagaagaaaatacacataattttaaaatatcttaaactcttttattccttactatagacattaattttgtcttttgttttctttcaattttctacaattttcaacttgtacctgtgtttaataggtaagacattaactgattgcttttctcaatctaaggattatatagttttagtataaatatatatcacatattttggtaaaattttgacaaaactgaataatcatgccttgttttaagtccatactccttccactgtttatcaaatctgatttaatggtcaaaaaattcttggttgtcattcttcttttacaagtcttcctgctaaactgccaaccagtttttacgtagtaataaaaagcagtaagaaagccaaagaaatggtgtctgggaacatctctgctacctcttagtcaacagaagctgcttctcctgttattttgatattttttaagccaaactgctttctaaaatttgtgaaaatacagtatttgtgggatgcgtatacagagggctgactttgctcacacataggttctgaagggctgactgtaggactgtagtatgtgtggattttgatatatgagtggggtcctggaaccaacccttcatgtataccaagggaggattgtaaaatattatctgtaaagtttctgtagatgcttgttatcaagttcaggatgttctcgtttgttcctagctttctgagattttttttattattataaatggatgttaaatttgctaaatgctttttctgcatcaactgttatgatcctgtgatttttcttttttaaactgttaatattgtggataacatggagtgtttccaaatggtgaaccagccttgcaatcccgagataaactccacttggtcatggtgtattattctttttatatattcctgaattttatttgtaaatcttttgctgatttttaaaatttaagttcataaaagatatttatttataattgtctttttctgtactgtctttgtcttgttttggtatcagagttataaaatgagttgggaattcttcctttctcttctactttctagaagacattatgtaaaagtggcactaattcttctttaaacatctgggaaaattctccagtgaaaccatctaggtatggatatttccttttcaagagtgtttaactacaaattcatttccttaaggtatatagggcaatttagattatatatttcatgttgtttaagttgtgacagttagctaataatttcttataaatttttgcatctatattcatgaggggttttggtctgtagttttcttttttgtactctttttgattttcatatcagggtaatactaacttcataaaatggattgggaagtaagtattccctgctcttctgtttttcagaagagaatgtgcagaattggtttggttttactttttcaatgtttaataaaattctccaatgaagccatctaggtctggagatttttggagggagttttacaattatgaattcaacttccttaacagtgatagtgctattcaaattgtttattttggtagtttgtgctgtgcaaggaattggtccattttatctaagttgtcaaatttctgtgtagagtttttggtaatattcccctatttttcttttgatttctgtcagatctgtgatattctctgcttcatttctgatagtagtgatttgtatcttctctcttttcaatcttgctagaggtcaattgtattgaccttttaaaaaaactagctttttgcttcattgattttctcttgcttttctattttcaaatccattgatttttatcttatctttattatttcttaccttctgctgctttgagtatattttgcacttcttagattcttgaagtataagcttacatgattgatttagcttacatattaatttgatacctttcgtttttcctaatgtacatatgcttttagtgctatacatttccctcccaactctgcgttagccatgtcccacatgtctttataactgctgttttcattttcattcatttcaatgcattttttttttgagacagaatctcactctgtcgcccaggctgaagtgcaatggcatgatctcggctcactgcaacctctgcctccagggttcaagtgattctcatgcttcagcctcctgagtagctgggattacaggcacacactgccacgcctgactaattttttgtacttttagtaaagatgggtttcgccatgttgcccaggctggtctcgaactcctgagctcaggcaatccgcccaccctggcctcccgaagtgctaggattacaggcgtgaaccactgtacccggcccatttcaatgcatttttaaattttcttggagacttcctctttgactgatggtttattacgaagtgtgttgtttaatttccaagtatttggcgattttcttgatttctttctgttattgatttctagtttgattccattgatcacattagagaatgctgtgatttcaattattttaaatttgttgaggtgtgttttagggcccaggatgtggcctatctcagtatatgttctatgaacacttgaaacaaatgcgtaatatgctgttgctggatggagtgttccataaatgtcatctagaacctttcagttgacgatgtattgttgagttcttcatctttgcagattctgtctagcagttgtatctgttgttgagagtggagtgctgaagtacccagctataattgtagatttgtccatttctccttttagctctctcagtttctacttcatgtgttttgagactccattgtttggtacatacacatctaggaccattatgttttcctagtgcattattattttatcattatgtaatgtctgcctgtctccaataattttctttgctctgaagtcttttttgatgataatgtagccactaatgcttttgtaaaattaatatttgcatggtatgttttctccattgttttactgtcaacttacctatgatgttgtatttagagtaatagaatagagtttggccatgttttcgtttgtttgtctgtttttgtttttgtttttttgagacaaatttgctgtgttaccaggctggagtgcagtggtgcaatcgttgctcactgtgtcctcaaactcctgggctcaagtgatcctcccacctcagtctcccaagtgtctgggactacagacatgcgccaccatgcctggttaattttcgtatgctttgtactctgccaacctctgtctttaattagtgttttagaccatataaataagaggtattgttcacatgttctggcttaagtctgctactttattatttgtttaccctttgcttcctctggttcttgtcctccatttgtttcttctttgtattctcatgctttacttaaatctattttaggattccatcttggtttatgttttatggtttttagcatattacattgtataattttcttagcatttactctagatattacagaatatgtattaatttatcatagtttacagtctacattttataagttcgagtgaagtgtggaaattttacttccatttaggtccttctacccttcctacttttaaaatgtaattatcttaaatatttcctctatacacattcagtatcaaataagatggcattataacttttgcttcattcatccaagatgatttaataaactcgtgagaaaaatagtttattatacttatcactatgtttgcctattctgaatttcttcttttctttatgtagtttcaagcctttttctgttatcatttcctgtctgtttgagaacttcctttaggcattcattaagggtgggattcttagcaacaacatcttttagtttttcttcatctgaaaatacctttatttccccttcattattgaaggatatttttgccagatacataatttggggttgacagttcttttctttcagcacttgaaaaatgtaccacttccttctgtactccatggttcctgaagaaaaatccactgtcatttgaattagtgttcctctttaagtaatgtgccattattctctgattgctcataagggtttttttctgcttcttttagttttcagaatgttaaatgcaatgtgccttggcatggatttctttgggtttattatgtttagatccctcagattctttaatctgtaggtttatgtttttcataaattttgaaaattttcagccattatttctttgactaatttttcttactctctccgctcttcctctctttctgggtttccaatgatagaaacgtttggatcttttgttattgcccacagatccctgagccccctcttcttcttcttcttttttttgttttgtattgttttgttttgttttctttagattactttctctttgttgttcaggttgggtgaattatactgatgtgtcctcaagctcattaactctatcttctttcatctttacactactaattaacccatccagtgagttattttatttttgttattgtatttttcagttctttaatatccatttgtttcttttttataatctcaatttctttgctgagattttctatttcattaatttgtttgaagtgtatttgtgattgctggttgagcatttttatgatgatttatttaacattcttgttaaataattctaatatctgaatcaccttggtgttgacatctgttgatcatctttactcattcattgttgtgattttcttggttctgggtatgattaatgattttattatcataccctagacaatttgcatattatattttgagactttggatggtattcaattttactttttagcgggcagtctttgtgttaaagtgtaatgtaagggccaggtggacatattgttcattttcttgctaggccccactaacaccactctggcaaaatagagcgctgactgacaaagccttattgctgataggtggagtggaagttcagcttaccctgggccctgctggggaaagtggggtactaaattgccctgccttgttgccactgagtaggatgtaagcccagcttcccaccagcccatgctagggaagagggaaatagagactgatccatattgcctttttgctgcaaggtgaaagagaaatctcaaatccctgctgggtccatctgataccaagttgaaagggaggaacaaaagtgcagtctagagctgcctattcttccttattcagtcttgttgctgctaggcaagggtatggaggttcagctccccactagtctttgctgataccagtgattgggtggaaaatggactgctggccatccctgacttgcaggactgagtaggggtggaagtaaaggtttccaatccacctcactaatacctgaggtgggggttacttggtaaagtctagtgctgatttagccccatctcgtaccacctcattaagtctgccaggtgggagtggagactcaactcccctcctgaccttccttacactaccctgatggggaagtggtagcatgcttgggcccctgacacctctgggcaggggaatcagaggaccgacatctgcttacatgagaattggggatggggtggagtggaatatcaacttcccactttgctaggctgaaaccacaggagagggatggtttttctgttggtgttgactaaagtagggtgggtaatttcagaaaggttttctgttatttaggccaccttttccacagtccttttactaggggaaaaggcttttcctggaggagttttttaattaaaaaaaaaatactttttttaacagcagctttaatattacagcaaaattaaaagaaagacagagttccaatatacctcttgccccttcatgtgcatagcctcccccctcccccattacctgcatcctgtatcagaataacacatttgctacaattgatgaacctacatggacacatcattgtcacccaaagtccatagtctacgttagggttcacttttgatgctgtacattctataagtttgaacaaatatatgatgacatgtatccatcattacaatacacagatcactttcattgccttaaaaatcctctgtgctctgcctatttatccctcccttccaatccctggcaaccactgatcttttactaccttcatagttttccttttccagaatgtcatatagtcagaatcatacggtatgtagccttttcagattggcatctttcacttagcaatatacatgtgaaattcctctgtgtcttttcatggctcaataactcatttatttttagtgctgaataatattccattgcctggatgtgtcacagtttatccattcacctactgaagaacatctgggttgcttccaagttttggcaattataaataaagctactataaatatccatgtgcaggcttttgtgctgacataggttttcaactcctttggataaatgtcaaggagcatgattgtcagatcatatggtaagagtatgtttcgttttgtaagaatgccaaactgttttccaagtgtctgtaccacttcgcattcccaccagcaatgaatgagagctcctactgctccacatcttcaccagtatttgttgttgccagttttccagattctaataggtgtgtagccgttatctcattgttgttttaatttgcatttccttaaagaaataagatgtggagcatcttctcacattcttatttgccatttgtgtatcttctttgatgagatgtctgttcaagcctttggcccattgtttaatcaggttgtttgttttcttatattgttgagttttaagagttctttgtctattttggacagcagtcccttatctgatgtgtcttttgtaaatgttttctcccactctatggcttgtcttttcattctctttgcagagctgaagttttccattttaatgaagtccaggttattaattctttctttcatggtttgtgccgttagtgttgtatctaaaagtcattgccacatccggggtgatttaagttttttcttatgttatgctccaggagttttataattttttcttttgcatttatgtctatgattcattttgagttaatttttgtgaggggtgtaaggtctatatctacatcctttttttttttttttttttttttttgcttatcaatgtccagttgttctagcactatttgttgaacagactatctttgctccattttactgcctttgctcctttgtcaaagaacagttgagtatattcctgtgggtctatttctgggttctccattctgctgcattgatctatttgtatattcttttaccagtagcacactgtcttgattattctatctttatagtaagtcttgaggtcaggtagtgtcagtcctttgactttgttcttctctgtcaatattttactaactattctggatcttttgcctctccacataaactttaaaataagtttgttggtgtccacaaaagaatgtgctggagtattgattgggattgcactgaatctatagatcaaattgggaaaaactggcatcttaacaatattgagtcttcctattcatgaacatggaatctctttccatttatttagttctttgattttttcatcagattttttgttttccttatatagatcttgtgcgtattttcttagatttatatgtaagtatttcattttgggggtgctgatataaacagtaatatggttttttttaattttaaattccacttgttattgctggtatgtaagaatgtgattgaccttgtgtcctgtaaccttgctataatgacttattggttccaatggttttgttgctgttgttgttgattctttcagattttctacatagaggatcatgtcatctgcaaacaaaggcagttttatttctgcgttcccaatgggtgtaccttttgtttcctttttttgtcttattgctttagctaagacttccagaacaatgttgaaaaggaatgatgagagtggacatacttgccttgttcccaatcttagtaggaaagcttctagtctcttaccattaagtatgatagtagcagtttttttttgtaaatattctttttcaagttgaggaagttctcaattctgagtttaatgagagtttttatcatgaatgggtgttggattttgttaaatggcttttctgcatctattgatatgatcatgtgatttttcctctatagcctgctgatgtgatggatgacgttaattggtttttaaatgtataatcagtcttgcatacctaggataaattccatttggtcatagtatataattgtttttatacattattggatttgactcatcagtatttcattgaacatttttccatctatgttcatgacagataggaatctgtagttttctttccttgtaatgtctttgtctggtttttgtattagggtgttgctggcctcattaaattgagttataacatattctctctgcttctattctctgcaagataatgtagagaatttgtgtcatttcttccttaagtgttatgtagaactcaccagtgaacccatccaggcctggcgccttctgtttggaaaggttattaactattgattcaatttctttaatagatacaggtttgttttgattgtatatttctgcttgtgtgaggtttggcagattgtgtctttcaagaaattggctcattttatctaggttatcaaactggtgagcctagggttgttcacagtattattttattatgctttgaatgtccatggggtctgtaatgatgtccccactttcatttataatattaataggtcatgttctctttttttccttagctttgtccagaggcttatcaactttattgatctttttaataaactagcttttggtttcaatgatttttctctattgatttcctgtttttaatttctgctctaatttgtattatatattttattctgcttacttagggtttaatgtgcttttttttttcttttttcttttttgagactgggtctcagtttttgcccaggctggagtgcaatggtgcgatcatagctcactgtaatctcaaacttgtgcactcaagcaatcctcccacctcagcctcctgagtagttgggactacaggcatgcaccaccatacctggctaattttttttttttttttttttttttttttgtggaggcttgtcttgctatgctgcccacactggtcttgaactcctgacctcaagtgatcttcccagctcaacctcccaaagtgatgggattacaggtgtgagccaccatgcctacctagcctcttcttttctaatatttacattcaaagctataaatttcttctttatcactgattttgctgcagtacacaaagtttgataagttgtgttttcattttcttcaaaatatattttcaacttctcctgagatttttgacccatgtgttatttagaaatgtgttgtttaatctccatgagttttggcgttttcccattatctttctattcttgatctctagtttaattccatcgtggtctgagagcagacattgtatgaattctgttcttctaaatttggaaaagtttattttatggcccagaatgagatccatcttggtgaatgttccatatgagcttaagaagtatgtgtatctactgttgtttggtaaatgtcagttatatccagtcgatggtgttggtgttgagctcagctacgtcctacctgtgtggggtttttatttctttgttttgttttttgttgtttttcttttgcctgtgcctgttgacagttccatgttggaagcttctgtagtgtcctgtccagaatatatgggagtcaatatggaaacctatggaactcattgctatgttatttcccaagtctaggactctaggttggtcaccttttctttctactttctagaggctttttatgcttttttattatgttatgcccagatttttgtttgtttctgtagtttgctttttaaaacactttaaattgtggtaaaatgcatatgacataaaatttactatcttaatcatttgcaagtgtatagttcagtattgttaagtatattcacattgtcgtgcaatgtctccaggtttgtttagttgtaaggagagagacatgggagaagtaaggctacttcatattggtcagaaccagaagtgacctatagtatgttttcctggctcttcttttatgttttatttttttccatatggaatttagtatcaaattgtctagcaaaattaaaaaacttgttggtattttaaaaattgagatttcatcttatatgtataaattgttaaacagaactgacatctttatgatgttgagtcctcctattcaagagcaaggtgtgtctttccattcattcatgtctacttttgcatctttcaggagtgttttagaatgtcctttgtagaggttttgtacactgcatgtcacgtttatttctaaggatgattttttttgtagataaggttttatttcctattgtgtattcccctttcatggttgtttgggaatatggaataaactagtgactttcaaatctggatcttagccctatcacctgagcccagacccagatttgtgacagttcatcccacctacccatttagctagtcctctcataccttcaactcaatgtgtgcaaaggtcaacttgtgttcttccctgatcactccaaccctcacttggacactcaccagacactgaatttatttctgactcatccctctacacccccttaccagctaattggtcattcagtcctaataattctctagcattctggaagctatggtcatgaaatctatgtgttagatggaaccatcaagtcatctatcataacctcatttctgatgcctaaattcactattcaacatccccattaagaagtttcatggcatatgcttggacatatatttccagggacaggtaacttactaccttatgaggcagcccattttatttctggccattttgatcatcacatacttttccatgtatatgtcagtcaaatccatccccttctttctaaaattatcaccccgtgcttgctcagcacccactccacccacagtgacccttctgcaacagttctgccaggttccagcacacacagactgaagggtaaaatttttcacctaatatccatcgcattttgtgatgctggccccagcctacatctaccacttcatggcttaccacagagagaggagaagaaggagaaggaggagaaggagaagaagaagaagaagaagaagaagaagaagaagaagaagaagaagaagaagaagaagaagaagaagaagaagaagaagaagaagaagaggaagaggaagaggaagaggaagaggaagaggaagaagaagaggaagaagaagaagaagaagacagggaacgaaggagcaaaaatacactagctttccaaaggtccatacgaacattagttgtggatattccttctttcctgctgtatcagtgggggttgcagggaactgggagcactggtattttcagtaggaaggctgtcagtgatagtaattaccctggggtactctcagtgtggactcaataatggatgctactaagcacttgacacaattgggatatagagatatacacactgctatcagaccaataactcaatataacaccaatgactataaatacaaagcagactatagattactacctcctccgtgaactctcataggacatttctatgtcctatgacatagaaggtacagagtgcttgcagccttatggtgtaattatttatagaaggttagttcctgtagggcagttcttttttatccatgtctgcatctcccactctgtcttcttcccttatcagaatctcatgcactctttagggtcccactcagatgtcacttctgctggaaatctttctctggtctctttagccagaagtcagtctacaaacacttccctaagcaccctctctgtgctaggtactgtgctaagcactgagtatgacatgctggtaaacctttggaactttccctggagaaagtgggaagccaccatattttcaagcaaggaagatggtcagagcagtgttgtggaaaggtttctctaccacagtatggaggacaaatgggaaagccaagactggaggcaggggaagccccctgggaggtggctgtggcaggagtccagggaagagatgatgaggataaaccggggcagtggaaggacacagacctggcagacggttgagaggcagaattaacagatggctattactccaaagacagatttgaatgatgtgtcactcatacagagatgcgggctggaatctgtgatagaaatattatcatcggcaactgtggatggtattcaacacaaggacttgaattgggctgtgagttgaattgtgtcccccaaaacaatacattgaaatcttaacccttagaacccgtgaatgtgagtttactgggaaataggatctttgcagatgtaatcaagttaagaagaggccattagggtaaaccttaatccaatatgactagtgtagttataaaaagagggaaatttggagacagagaaggacacagagacatacagggaagagaaagccatatgaagacagagggagagataggagtgatgcatctttaaggaacaccaagaactcttggaagccaccagaagctaggagagggcaatggggcatggaggcctcagagcctccagaaggaatcagccctgctaacatctggatttcagacttctggcttccagaactgtgaaagaatgaattgctgttgttttaagccccacagtttatggtcatttgttatggcagccccagcaaatgcatacaaatggtgcgaaagaacaattgagcaggctttcagaggctattgaggggctgatgaggagacattcattttgtaaaactctggcattggtggtactcaatcatcttatatttaggacccagcctgccctgttttcttgcagggaggttcgctcattagaataaaaagttgtcacatgctgttgtcagagaaacaagacggtggcctaagagatctacaaattcactctgctctagggctgaagtagctccctcttggtcacagactggaagggttcagcactcttttgtgcagaatggaagttccctggggaggtcagaactcagaacttccagaggaatgtacttcttgctctatctcagcatcccttatctcatctcttattgtgacagctacagagacttcaactaatttgagttatagtgagaggattttgatctagaaagtggagaaaaggcaaagatgttaaaagtcattgtggtttaaggagattttgggctgagacaatggggttttctagatatacaatcatatcgtctgcaaacagggacaatttgacttcctcttttcctaattgaataccctttatttccttctcctgcctcattgccctggccagaacttccaacactatgttgaataggagtggtgagagaaggcatccctgtcttgtgccagttttcaaagggaatgcttccagtatttgcccattcagtacgatattggctgtgggtttgtcatagatagctcttattattttgaaatacgtcccatcaatacctaatttattgagagtttttagcatgaagcgttgttgaattttgtcaaaggccttttctgcatctattgagataatcatgtggtttttgtctttggttctgtttatatgctggattacgtttattgatttgcatatattgaaccagccttgcatcccagggatgaagcccacttgatcatggtggataagctttttgatgtgctgctggattcggtttgccagtattttattgaggatttttgcatcaatgttcatcaaggatattggtctaaaattatcttttttggttgtgtctctgcctggctttggtatcaggatgatgctggcctcataaaacgagttagggaggattccctctttttctattgattggaatagtttcagaaggaatggaaccagttcctccttgtacctctggtagaattcagctgtgaatccatctggtcctggactctttttggttggtaagctattgattattgccacaatttcagctcctgttattggtctattcagagattcaacttcttcctggtttagtcttgggagggtgtatgtgtcgaggagcaacttcagcaaagtctcaggatacaaaatcaatgtacaaaaatcacaagcattcttatacaccaacaacagacaaacagagagccaaatcatgagtgaactcccattcacaattgcttcaaagagaataaaatacctaggaatccaacttacaagggatgtgaaggacctcttcaaggagaactacaaaccactgctcaaggaaataaaagaggatacaaacaaatggaagaacattccatgctcatgggtaggaagaatcaatatcgtgaaaatggccatactgcccaaggtaatttacacattcaatgccatccccatcaagctaccaatgactttcttcacagaattggaaaaaactactttaaagttcatatggaaccaaaaaagagcctgcatcgccaagtcaatcctaagccaaaagaacaaagctggagacatcacagtacctgacttcaaactatactacaaggctacagtaaccaaaacagcatggtactggtaccaaaacggagatatagatcaatggaacagaacagagccctcagaaataatgctgcatatctacaactatctgatctttgacaaatctgagaaaaacaagcaatggggaaaggattccctatttaataaatggtgctgggaaaactggctagccatatgtagaaagctgaaactggatcccttccttacaccttatacaaaaatcaattcaagatggattaaagacttaaacattagacctaaaaccataaaaaccctagaagaaaacctaggcattaccattcaggacaaaggcatggacaaggacttcatgtctaaaacaccaaaagtaatggcaacaaaagccaaaattgacaaatgggatctaattaaactaaagagcttctgcacagcaaaagaaactaccatcagagtgaacaggcaacctacaaaatgggagaaaagtttcacaacctactcatctgacaaagggctaatatccagaatctacaatgaactcaaacaaatttacaagaagaaaacaaacaaccccatcaaaaagtgggcgaaggacatgaacagacacttctcaaaagaagacatttatgcagccaaaaaacacatgaaaaaatgctcaccatcactggccatcagagaaatgcaaatcaaaaccacaatgagataccatctcacaccagttagaatggcgatcattaaaaagtcaggaaacaacaggtgctggagaggatgtggagaaataggaacacttttacactgttgctgggactgtaaactcgttcaaccattgtggaagtcagtgtggcgattcctcagggatctagaactagaaataccgtttgacccagctatcccattactgggtatatacccaaaggactataaatcatgctgctataaagacacatgcacacatatgtttattgcggcattattcaaaatagcaaagacttggaaccaacccaaatgtccaacagtgatagactggattaagaaaatgtggcacatatacaccatggaatactatgcagccataaacaatgatgagttcatgtcctttgtagggacatggatgaaactggaaatcatcattctcagtaaactatcgcaagaacaaaaaaccaaacaccgtatgttctcactcataggtgggaattgaacaatgagaacacatggacacaggaaggggaacatcacactctggggactgttgtggggtggggggaggaaggagggatggcattgggagatatacctaatgctagatgacgagttactggtgcagcacaccagcacggcacatgtatacatatgtaactaacctgcacattgtgcacatgtaccctaaaacttaaagtatagtaataaaaaaaaaagtcattgtggtccatacactgaaatatgattcagcccccaaaggaaataaagtactgatccatgctacatcatggaggaatccccaaaacatgatactgagtttaagaacccagacacaagaagtcacatactgtatgattccatttacatggaatgtggcaaatcagtaaatcataagaacaaaaaacaagttagtagttgccagggactgaggtggggtgtgggggatgatgagtgactggtagtgactagagagttttcttttggggtgacataaatgttttggaactagctagaaagtatagttgcacagcagtgtgaatgtactaaatggcactgaattgtaaacattaaaatggccaattttatgttatgtagattttacctcaacaaaaaagtcattgcaggcttgaaatcatatttttgtactcagtttatggaaattgaaggtcaaatttgtggccctaaggagggcagggcagtcttctcactttcagctaagcagtgggcagcacagacagcccaagtgagccaacattaactcccatttgccaacatggaaagatgagcaaggccagtcactgtggctcatgcctgtagtctcagcactttgggaggcagaggcaggaggatcgcttgaaccgaggagtctgaggttgcagtgagttgtgatagtgccactgcactccagcctggggtgacagactgagagaaagaaaggaagaaaggaagaaagaaagaaagagagagagagagagagaaagagaaggaaagaaagaaagaagaaagaaaggaaagaaagaagaaagaaaaagaaagaagaaagaaaaagaaagaaagacagagaaagaaagaaaagaaagaaagaaagaaagaaagaaagaaagaaagaaagaaagaaagaaagaaagaagaaaggaaggaagaaagaagaagggagggaggaagggaggaaggaaggaaggaaaggaaggaaggaaaggagggagggaggaaaaggtaggaagggcaaggcagatcagcccttctgagagccaccacaggcagcccacatggcaaaacatttcacaggacatcttacttctgaatggatcaactgcaccctgtaatggaaaaaggtaaaaactgaagggtaaggaggcaaggtccactgtattcattggatctctactaaaggtatcacaaatgattgttattttaaagaacaatttccttcataaacagcttctctctaggctgtggcttcctgagagcccttcagaaagtacaagtgaaaatatattggagattctcacccagaaagctaagaaagcacagggccatcagagcaatgaacaaagcatgttagtacattatatatgaaaacattgcacacattcccattttctgaggctcagggatgtcaccaacaactgcaagatgagctgctggggtgattattctacagctttgttgaggtgtaattgatgtacagtaaactgaaaatatctaaagtacaatttgatcagttttgcatatgtgtacaccatcaccccagtcaagatgatgaatatattcatcagtccccaaagtttccttgtggccctttgtagtccctccctctggcccctctccatcatctgcaggcaaccactgatctgtagtttgcattttctagagttttgtataaatgcaaccatagaatagggaatcctttatgcctggtttctttcattcagcataatgactgagacccattcaggttgttgcatgcatattcatcattcattcctttctacaaattactgaatagtattctattatatgaattataccacaatttatttatctatttacctgttgatgggcatttggattgttttctggtttggggtgactacaaatacagctgctatcaacgtagctatacaggtgtttgtatggacatacactttcattagtctttggcaaatacccagcagtagaatgcttgggttatatggtgtacgtttaacttttaaagaaattcccaaattgtttctttcaaagtagttgtacaatattacattccagcactggtgtaattgtttaaaaatccatggctctctatggagttggcagaggttcatgatttttcacacatgttctgcagcaaattagacattgggctggatccagaaataacctgtgacctgattctggaggctatattattacacatgattgggaggagggtcaagtggtgaagggaaaactggatgtggggaatagggctgcattgggaatagggggccatcaaaaggagtcaaactaggtcctttgaggggaaggctgacagctgcaggtggatgaaggaagggaggggacagccaagtgttcagagcccctgattgcctgcctaaggaattggaactccctgaagaatgaatgggcagtttttctgggcactcacttccagatcctggagcccacctgtgcagccatgttattgcctggatctgggaacccatcgcaatgggacaggatatacttggcctataacttggaataagctagaaagagagggtggttgtgatgttatatgttttccacgctttgagcacttactgttttttacagcccttcttctcttttcttatcatctctttagaggtcagttggagagaggcaaagtggggagtagacgaggcttaatatcagcgaattcctcaccttacagaggccccctgctggacagaggcctttgtgctgggcattctgaggctctggaggtgtgtcagaaggtgcctgaggactgtcaaagtgggggagcaaaaagaatgccagacctggagtcaggagacttccactctaaggtcaccaaccctccccagcgtggccattttcagctcctctgctcctgagagcagactctgaccatccttggatttaaagtgatggggtgagagggtgggatgaggaggaagagaaaggtcttgaacgtttattcagcctaccctcttggccaggcatatgtgctgtgtgtctttcgcatcatgctaagaactatgacaacagttgatctttactgagttctccctctggattgaacatggtgcttaggaccttatagtgtctctttttaaccctcgcagcatctgatgggtagatgctattattgcctccattttacaaaggaggacactaaggcacagaaagggtaaaagcctcacccccatcacatagcaggtaatggaagagctgggaaaaaaaaaagaaaggaaatctttcccagacagatgcaatctaaaagtacaagtcagaaaggaaaggcacactgctccagaccccatcacctcaaagagccttcattgtgaggtagaaatgaccaaaaccaagtaaccccacatcccaagctgcagcttcagcttgttagtctgttgaaatacaggtgtccctgggctcatgatccctgatggtcaagtcaagcagacgtgggtcccatagtccttggaagacccccaccattgatatttttccatcaagatagtaacacacatgttctagaatttctctttggcacacattggctgggtttggggcccttcattttggcctcaaatgaaggcctggagccctaccaagggaaattcaggcagaggcagaagagcagagccaccctggtatgattcagccccaagaggatgagacagtacccctagaagagtggtcgagggtctgactcagcttctcccctgcccctccttcatttgcgctctccacttcattttcatctctgaaagcttcttctcagccatttcccaggaaggactgactcatggctcccaaactctctcagtggggaaaaatggtggagtgcccatcgactattacaggcgacggctgtgtcctctgtccatatgggcccagccattccggaactcaaacataaagctctcaggagaacctctctaactggccataaaaagtttcattatacctgaagaggaagcagagaggctatagattcatggatgccctcgattttctggtgaaacttaatgaccccatctcaggaaaaaaataataataataaataaatgtttttaaaagcataaaataaaacaatgggatcaaaatagttattaacatattaacaaaacaaatttgcgatatattaatttatgtgcttcttaactcattaaataagacctagcagtaggtctcataattactgtaatttcaaggtagtgatatttgaagattcctgctatgactgtaatgtgaaattaaaatatctatgatttctcttggcgacaaagtcacagattatgtaaatactactgtggtttgttgccaacatgcataattgaagaaaggctgaatttcaattagaggttagtgaaaacagaaatataattttttcctcattcaagtttacagactccctgaattctatccttgaatcctaggataagatcacctgctaaagaaacactgaaacctatttgattacttaggctttttttttcctgattcctcagctaagccaaactgttgtccttaccactttttctgatactgtgttttcttcttactgccaaagcacaaccaaggagcttaggttctagtcctagctcacccacttacaagctgtgtgactttgaatgagttgctgaatctgtttgaacatcagttttctcctctgtgaaatggggatactaatagtacctacttcttggtattgattaaatgaaatgcttgtaaaacattctggcactctgttagcacatagaggttagtttagccacaataattaatgttggggaaagagtttataaaccaaaaggtagcatgtgtgtgttgatcattataacaatctgtcttattcttatgtgatttctctctttgctggctctatgatcccagagtggagagcataggaaacatacaggcagaggaggggacagtggtgggctagagttatctcaaacgggctcccaaaagccaactgttatgttttcaggaattttgcaaggtgggtgacatcatgttggtagctagaaatcggccacaacaagagtatttacaacacggcagtcagtgctatcactttaatcagagctttttttttttcctcctagagagccccttgttaaacacttcacagtgcatcactgggagagggtgactggggcgccgctcttatcaaaatgatggtgaggccacctgtactatatctggggaaaatgaaacatcaaatggatttcaggggcaaaaacattaaatattctttgtggtccaagttaatttaatttgctctccatttttttttcatctttttcttgattaatgctctcagttcttgacaattacttccatttcatcaattctacaaaaagagtctgttttgagataagaaaaaaagaatctctgttccctttatctgcagagtgaaatatactttacttaaaatccaacatttctatatattagtaacttgcctccatgtcaacttttatctgtaagagtctactgcatctttcccagagagtgttgcaaaggcacagagcagaaaagtgagtttactgattatgcagccctgttggtgttacttgagtccaaatgttggcttagatggtgttttcagaactcctaagtggatgtttatgtctgcaaatggaagcactgagtagctagattttcagggccaacgcgggggagtcagtcctgagtggtggtttgctcaatcattggcatttggttgcatgagctgttttcaaatgtgcctctgctaccttgacagtcctgtaagccacttgtatatgctgttctccatctgttaagtatgctaacacacaatggagaaaggaaataagatagggagtggcaaaggaaaaaacttaaagctatgaagatgtggaatctggcggagaagaatggctatagagtcgtgggctcccatgagtcctggaagggactagacaacctcttctgcggggctgctatacaggtgctccaacagggaaggcatgtcactaaatttgctctggccttgagttgttccatggagactttgggtggctgttgagctattggcccaatgctatccccacgaggattccatttctcttggattgtgttgggttttatgcaatgtggttacagtcagtgtggtgcttcagagtgtctcaagcttacctttgctgggtagtcagcatcattgtgctccatgcgccagttcatgtctctggcttttccccttgttaagaccccattcaattgaataaggctgcctgtggcaggcaggcctggcaggctgccgtggctggacttgagaaaagtgaggactacaagcctaaagccaagctcgcgattggaggcccgcccatctgatcagttctggtctctcagtgggaagttcaacccctcaccccagataagtattgcatgtctgaaaaaggctttgaagagagatgcaaagggcttaagggtgcactgggacattaatattatgattacctaaagacagtaaggagccagggatgtgaaccattgctgccagaatgggatctggtttctgaaagcaaaggtgataaaattagcatccagccacttgactagtccacactcatcctttcctctgataatggcatggctggtatacttcattcagatagtcactggctcggccggctctccactaaacggggctctcagaagcaaaccaaacagtatccacttgtatgtgtttatgcctgtggcaatttcagattgttcctgtcaaaatgtacctgttttccaaaatgtctttttaaatccaagtttcacatttgtggggaggtgggggaagtaattaacattttataaagtaagctggagaaactggctcctataattgacatagaaatggtatgtggatattgctgtcagaaattgagcaggaccttgaacctgatagtagtgagcccaggcctaggaactgggtgtgttccttgatctcttgtttgttctgggccctgataggaaaggaactccctggaggtcgcagaccttggtcccaccttacattgtttgtcattcagagaggacactgaagctcagaagaagtcaggagctggctcaaggccccacagcaacgaagcagtaaagcctctcaaaagccagcctcttgactcctaggccagctcttaagtctaccccagtagaatgtctggcacctttataggtccctttgttctctgctacccaactgcatttgcattgaagttagtaattttttaaggttggcattctttccagagccatttgccacaagggggaattcttgcactcactcattaatttatcattgtgcacctgccacatgccaggctggcttctacggactggacattcagcatgagtctcctattttggaggggagagacagacagaaaaacaatcagcattgttttctgcaccatgacaatgtttcactccatccagcagctatcatcacagtggccaggtttccctctgctaggactggaatggaggcttggaggaagacagtgccactagctaacatcggtagggcttaccacatgtcaacaactgttctaagcatattacagatgtgcctttgatcctcaccacatccttacaaggcagatgctattattatcatctctcttttacagatgaggaaatagataaacacagagaggttgaatatcttcctgcaaggccacacagctcatcagtggcagagctaagattcaaacacagaccactgggtgccagagttcagcttgaaccacctgactacactgcctgtcaggatggcttagaacaagcttgtccaacccatggccggtgggctgtgtggagcccaggatggctttggatgcggcccaacacaaatttgtaaactttgttaaaacattatgaagttttttttgatttttttagctcatcagttattgttagttttagtgtattttatgtacggcccaggacaattcttcttccactgtggcccagggaagtaaaaaattggacacccctggcttagagtctaaagcctctcctgcattcccagaccccgctaagtccaaggaggcataccagccaggccagggtcctccctactaagggtaagcaccttcactctggaaggaagtcagaggcagccatgtactggctaggtatcgccaggcctgaccagtgctccgttccccttcctcagccaaagtgctttcctctgggataggaaccacagccccatttgcttcacaggatggttgtgaggctccagggagctggctccaattacaccagcccctgtcccccacaagtttgccagcactgatggccccccaccccaactctggattccaagctgggacatcaggtttagcagaggatgatagattgttgccttgcttgatgagttctttgccactgctccctgtgctttggagcagtcttgccagcagcaagtccagttcagcctttggtatgcacaatgcctcttggcctccaaccacctggaaaagctctagctgaggccgctttaatgaacagaggggatatgtacaagtaggaccagaggttgctcagaggctgtctgtcatgtctaggatgctgccaccacatcccacattgccccaatctcaagatttccctaaaaacctgcccagtgagaccctttgctgccaaggacactttctctggctgatttccttgcttccccggtcccagcaagccacctgtcaggagttgtgagccccagaagcagaaactaaacttacttattgacaggaacagcaggcaggctgccagtgaatggaattcacttcatttaactggcctgtttgctgtgcaaatcacatgatttttagtcaaatttagggaataaaaatttaataattaaaaccatatgatcgagaaccatatttttaaaagttaatgatttaaagtgcccccacaaaatgttctaaaactaaaatggtgtttgtgtggggatacagattttcatagaaggaaacataatcaaacacttattaagaagagagaagtccatgtgtcagcatgttgacaatactgggattctattttgtacttttggctacaaacaacaatgtgaaggctctgagactcgtgacttgacatccaaacacatcaaaacaattaggagtgtgagagggaaagatttcagttctccctgaaatctcatacctaactaactgggaacaacatgtgaagctctccccagtcttccttgcattgtacccccacccctccaggcttcccctaagcttcaagcactgacacagacggagaaaccacctgcactccctgcaaatctacctcttcagctccatcatcaggctctttcccttcttgcatccctcaagatggactctacatcttagctggctctccaccagctgaaaccttttaggtgcttcttgccagttcttccactggtccagccatacttctcactggcatctcaagctcaaccccatagactccatgtggactgatggagtttgccttaagcccttacagagttgttacaacttcccccactaacttgatttcacggctaccctttatttcctcgccctctcttccccgccccatccataaacagccttacgagtttttgtttgtttttttgtttgtttgttttttttaatgaaacagggtctcattctgctgttatttaggctggagtgcagtggcacactcacagctcagtgcaaactcgacctcctgggctcaggtcatcctcccacctcagcctcccacatagctgggactagaggcgcccaccaccatgcccagctaatatgttttttgtgtattttttgtagaggtgggatttccctatgttgcccaggctggtcttggaacccttgggctcaagtgatctgcctgcctcagcctcctaaagggctgggattacatgcctagaccactgtgcctggcctgcttttaagttaaggtaagtactattaattttactcctatcacaactctcctttagctacctgaggcattgcaaacctgacttggacatttttggggtgttcacttgctggtatctgtatttcttgttactgtgggtgatcagatcaccgctcctacttattcatggatcttgagagatcatctgagatgtctttttgcttacagaccactcagttgcccttacttgacttctcttccacagtatttcttgaatccttcccttctgtgtaagtgtcatatggtcgctgttttggaaatgcaatgatggaagctcagccatcactggaaatctgtgggcccagggcaattcataagcctggacattgatgagtttgctacggaggtgcagcttctccctttccacgctacccaggaacactgtttgagaacaaaagactgaatcaggaatgcaaagagaagcacgaggcaggggagaagagaagaaaccctgttccactaaaaagaaacaaacagttgaaggctcatcacaccaagaagaggaaaggggagaggtagcagcttcttcaggagaggcagcagcacctgatgaatgcaacctatctatatgaatcacaaccagagtcagggggaaagggggaaggggtgggaggagctacaagaatgtacccctgaaagagaaaagagataaagagacaccacacccctggagtccctgaatagcaaagagactgtcataccccacagaaggagaaaccagagtctttggagaaaagtttcaggcttcttcatagaataggagaatgatctttaatgtacaaaggatagaactcctcagttggccttgaagtctgtgatggaggaagtgattgtgagagaactgcctggtcatcgatggccagggcaaacgacatgctagggtgctgagggagagagagagagagcacttgctaacaagactgtgagcttttatcatggagcattaaggaaccacagaaaactgcaaaaaaaaaaaaaaaaaaaagagccataaactactagatgggcatgtactgccaaatttccgaaggaaaattcctttaactgaatatcttatgtagctatggtttgcttgatgtggcccccctggaaaaattcaggaacatactattaaaagaatagtgagtgagtgcttagaaaaggaagccagcgcaaagtgtgtttaagacaaaagcaaaaaagagctcattaggagtagcttgctgtgttagaatagcttaccttttttgttggaagagctcaccaggcaggtggatcacagaaaagcaggcaagtgtttttgaacctcagcaaagcactaggcagcatctgttgtaaaatcttcatttacagcccagttatgtgattgcgtaaccaattaaaagactgaatctaaaggccatggataatggattaacaccctcccttacagagagggacctggaggcaagtcccagggctgcctcccggcttccttcactttttctcaatgatctggaggaggattgagaattcactcttaccacatttgcccctgagatagtgccagaaggtgatgagttctctgtagcatgaaattgagatccaaaaagatcttgacgagctcaagatggtcatgggaaatttaacagggataaatggcaagttctacatttgggttatctgctgaagtatagtgtggaggaaatgtggcttgagaaaaaaactagggactgttaattgcagtcatcttggtataattcagcggtgagctgggcctgccagcaatccagtaccatcatctcaggctgctctacaaactatgacctgtaggcatcagggtgaaggtgctgctttttgacaacccttaagcatggagctcagttcatatcagtcatatagacaagtagaggtatccaggctcttgagacaccagggtgatgaggaggcttataactgcatgcatgcatgcagccagtgaatgatctccctgggctgagacttgaacccagggctcccagttccaacttcagcgctttttagagaacatctgtgcaagactcagcaggcagcatgtctgctgcatactggataccaagccatggattcattttattctgattcttctgggtatattgacaaatgctgtgagaattggaaaacattttaatggaaagcaaagaccctattgaccttcgcagatgtgtgggctaccccctctaacttccaatgcccaagagaaactcagcagaaatactctctcataaaaagcaatttcttaaacgaatataaaatgaattccataaaccgccagaggcatcttcatcatttaaaaggtaagcgtcattaaaacaatacctttcagatgcattaaggttacatcgttaacaggactttactgtaccttaactttgaatacagaatgcaatacagaatgaaaagtttgtctcttttctataccttttctacaattctctcatacttgctttgcataagcaaaaagaggaaggatgagtactggaatcagtatgacataggcagcttgattagatgaataaacaaatggctaattggatgaatgaactgcaaagtcttggcacacaactgcttattcggagtgtttctgaattgataatcaactatgcttacagtcgaggaatggtagtggatgacattccactggacagctctgtgggtctgaaacatgttaaagtaacatgcctttcaagctctagctgtgtgaatccttaaaccccagaaatataagtttgtatttgacccaaaatggagttaaatatttatccttgaaggaattggagcaaaaaaggctatcaaagttgtggaggtgctacagatttcgattttggagaaatcagttcagaagaaataaatacaatggacaaagtcaagctcaggagaaactagagctgcttactctctggctggctcaagatgtctcttcaggtgagcacagttgactgggggcccctgagaagaatggaataagcctgaaaccagatgttggtcgttttcctggaacttcctcctcctagttaactagcacattgcacatgtggcctcaacagttataagctttgtccaggggcatgttttcctgttgactccaggaggagagttttggtttttttcaaatgtcttgttcaccctgatatgagctcttgggcttatgggatagaatagttttgagcaacggatcaaatgatttacatctaagatctgcttgggactcggcaggttctcctttgctcaccatagatcacaacaatggaactttgtgtttgataaataggggaactcgacgtaacacaggcaatagaaatagaatcatattgttttaactgtggaaataaactcttcctaatttcaaccagggtagcctgttgaaagtgttcatgtcagttttcccttccagctctcttagaagccaaaagctggctggctgcaaaacactcgtcttgtctatttatcatgccatgcaacagaatggctgcctataaaattgcatttgtctttaatgcctgcttgtatgcgtttggttgcttacgttttcgaagggaagtgtctgggaaccatttccgaaatgcgcagcaattttcccactgtctttggaaaccagagccattgttgccaactcacaatagatacatatcttgaaaattaaattgttccctccaaagctggtggtagcagccttctctgttttctttcatttgtgaaataatatctaaaatatttgcaaagaagtggttccaagaatggagataatttatttcatcattataagtaatgaaagcacattttcttcacatgagatgggatttcacatgaagtctctaagcgcaacactacggtttttttcctattattctaaatccatctaaagagtggaatgtattaaggaagacaacttaaatgtgaactcttcacaaatcttttcttgcctcacatagtcttttttctttctttctttctttttttttattatactttaagttttagggtacatgttcacattgtgcaggttagttacatatgtatacatgtgccatgctggtgtgctgcacccactaactcgtcatctagcatgaggtatatctcccaatgctatccctcccccctaccccaccccacaacagtccccagagtgtgatattccccttcctgtgtccatgtgatctcattgttcaattcccacctatgagtgagaatatgcagtgtttggttttttgttcttgtgatagtttactgagaatgatgatttccaatttcatccatgtccctacaaaggacatgaactcatcattttttatggctgcatagtattccatggtgtatatgtgccacattttcttaatccagtctatcattgttggacatttgggttggttccaagtctttgctattgtgaatagtgccgcaataaacatacgtgtgcatgtgtctttatagcagcatgatttattgtcctttgggcatatacccagtaatgggatggctgggtcaaatggtatttccagttctagatccctgaggaatctccacactgacttccacaatggttgaactagtttacagtcccaccaacagtgtaaaagtgttcctatttctccacatcctctccagcacctgttgtttcctgactttttaatgatcgccattctaactggtgtgagatggtatctcattgtggttttgatttgcatttctctgatggccagtgatgatgagcattttttcatgtgctttttggctgcataaatgtcttcttttgagaagtgtctgttcatgtccttcacccactttttgatggggttgtttgtttttttcttgtaaatttgtttgagttcattgtagattctggatattagcactttgtcagatgagtagtatctgaatgatgctggcctcataaaatgagttagggaggattccctctttttctattgattggaatagtttcagaaggaatggtaccagttcctccttgtacctctggtagaattcggctgtgaatccatctggtcctggactctttttggttggtaggctattgattattgccacaatttcagctcctgttattggtctattcagagattcaacttcttcctggtttactcttgggagagtgtatgtgtccaggaatttatccatttcttctagattttctagtttatttgcatagaggtgtttgtagtattctctgatggtagtttgtatttctgtgggatcggtggtgatatcccttttatcattttttattgcgtctatttgattcttctctcttttcttctttattagtcttgctagtggtctatcaattttgttgatcctttcagaaaaccagctcctggattcattaattttttgaagggtttttgtgtctctatttccttcagttctgctctgattttagttatttcttgccttctgctagcttttgaatgtgtttgctcttgcttttctagttcttttaattgtgatgttagggtgtcaattttggatctttcctgctttctgttgtgggcatttagtgctataaatttccctctacacactgctttgaatgcgtcccagagattctggtatgttgtgtctttgttctcattggtttcaaagaacatctttatttctgccttcatttcgttatgtacccagtagtcattcaggagcaggttgttcagtttccatgtagttgagcggttttgagtgagattcttaatcctgagttctagtttgattgcactgtggtctgagagacagtttgttataatttctgttcttttacatttgctgaggagagctttacttccaactatgtggtcaattttggaataggtgtggtgtggtgctgaaaagaatgtatattctgttgatttggggtggagagttctgtagatgtctattaggtccgcttggtgcagagctgagttcaattcctgggtatccttgttgactttctgtctcgttgatctgtctaatgttgacagtggggtgttaaagtctcccattattaatgtgtgggagtctaagtctctttgtaggtcactcaggacttgctttatgaatctgggtgctcctgtattgggtgcatatatatttaggatagttagctcttcttcttgaattgatccctttaccattatgtaactgccttctttgtctcttttgatctttgttggtttaaagtctgttttatcagagactaggattgcaacccctgcctttttttgttttccatttgcttggtagatcttcctccatccttttattttgagcctatgtgtgtctctgcacatgagatgggtttcctgaatacagcacactgatgggtcttgactctttatccaatttgccagtctgtgtctttttattggagcatttagtccatttacatttaaagttaatattgttatgtttgaatttgatcctgtcattatgatgttagctggttattttgcttgttagttgatgcagtttcttcctagtctcgatggtctttacattttggcatgattttgcagcggctggtaccagttgttcctttccatgtttagtgcttccttcaggagctcttgtaaggcaggcctggtggtgacaaaatctctcagcatttgcttgtctgtaaagtattttatttctccttcacttatgaagcttagtttggctggatatgaaattctgggttgaaaattcttttctttaagaatgttgaatattggcccccactctcttctggcttgtagggtttctgccgagagatccgctgttagtctgatgggcttccctttgagggtaacccgacctttctctctggctgcccttaacattttttccttcatttcaactttggtgaatctgacaattatgtgtcttggagttgctcttctcgaggagtatctttgtggcattctctgtatttcctgaatctgaacgttggcctgccttgctagattggggaagttctcctggataatatcctgcagagtgttttccaacttggttccattctccccatcactttcaggtacatcaatcagacgtagatttggtcttttcacatagtcccatatttcttggaggctttgctcatttctttttattcttttttctctaaacttcccttctcgcttcatttcattcatttcatcttccattgctgataccctttcttccagttgatcgcatcggctcctgaggcttctgcattcttcacgtagttctcgagccttggttttcagctccatcagctcctttaagcacttctctgtattggttattctagttatacattcttctaaatttttttcaaagttttcaacttctttgcctttggtttgaatgtcctcccatagctcagagtaatttgatcgtctaaagccttcttctctcagctcgtcaaagtcattctccatccagctttgttccgttgctggtgaggaactgcgttcctttggaggaggagaggtgctctgctttttagagtttccagtttttctgttctgttttttccacatctttgttgttttatctacttttggtctttgatgatggtgatgtacagatgggtttttggtgtggatgtactttctgtttgttagttttccttctaacagagaggaccctcagctacaggtctgttggagtaccctgccatgtgaggtgtcagtgtgcccctgctgggggtgcctcccagttaggctgctcgggggtcaggggtcagggacccacttgaggaggcagtctgcccgttctcagatctccagctgtgtgctgggagaaccactgctctcttcaaagctgtcagacagggacatttaagtctgcagaggttactgctgtctttttgtttgtctgtgccctgcccccagaggtggagcctacagaggcaggcaggcctccttgagctgtggtgggctccacccagttcgagattcccggctgctttgtttacctaatcaagcctgggcaatggcgggcgcccctcccccagcctcgctgctgccttgcagtttgatctgactgctgtgctagcaatcagcgagactccgtgggcgtaggaccctccgagccaggtgcgggatataatctcgtggtgcgccgtgttttaagcccgtgggaaaagcacagtattcaggtgggagtgacccgattttccaggtgccgtcagtcacccctttctttgactcagaaagggaactccctgaccccttgcgcttcccaggtgaggcaatgcctcgccctgcttcgctcgcgcacggtgcacgcacccactgacctgcacccattgtctggcactccctagtgagatgaacccggtacctcagatggaaatggagaaatcacccgtcttctgcgtcgctcacgctgggagctgtagaccggagctgttcctattcagccatcttgccatttttcttctttctttctttaatggctattctggttcttctcttaactcactgctacttttggccacttgttaaacactctttctctccctacccaccttcttaggtagttttctctgttggacttaccaccagtataattggagacagaggctagacatgtatgcaaacctatagggacatcccctcaaaatgccgagtgacaactgcccacatctctttcttagctgtgagtttgttttctgacactttctttttagaacgtgttgggctctaagtttgctgaataatcttgagcattgtcccaattaatgattcagggcttcaattccccagattgctttgcttgaaatctgggggaagagggatgtctcactagtctttggtttaatgtggaaagaagggaccccaagctccacccaaccccactgggaatctggaggcggtctaagatctttccagcagccactgaagggaagtctgttcgtaccctcctctggctggggaattgtaatcggtggatgaccatagaggaaagctagtcaccaacacagggatgatgccagctggcaagcctcgtagagtcctcctggccaagctctttagtacatcgaaagaaagtgcaactcagagaggtgaagctactcgtctgtcagcttgccagggagaggttgaaacctcagtgatgtcggcacttctttaaggagaggcggtcactggacagcctgggaggctgccttgcagatttatgaggcttctatccaggatctttcagaatgtggacccaaggaaatattacatagagcgtctgtctttaagtccggtctgctgggctcatgccctggcttgggattcagggaatctgacttctagagtcatctctcaccatcttttgctagcatatgttcctgggtgagtctcttcctcagtttccctatctgtacaagaaggggattggacctttttggtgtgtgtgacagagactcgctgtgtctcccaagctggagtgcaataatgtgatctgtgctcactgcaacctccacctcccggggttcaagcaattctcctgcctcagcctcccaaatagctgggattagaggtgagcaccaccatgcccagttaattttgtgtgtgtgtatttttagtagaaataggatttcaccatgttggccaggctggtctcgaactcctgacctcaagtgatccacgcacctcggcctcacaaagtgctgggattacagacgtgagccactgggcctagcctggactttataatctctagttttccctcctgatattaacattctaggattctaaccaagctttgctataaaaaaggaggagaacaaaaagggattgctgtccttcagctcagttgctgtctccattgcctgcattgaaaaaaaagggctgcccttcccttgtgcctttagtgcacacagcaccaccctgtccaaggggctttctggttcaaggtctcatttgatccttatgtgcaccatgggaggggaggagagtaaagaggatcagccccattttgtagatcaggaacctgagactcaaagaggtcaaatgacctatggatggaagtggaactcaggtctcctggtcctcaaccccatgttcgtttcattatttctcctagaccgccagctaaaaatgctttgcaaacctttgttgggccagctggtatgactggcacctgggcccaagtgtaacatgtttgcaaactgtttctacactctgaggcaactgcctgctgaaattactacaaaaccaaacaatttccaacattttcctcctgcctagtgcaacatttccagttgttcctgtagggtaagtctagggacacattgtttttaaaatcatttccaggggggaaaaacattatactctgtgtgtgtgtgtgtgtgtgtgtgtgtgtgtgtgtgtttgcacctttggggctacggttgagcagtccataagggcagaaaaggaaaagaccagctgctgcccgtttcctttgctagtcagctgtagaacaaccggagtagcaatttgagaggaagatagaggaatctatgcctaccagtactgatggggataaccccaagcttaaagagggggcccttttcctccagggcttctagtgccatagtgctttccagaagagagagaaagagagagagagagagagagagagagtataccaactaatgagtggtatgttgtgtccctgcaatggacactggaacagcaccctccaacacacaccaactttggtggtcgactatggaaaagcttaagggaattaagcctgtaggcatttagctcatgagaaaactagcacggagatcacttgaattttcagtttggactgccactttaaatccaaggtatctttgaattctcaaagtgtatgatgtttatagcataggaaaagatgatgcttatagcataggaaaagatgatgctaaacaagttcaacttttctttttcaagaaataaggacttgaaaaaacttggactcacattactttgaaggctagttctgcagtcaatcatgtgacaagatgagcattgctattgttggtgtaagatagtcttgctctgccttcgtttcttgatgtccccaagttccagaaaactctgttctctgccataatgggaggtcactgtgtgctgtttgattttagagtcaaataagttttcagcacatggtcagcttgagagacagtttgccctcaattggcttattggtttgtacaattcttggctccttcaagcagggtcctgccatctgagcccactctgtgggattatgggatacctgtacttgccaggaagtcctggcctcaagctgattcatcactgggtagcacatgacgcccagatgagaggggggcatttttaacctcaatggcatgaaaatttcctgaaatcaaaaggacagagattgggagttcctggggagcagcagcagcagcaatgtcaaaagtaggatcaaccagagcttagaatattcctacaccaactttgcaagttgttcattgatatgtgggttgctggaagaaagtttccagcactgctaggtcagcatataaacaaggaaaaaagggtgtgttgatggcccatttcaaagggaaccagtcttgctaatggtagagggtataaacatttttctccttcaaaacttaaaagattttgttgtatcttttctctaaaagaaacatctttctaaaatgtcaaattagagcaaagagtgataacaatttggactagaaaaagcagcctcattaagatataattcatataccattcaattaatccattgaaagtttacaattcaatgtgttttagtgttttcacagagatgtgcaaccatcaccacaattaattcaagaacattttcatcaccctcaaaagaaaccctgtacccattagtagtcagtccacattctcccttccttcccctagccctaggcaaccactaagctactttcagcctctatggacttgcctattctggatatttcgcataaattgaatcatacaatatgtagttttctgtatctggcttctttcacttagcacgatgtttaaacggttcatccatgttataacatggatcagtacttcattcttttttatggatgataatattatactgtacagctagaccacattttacttatccacttacctgatgatagacatttgggttgtttctactttgggctactactatgagtagtgtttctatgaacattcctgttcaagattttgtacgaatctctgttttcaatcctcttgggcatatatctaggagtggaattgtaggatcatatagctactctatgttagtttttcataacaacttcactgttttacattcccaccaacaatgtatgagggccccaatttctccacatcactttgagctttttaaagtcaacttttcaaagctaaaagtgatgttttagaatattgatatatctattagcacaaggctataattatatgcctcacagctcttgtatagtgtcaaaacagtcctttaaaattcacagaaatattaagcaatgtgttatgcattgctaagctcacttgtgctccagcacaccaagtcatccaggctctaggttgggtgatgccttcagagagttctagtccagccctccacccaagcttgaatccaccctgcagatccattcgggagatcattcccgagaccttactatgctctgaacactctggggctacagccacatataagacatgtttccttctctcacaagaatttacagtctagaggaggaatcaaatgctagacaaatacttcctgccaaggacctggggaacacagagggagcacctgtacagaaggctcttcctatgtaccttgtggggttgttggagcgagccagtgaaatgctctgtgtaaattgtcaagcccagtgtctggatcatagcaggcacccaaagatagctgttatattcctgtatagaactttgcattttacctatgaggaaactgagtcctaaagtttaaacagctttcccagagccctgtaactcatgactgagaagccaacctttctgtttcaggtcctgcttgttgggctccaaagccttggctatactgacatctaggaggccagccttattaaccttgccctgcctgtctccagactgggctcttctgcttctcccaggtctggtttcctggatcaaggcatcctactttattcatgtcctagcataacactaagattgttagtggtatacagtaactagtaacagttagctagtccctagtacagcagggtgatctgctctaattgcagccagaagtggtcatgactgatgacagtggcttgaggagtctattgctggtgcagcattctctgcctatcagcagccccacatttcttcccaacatccaggccggaagtctggaaagtaggaatggccttagcctcctggtctgtattcagctggccatcaagccatgcaaaatttccatgaagatgctgccttccgattgcttcttctccattcccatatggcccctgtaccacagttttgtctacagaagtttataagcatttgccatgagcaaagtattttgttgggttttctggttgagagccacctgagataaatgatccctggtttcaggctcatagggatagcagaataataagaatccagagctaggtgtcctctaaatgccaagagccaaggactgctctgggctcaggatctcaggatgttccagctcttattcatcataatgagagatggtcagtccctcaccacagaagactaagcaggcccagaagctcaaagtaaccagcaagtatggtctgctgtggaaatgggccagtctccactggcatcttcaccttgcctgcagaaacatttttatccccaatgtattagtttgctagggctgtcataacaaaatattaaaactagatgacttaagcatcagaattgattgtctcacagttctggaggcagaagtccaagatcaaggtgtgtcagcagggccacacttcctctgacagctctagggaaagacctgttctaggcctctttccttggcttgaggcagcagagctccaatctttacatagtgttctctctgtgtgcatgtttctgtgtccaaatttcccctttttatacagacaccaatcatattggattaagggcccaccctactccagtaagacttcatcttacctcattatatctgcaatggccctatttccaaataagatcacattatgaagtactgggagttagaatgtcaacatattaatttggaggacataattcaatccataacatcaacatgcatgtttgaagatagacttgaattactctgccatcaacattatcttcacccaagtagatgtgttccattcttctgcaagctcatttgaaagcaggagttcttttggcttttcttttctttgagggccaaatttcacccttgaaaaatgatggctctaatattcaatgtcttctgccttaaccccaaatctgcccaatagtctggagactccaggtaggacatgatggcctcacctcagaacttttcttgggaatgcctgaaccacacctgtctcctcatcctcaccctatccagggaacagaggaagaagctattaggatgagggacagactcaggcatgtccagcaacttacctggagtcactaagagtacagctcagaaacaggcacagagcttgacttcacaatgcagctcacctttggacgttccaggctgaagcccaaagttgtttctgccccttagttcatttttcctctgatttggtgagggttgtgggactcagacacctttgagcttctaaagatttcagccttttggggttgctcaatcaatatccacatactcctcttcctttcttgccaggtgcctttgatttggttcctcatttacttcctgtcatgcctagagtcaggtggcagcaaggtagatctagctccaactggcactttgagatgggcattagggatccagcagggtccatggtctgggagctaaaggtcccagataagcaagaggtcgtagataatgtaaggaggggtaaaccagtgataactctggggttactggggtgccttcagagcccagcacagagggtctttgctctctttcatatcttcttctgggtatgggtggctaagggctcccaggtgtgtacttagagcctgatgtgggaaaagagactgcccacaggcctctgtttctgtgactaaggtgtgagtacagtactcactccactccacttcctgggtccacaagtaacaaagccatagagcaacacatgtccctggaacaaccatttacttgaggacgcaggcattttttcctatattaaagcaaacatggatgtaatataaaatcgaaagttgaagacccacagatttatttgactaaactccaaattgcatgtggcagatggctttggagttcctctttatccctggattgttcatgagtgagaaacattgctgaggatttggtttctttctatcagaggcataggcttcctgggcaggtgctcatgaacattgccatgggaagatggtacacagccaggcatttggatgcaaaaggtggcttactcctgctttggacagaaaggtctgcttaagggctatttcataggcttggattcatctagagggaaagaagaaacaaagctgtgtccacaggctaatgtgctgaggttgtgagatacctttcaacttggaccaaagtcaatgtacaggcagtgatccctctccagtgtcccctccattggccctgcttcctgggtccagccagtacctgatgaagattgtggtggtgagggagtaggcagctactgcacaccagagaattgagcctttgtgtaggaagttttggccactacctcaccagtcccctttacattggctccgggtgtcacaaagggggaaggcataaaatcaatagagtggagtctttgaaagccaaagcagcattttaaaccttttttctttagggctgaatgggcagcttgcttgaagttgataggttttgtgttgccagtcctataatgagatctgagcttccatcctccagagaagctggagatgctgggcctatctggatgagggagttagtgatggccttagcagtatcagaggcctcttttttttcttcttcatttgggtgcattgtatatcatgccattttatctttactgggatgtctctagaccctcacatttgtatgaggtcactcctgaggcctcaggcttggcccctgaagcacccaagaaatatttgggtgggaattggtttttttttaaataagaaagtctgtacaaacatcaaaagttgattgaaaaaaatagtgctatgtaggaaaggtcccaaaagcagtaagaagaattgatgtccccctgcatctggaccctgaagtccttttggaatagcagttagtttcttacttgggaaaaattagattcacaggaagttgcaaacacagtaaagaggcccccctgtaccttacatctagttttccccagtggttacaactcatataacaatagtgcaatatcaaaacttggaaattgatattgctacaggtttccgtataaaaattttaaaaatttataagaaacattttctattctaaaatataaatttttatatataaatttttgatataaactttcatgtctctgggataaatgcccaggagtacagttgctgagtcatatggaagttgcatgttgagttgtgtaagacactgtcaaactgatttccaccagcagtaaatgagtgatccagtttctccacttcctcaccagcatttgatgttgtcattgttttttagcttagccactctgttaagtaggtagtggtatctcattgtggttttaaattgcatttccctaatagctaatgatgttgaacgtctttgcatgtgtttacttgccatctgtatatcctcttcagtgaaattcagtgaaatgcctcttcatatcttttgcccattttcttttctttctttcttttcttttttttttttttttttttttttgacagtctcactcctttgcccaggctggagtgcagtggtgtgatcttggctcactgcaacctccacctcatgggttcaagcgattctcctgcctcatgagtagctggaattacaggtgcacaccaccacacctggctaatttttgtatttttaatagaaatggggtttcgccatgttggccaggctggtcttgaactcctgacctcaggtgatccactcaccttggcccccaaaatggcttctgcccgttttctaattagatggtttgtcttcttactgttaagttttgatattctttatacactctagatacaagtcctttattaaacataaggtttgcaaatattttctcccagtctacagcttgacttttcattctattcacagggtctttcacagggtctttcacagagcgaaagattttatttttgatgaagtctagtttatgaatttttccttttatgggttatgcttttggtgtcacgtctaagaaagaactctttgcctagctctaaatccagaagattttctcctatttttcctaaaacttttatagttttatattttaaatttagctcaatgatcactttgagtgaatttttgtgtaaggtataaggtatagattgaagttcatgttttgcctatagatattccagaaccatgtgttgaaaaggctattattcctccactgaattgcttttgcacttttgtcaaaaatcagtttggcgtatctacgtgagtctatttctaggttctctgtccagttccaattatctgtctgtccctctgccattactgcacagtcttgattaatgtagccctataataagtctttaaatcaggtacactggttattcttctttttcacaattgtttcagcccctctacttcctttccataaaattttggaaaaatcttttttatatctacaaaaaatcttacttgaattttgataagaattggttaaacctggatgtctatttgggagaagtcaatgtctttactatgttgagttttccaatctatgaacatggtatattactccatttctttaattctttgatttctttcatcagtgttgtgtaattttcagtttatacgtcctgtacatgttttccttgatttacacgtaagtgttttttgagcaatagtatatggtattgtgttttcattccgatgtctgtgtgttcattgctagtatacaggaatgcaattaatttttatatgttgatcttgtatcctgagaatttgctgaactcatgtatgagttctagcagtttctctgtagatactttgagatttttcagatagacaatcatgtcaactgcaatcgttttacttcttcttcttccttgtttttttttttttctactttttaaaaaaaaattaggtcaaggggtacatgtgcgggtttgatatataggtaaattgcatgtcacaggggtctggtgtacaggttattttgccacccacgtaataagcatagtacctgataggtagttttttgattctcaccctcttccctccgtccaccctcaagtaggcctcagtgtctgttgttcccctctttatgtccatatgtactcgatgtttacctctgacttgtaagtgagaacatgcagtttgtggacttttgttcttttcacttaggataatgtccaccagctccatccacatttatgcaaaggaccaaaggacatgatctcctttttttttttacagctgcatggtatttcacagtgtatatatacaacattttctttatccagtctacttttgatgggcatttaggttgattccatgtatatgctattgtgaatagtgctgtgatgaacacatgcgtgtgtgtgtctttatggtagaatgatttatattcccttgggtatatacatgataatgggatggctgggtcaagtgttaattctgctttgagttctttgagaaatcactaaactgtttttgttctgtagatgtctattagttcagttagttatatattcccactagtagtgtataactatcccctttctccacaacctctgttttttttttatgttttagtaatagccattaaatgtctggggtgagatggtatctcattgtgatattgatttgcatttctctaatgattagtgatgttgagcattttctcatatgcttgtttgccacatgtatgacttcttttaaaaagtatctattcgtgtgctctgccactttttaatggggttatttttgcttgttgatttaagttccttatagattctagatattagacctttgttggatgcatagtttgagaatattttgtcccatttcgtaggttatctgttcacactgttgatagtttcttttgctgtgcagaagttccttagtttaaataggtcttatttgtcaatttttgggtttttttgcaattgcttttggcatatttgtcataaaatctttgccagagcctatatgcagaatgatatttcctaagttatcttccaggatttttatagtttgaagtattacatttaagtctttaaacctcctggagttgatttttctatatggtgtaaggaaggggtcaagtttcaatcttctgcatatggctagccacttatcccagcaccatgtactgaatatggagttctttcttcattacttgttgtcaactttgttgaagatcagatggttgtaagtgtgcaacattatttccgggctctctattatgtttcactggtctatgtgcctgttattgtaccagcatcatgctgttttgggtactgtagcattgtagtacagtttgaagtttggtaacatgatgcctccagctttgctctttttccttaggattgccttgactatttcagtttcttttaggttccatatgaattttatttttttttctaattctctgaagaatgtcattgttagtttgataggaataatattgaatctgtaaattgtttcaggcagtatggccattttaacaatattgattctttctatccatcagcatggaatgtttttccatttgtttgtgtcatttctgatttatttgagcagttttttttagctcttgttctagagatctttcacctccttggttagccatattcccaggaatttttctctttttgtagctattgtgaatgggattacatccttaattggctctcagcttggatgttgttggtgtataggaatgctactgatttttgaacattgattttatattccgaaactttgctgaagttgtttatcagatcaggtaacttttaggcaagaatatggcattttctaggaatagaataatatcgtctgcaaatggataatttggtttcctctttccctatttggatgccctttatgtatttctcttgcctgattgctcctgataggacttccaatactatgttgaatagaagtggtgagagagagcatctttgtcttgtcccagttttcaaggggaatacttccagcttctgcccatttagtatgatgttggctgtaggcttatcatagatggctcttattattttgaagtatgtcccttcaatgcctagtttgttgagattttttaacatgaaaggatattgaattttattgaaagcctttttatatctattgagatgatcatgtgggttttgtttttagttctgtttatgggatgaatcacatttattgatttgcatatgttgaaccgaccttgcatcacaaggataaagcctacttgatcatgatgaattagctttttgatgtgctgccggattcagtttgctagtattttgttgaagatttttgtatctatattcatcaagaatattggccgtaagttttcttttttgttgtgtctctgccaggttttggtatcaggatgatgttggcctcacagaatgagttatagaggattctttcctccgcagttttttgaaatgatttcagaaggagtggtaccaggaattacacatctggtggaatttgactgtgaatccatctggtcctgggcttttttctggttggtaggatttttattactgattgtatttcagaactcattattggtctgttcagggattcaatttcttcctggttcaatcttgggaggttgtatgttatcagcaatttatccatttcttctaggtttactagcttttgtgcatagaggtgttggtgtagtctcaggggattttttgtatttctgttgggtcagtgataacatgccttttgtcattttttattatatttatttggatcctctctctttttttctttattaatctatctagtggtctatctgtcttattaattctctgaaataaccaacttctggatttttcaatcttttgtatgtttttcacatcttttccctcaattcagctttgattttggttatttcttgtcttctgctagttttggggctcatttgctcttgtttctctagttactctacatctcctgtagtggcgatgttaggttgttaatttaagatctttctaactttttgatgtggacacttagtgctatgaaattccctcttaacactggtttagctgtgtcccagggattctggtatgttgtatctttgttctccttagtttcaaataatttgttgatttctcccttaatttcattatttactcagaagtcattcaggaggacgttgtttaatttccatgtaatcatatgattttgagaaatttttagcattgatttctttttttattgcactgtgatccaggaatatggttggcatgatttcagtttttttgaatgtgctgaggattgttttatgtctgattgtgtggtggattttagagtatgtgccatttgcagatgagaggaatgtatattatgttgttttggggtggagagttctgtggatatctgttaggtccatttggtcaagttctgagttcaggtcctaaatatctttgttagttttctgcctcgatgatctgtctaatactgcctgtggagagttgaagtctcccactattattgtgtggttatctaagtctctttggaggtccctaagaacttgctttatgaatctgatgctcctgtgttgggtgcatatgtatttaggatagttaggtcttcttgttgaattgaggcctttaccattatataatgctcttcttgtcttttcttatctttgttggtttaaagtctgttttgtctgaaataagaatagcaacccctggccaggcacggtggctcacatctgtaatcccagcactttgggaggccaaggcgggtggatcatgaggtcaggagttcaagaccagcctagccaagatggtgaaaccccatctctactaaaaatacaaaaaattagctgggcatggtggcaggcacctgtaatcccagctactcgggaggctgaggcaaagaattgcttgaacctgggaggtggaggttgcaatgagttgaggttgtgccacttcactccagcctgggcaacagagagagactctgtctcaaaaaaaataaaagaatagcaacccctgcttttttgtgttttttgtttgcttggtagatttttctctatcactttactttgagcctatgggtgtcgttgcatgtgatatgggtctcatgaagacagcataccattgggtctcacttctttactcaacttggcactctgtgcctttcaattggggcatgtagcctatttacattcaaggctagtattgatatgtgtgcatttgatcctgtcatcatgttgtttactggttattatacaggattttttgtgtggttgctttatagtgtcactggtctatgtacttaagagtgcttttgtaatgggtggtaacaacctttcctttccatatttagcactcccttcaggatctcttgtaaggcaagtctgctgttaatgaattcccttcacatttgctagtctgaaaaggatcttatttctccttcacttatgaagcttagtttggctataaataaaattattggttgtaaattattttctttaagaatgctgaatataggcccccaatcttttctagcatgtagggtttctgccgaatggtctgctgttagcctgatggggtttcctttgtaggtgacctgccccttttctttatctgcctttaacatgatttttttttttttcatttcgatcttggagaatgtgatgactgtgcatcttggggatggtcttcttgtgtagtattttcaggggttctctgtatttcctgaatttgaatgctggcctgtctaggtaggttggggaaattcttgtggacaatatcctgaaatatgttttccaaattgtttgctttctctccttctctttcagggatgccaatgagtcatagatgtgatctttttgtataatcctatatttctcagaggtattggtcattcttctttattgcttcctctttatttttgtctgagttatttcaaagagccagtcttcaagctctgagattctttcctgagcttggtcagtcctgctgttaatacattcagttgtatcctgaaattcattaagtgagtttttcaactctctcagatcagtttggctcttgcttaagatggccatttcgtctctcatttcctgtattgttttattgtattcctcagaatccttggattgagttttgactttttcctgaatcttgatgatcatcatttctatccatattctgaattctatttctgtcatttcagccatttcagccatttcagcctggtaaagaaccattatggggaagtagtgtggtcacttggaggtaacaagacactctggctttttgagttgccagagttcttggcctggttctttctcatctttgtgggctgaaattctttcagtctttgaagttgcattcctttgcatgttttttttttcttttttgatgtccttgggggtttgattgtgatataaggtgagttcagttggctggttttgtttctgggagattttagtggggcaaagctcagctcaggacttctgggctgtgtgttctaactctgaggggctggtatcaagtcctcagttttgttctctggcccttcaaggttagaaacctgctgtgctgaaggggctgaggtgttcctggactgctggtcacaacactgcaatggatggtgccagccaaagcactccatcggacagtagcagcaggatccatgctcattcacatgtgccagcagcagtagcagaacggcagggtgcactttctttggttggggtgggtgccggtaggtgcaggggttgccagcctccatgcagatgttcacagtgtcagcgatggcaatgtggcatggaggcagctacttcttcttttttaaaatgtgtgcattttatttcattttcttgccttattggactagctagagcttccggtattatgttgaatatcagtgtcaagagcagatagccttgccttgttgccactcttagaaggaaagcagtcagtctttaaccatgaagtgtgatgttaactgtagatttactgtaaatattctttatcaagttaaggacattcccctctgtgcctggtttttatcatgaataagtgttgaattttgttgaaggctttttctgcatcacataataggatactatgattttaattatttttttgagatgatgtagattcaaatgaagttgtaagaactaatacagatagatgctatgtactcttcagccatattcccctaatgataacatctggtgaaatgatcatacaatatcacaaatgggatattgacattgacacagtcaaaatacagaacatttcaatcaccatgggtagctctcattttgctcacatatagacatatctacttcccttccatacccactctctccttaatctctggaaaccactaatcagttctccatttctatagttttgttattttaagaatgttacataaatagaataatatagtatggaacctttggggatggtctttttttttttcacttacaatcattctctacagattcatccaggccgttgcttgtatcaactgtgtatttctttgtatcgctgagtagtcttccatagtatacatgtaccatcattgaagcattactgagttgtttccagttttttactattatgaatagtgctaccacaaacacttatgtgcaagttttgtgtcaacacaagtctttattcctctgggataaatgcccaggagtgcaattactgggtcatatagttgctggatatttagtttttaaggaaactgccaaactgttttccaatgtggcaataccattttacattcccaccagcaatgttatgagtgattcagtttctccacattcttaccagcatttggtgttgtcactatatttttacaaagatgaaattcacataacaatctgtgatatttagtacattcacaatgttatgcaaccatcacctctatctaatttctaaacatttgcatcaccataaaataaaacctcatactcattcggcagttagtcctcattcttcccctcccctcagttcgtggcaaccaccaatctgctttctgtctctatggatttacctattccagacattttatgaagatggaatcatacagtatgtaacctattatgattggcttctttcagttagcttaatgttttcaaggttcattcatgtttcagcatgttatcagtacttcgttccctttatggctgaataatattccactgtgtggatataccaaaattttgtttatctgtttattaattgatgtacattcggtatgtttccacttttggtgctgctaagaacatttgtgcaaaagtatttgtttgagtccttattttcaattcctttgggtatataccgaggagtggaattgtggggtcaaatggtaattctatgtttaactttttgagagaccgccaaactgtttttgatagcaggtgcaacattttaaattcccaccagcaatgtatgagggttccaatttcttcaccttctcaccaacacttgttattttcttcttttttaattatagccattctagtgggtgggaagtggtatgctgtggtttcggttgtcatttttctgatgactaataatgttgaacatcattacatatgcttgttggccatttatatatcttctttgggaataaatctatttaagtcctttgcctgttttttattgtgttgtcttttttattgttgcattttaggtgttatgtgtatattctagagactaggttttaattagccatatgatttgcaaatgttttctcccattccgtaggtcttttcattttcttgataacgtcctttgatgcccaaaagtttttatgaagtccaatttatctattttgttgttgttgttcatgttcttagggtcataaagttccattgcgaaattcaaggtcatgaagatttacttctatgttttcttttaagagttttacagttttaactcctatgtttaggttgttgatcagttttgagctgaattttgtatatgatataaggtaggagtccaacttcattcttttctctgtggatatccagttgtcacactaccatttgttgaagactaatctttgcctcattgagtggtgttggcaccctggttgaaaatcaattggccatagattaatgggtttaggggccaggcatggtggctcacgcctgtaatcccagcactttgggaggctgaggctagcgaatcacttgaggtcaggagttccagaccaacctggccaatgtggcaaaacaccgtctctaccaaaaatacaaaaattagccgggcatggtgtagtctcagctacctgggtgcctgtaatcccagctccccaggaagctgaggcaggagaatcgcttgacctgggaggtggaggttgcagtgagcctagatcgaaccactgctctccagcctgggagacagagcaagactctgtcttaaaaaaaaaaaatggatttatttctgaattctcaagcctatttcattggtctatatgtctatacttataccagtgctacattgttttgattactattgctttgtggtaagtcttaaaatcaggacgtgagtcttcttgtttttcaatattgttttgaggtgatcacatgatttttagtctttgcctgttaacatagcatattatggtaatatggtggtatgtatgattaacatggattgacttttgcatattgaactacccttgcacaccaagaataaactcaacttgatcatggtatataaatcttttttataaattgctgaaactttcttaaggatttttgtgtctatattcatgggaaatattggtctgcagggttttttttttttcttgcttgtacagtgtttgtctttgctgtcaaggtaatacaatgagttgggaggtgtttcctcttctcttttctgtaggatattatgtagaattggtgctaattcttctttaaacaactaatataattctttagtgaggtcatctgggcttaaagttttcatttcagatttttaaattatgaatttgatttctttcataattatatagccattcagattatttcatattgggtaaattttggcagtttgtgcttttataatgattggtccattttatctaagtttccaaatttatatgtgtattcatagtagtagtcccttattatccttttcatgtctgcagtctatagtaacatctcccttttcaatcagagtattggtaatttgcatcttccctttttcctttgtcagtcttgctagagattggtacattttattaattttatgaaagaactagatttgtattgggtttctctattgtttttctctctttaatattattattaatattaaattattatttatttaataattaataatatttaatatttaatataatatttattaaatttaaaatattatttattaaatataatattattatttattattaaaataatttaataaaaattattaaatataaaataatataatataatatttaatataaatattaatatttaataatttaataattaataataataaaaatattattaatattatgtttattgatacaaatatttgtacatcttcatgcggtacatatgatattttgttaaatgcatagactgtgaaagtatcaagttagggtacttggggtgtccattatcgctaatatttatcatttctatgtgttgggaacattgcaagtcctctctcctagctatttagaaatatacaatacattgttgttagctatggtcaccatatactctgctatcaaactgtcttcagtattattgatttttattattattttcttccttctgcttgctttgggtttattttattcttattcttgtaggttccttaagtggaagcttatattattaattttagattttccctcatttctaacacaaaaatttagttttatacattatcatctcagcacagctttacctgtgtcccacaaattttgatacattgtattttcactttaattcagttcaatgtaatttttatttcttttaagacctcgttaacccatgaatttgtttcaaagtatgctttttaatttctaagtgtttgtagattttcaagttgtctctctgttattgttttccaatttgattccatcatagagaaaacatcatttattatttgaattcttttaatattttgtggattgttttatcaccaaaaatatgtctatattggtatatatttcttgggtgtttgaagtaatgtaaattatattcttttcaggtggagcaatctatacattttatttaggccttattgaaacctgttgttgggctcttatacatcttgctgattttctgtgtagttgttctatcagttgttgagagagggtgttgaagtccccatctataaaggtgaatttttctatttctccgttcagttctaaaaacgtttgcttcctatatttgcaggtcttctgtttaaagcatacacatttaaaagtactatgtcttgttggtggattgacactttcagcattatgtaatgtccctatctgtcgctggtatttttttttttttttgctctgaagtctactttatctaatatcactagagccacctctgttactttttaaaattaatatttgcatggtgtatctttttccattattttactttcagcctttctaaatcattatatctgaggtgagcatcttgcaacagcatatcattggatcatgttatcttctttgccaatctctgtcttttaattggtatgtttagaccattttcatttattgtatttattgataaattagtgcttagttctgccaatttatttttgttttctgtttgttctctggttttttgtttttctattttcttttttctgacttcctgtgggttactcaaacaatgtttagaattccatttggttcatgtatagcatttttgaatctatctttttgtatagcatttttagggatcactctaggtattacattatatatatgcataacataataatctactggtgtcaacattttgccagtttcagtgaagtatagaaaccctacctctcctttcacccctttactttcctctatttataatgtaattgtgttaaatattccttccacatacatttacagacacatcagacaatgttataatcgatgatttaaccttcaaacataatttggaaaactcaagaggagaaggaaagtccattatatttacccataattttttctctttccattggtctttattcccttctaatgttcaatatcctttcttttatcatttcctttctgcttagagaattttctttagatattctctttgtagaggcatattgttgactaattttgttagtgtctcttgatctgagaatgtcttgatctccctttcatatctgaagcatattttcactgagtatagggttctgggttgacagttctctttattcagcatttgaaaaatattatgctacttccttctggaatccatggtttatgaacaaaaattcactctcattcaagttatttttcttctataggtatcatttctctttcactgtattcaaggcttttctcttcatgtttcagaagttttgttgttacaggtcttggagtggatttctttatatttatactgtttgaggttcactcagcttcttaaatttccagatgtatgtcttttgtcaaatttggggagttttcagcaattatgtctttgaatacttttttttttttttttttggtctcattctctttctcatctccttctggaattccagtgacatgaaagttagatcttttgtttgtaattctgtatgtccctgagtctatgtttacttttttttccaggatatcttctctctgttgttcagattgatcatttctttttattttattttattttattttattattattatactttaagttttagggtacatgtgcacaatgtgcaggttagttacatatgtatacatgtgccatgctggtgtgctgcacccattaactcgtcatttagcattaggtatatctcctaatgctatccctcctccctcccccctccccccaccccacaacagtccccagagtgtgatgtttctattgttctatcttaattctttcctctgttcttaccattatcctcttgatttgattcactgaatttatttccattattgtatttttcatttctaaaatttccatttggttcttttttatatgttctgtttctctgctgagaattctgattactttgctgagactttctatatttttttcatttgcttccaagcatggttgtaattgttggttgaagcactttaatgattacttctttaaaatccttgtcaggcagttctgacatctgtgtcatcttgctgttggcatctgccgataatattttccattccatttgatatcttactggttcttggtctgacaagtgctttgctactgaaacttgggcattttggatattgcattataagactggatcttatttaaattttctgttttagctgacttcctctgacactgctctggcagggaaggcgggcaccatcttattcttcattgacatcagggaggatggagctcctcattactgctggacaggggtgaggattccaactccctactaggcttttactgatactactctagtgcggatagggaagggcacctcattactgctatgtgggggtggagtctaggctcctcatttggcttttgttgatggaatataatgggactgcattttcttctatggtgtttggctggagtagagcagttattgtctaaaagttttctgtcttgctaggttacctctttcctggtcttttggctagaaagagcaggcttttgttggggcttctttgttagtgcccattggcattctgggtttctggcttcttcagctccaagtctggtatatatgaggcagaaacaaaatccagagaactcgccactgcatcattgctcaggtcccaaggtccctaaccagtatacttttttctttccaccttttaatgtcttattatgtttgttttatatataatgcccagaggttttagtgatactcagtgagagaatggggaaaagtacttctccatatttccagaggcagaggtttagacttgagattttagaggctgatgctgtactgccaaggaggtttatgggaagtagagctgtccttatatattaatgtcttagtggagctcttatttcatgtctacatcatgaaaaacaaaaagaaatgaaactttacctgggtttgcatatgtctgcttatctgtcactggaggagtagccatgatcataacctgctcagtcagtttcctttacatcagtgcaccagggtttcatgagccccctttcaatatctgttgctcccttcctgtgtctgtcaggctttgaactgttagctcacttggctgtatcctaacagtgccacagttggtggctgcttcttctatgaaccataaggcttactctagtagagctgaagaggccctaagccatcacctaatttagccaccatgttttcatataaggaaattgcatctcagagaacagaggaagttttcctggatctcactgcatatcacacaaaagcaaatccagacgtaggacccagatatcatacttgtaggcccagtgttattttagtcacatgaagctgctcctccatccacccctctaccttccagtgaactttgttctttcctctggtcaaggactgtcattttatcccagccaactgtctcacaaaaatgcccctcattcttgggggtgggggtgctcaatgagggtggtgggtgggaggaagggaaaaggaatgtggctgactccacacaaacctgtcttcagagtgaaagtctgtgattcacggggtcagtggtctcatcttcatatctgaaagacagtgtactttttgtctccctaagccctgtgtctaggtcgtttgggaaacgccttggagagtcaagaataaatttgcaggtcaaacaatggatgactggaaaagtcggcttgtaatcaagagcatgcttccccatttcgccatggtgggaaatcgtcaggagcccagaaagctccaggaatcggtcagacaatgggccatggggggaggggggtatttaatgcttctaatcttaaacttgaacgtaagatgtgttattgaaattttctgtgcaaacttggtggcagggatccaactcaaaatataaggaattcaaatgtgatctagaagagatctaggagatgagctgatcccaccccttgtgggtttctagaagagctggaaatatagtctaaggttccatatagcctcccagtctagtagtgatcactgcattgcacccattcaataagaaaaatgaggaaggatgagagagggaagacgagtttactttttctcttaatagaagccagtcagaatggcaagcactagatatattgcatgagcttcctagtatgactgagaacaaaaagctagtgagtaggcacagagaggtcttcccattcaactttctggccctgttgtccttttagaaactcatctgacacacttctactttcctccctgggaactcagacatcatccaagtgttctgaacctcaggattagggattccagtggtagttctaggagcaggatgatgatagaagggactatgagagccattgactagtttaatttgacaataaaagcctgcaacaccaccaatctaccaagattagctctgttagcaggaattgcagcaaacacaatagctgttatctcagggtattagggccacagaggagtggcttgcttaatctctggaattaatagagcagagaggaaatggctcttatagagccgtgggtcggcttccttccttttcatagaactggaagccctgggctctgaggtaatgccatttcacataactagagggcctgtcttctccaattcccagggcaatccactttcagcaagtcagctttcaatttattttaaaattctgatatgtgcacagatgtggatggaggtgattgaaatcttgttttctctttgtttcctcattgtcaaccaccaacaatgtattgagaatgtgctatcaagttgagcatgtagacatttacaaaactgtttactgcactccccagctctcacagagattgcagtcaggtgggatggcagagatggagacattacttggccagcagcctgtccaaattgccaggccttaggcctcttctagaaagaaatctctaacctccatcctaattaccctttatatttcatgcttctcttttatgatcaacaattgagtcagtaaagaaaaacctgataatgctcccagagtccgtgatcagttttagcatgactttaaatttctcttttatttcccacttgtttccattcacttgggccaaattgtagaagaaagtgttgatggattgtggatgcaggggtcctcttccccttctccccaactccatcaacactcttaaaaagtgtggccagtaagtaactgctttggttttgatcagtgtacagttgaatgcacagattccagtgggggttgtccttagaataggtccttggagtggccatctgtgcatttactctggaaaagttgtcattgcttacgtcatttccaggcttggcttctctttgcagatggcctttagagccctttgtaagctttgccaaaaattcacattcattgctttagagtcacactttggatttgatcaagatcagccctctgcctcctctatgccacaccttgttctctgaaagagttctctgttggttctgagtggcttgactctttctaaaacttcaagctgtcctagaagaccaagaattcaccccagttgaggagaacaaagaattttaaaaatttgcctcagcctccaaaagcaactctctcagatggtcttcttcacagttgaaacagcattggatgacattgagagagcccactcctttggctggacgtgacaggtgctgctgtacggtatccctgtagcctcagaaaggtacccagtgctaatatgaaactctgctgcacatgctgaggatctcagcatctgggtgcttgtgaactgaggttgaccaaataaaagcagaatggcctgtgagtccaccaagaaacctgcagtccaaacaagttattgtaaggcctggaaggtgagtggccaaaggaggtcctttgcaagagctgggcttgcatttccagggtgtagccttagctggatctcagatgtttcccttgtttgctctccttctgacacttaataacacccagggatgacaccctgaaccctagtcccaggaaaccatgtgcatctggaagcacgtttcttgcaccactctccctcatcctgaaaacatcgctaacagagatttgcttcaggcattcagcttaactggttctcttgttctttcctagaaaacaaacaaacaaacaaaaaacatgtttcaaatcaatcttgaaataaaatgatatcagtcccagaggagagttctcttttagcagtccttgaatttacatggaaataattgtgagctcccttgaaggaaaacgtgcatctcacgtaacagttgttcttggcctaagactagggctcagaacacctgggttctagtcttgcagctactcctcactagctatggggctttgtctatcctttgccctccctgagaacaaagttcaaatgaacgaaaagtaagaataaccacctttaattcagcattgactaggtgctaggcactttactaagcatttttggggcattatctcctgtaatcctcatgataaccctgggaagaagaagctattattatctccaggaaaccgagactcagagagattaagcaatttgaccaaagtcacagatataagaagtggcaaactcagaggccaatgtcatcaccactatactctaatgcacattgaaaactacaaaatgctgaatacatatcaggcaggggccatcaccataagaaatctcagtaatgcaagtaccttttcagcatctgttcattcatttaatagtgtgactggttaatgactctggcgatctggggaacagaagagtttgaccttttgaacatttgggcatctacccaaggttaataaggcatccagtctctgcacttagtgtatggagttttaacaggaggcagaacattttgtccttccctttgaagttaagatcacgattctttccctagatccctagatcagtaggtcaaaggattgctagtgtgagaatttaaaaggcattagtactccaatttgagagtgctccagagcctgcatggagttgagactcagtgcgcatgtcacatgccatctctgtctcagtccataccccaccataagtggcaaagattcctccagctcggagcaggtacctattcccttcataaggcagctcctagacaaaatgagggtgcaaagggcatgaaatgttcagttggaggaggaaggggacacagtactttttgcacatcttctgtgttcagccatttaatattaagaagcgactcactctatagattacaatgggatgccgtgcccagtatttcttctgagcttcccaaccagtcagtggttgggcagggtggggggattattattattctccttctttatggataaagagaataaagtctgagaaattcagtgactttcagaaggatggccatccagaaggtggggtgctacatcaaggtccacatttggatggccccaagggcagtgtgctttccatctacaatacgatgaaaaacaacccctcagcccatatctttctcacctctaaatgcaagtagggctgaagacgggggagagaggagccctcagtgtaacagcgtatgtggacatttggatggctgcaaaaatactggcctcattctatccatcccttttctttagactggtgaccttagacatatccagtaggaggagctctagtcacctcctccctttgtgtttatgtgacggggttcaagatttgcgcccatcagctttggaggcatatacttcttgcagaaaaagtgctggactcaggaaggagtcctcagactcgattcagggttggaacaagctctttgtgagattttgagcaggtttctttcttcttgaggtcagagggcatgggtatgagctctaagggcctgtctatctctggcctcctgccacatttccagggtcccttctgtgtgcctggccctgtgctcgatcttgagccccaggaattcatagtctaggggcaaattattcccaggcttcctccactgggaacaaatctatcttactctgtagttctcggtgaaacctggaggcaagtgtttgagcgtctctcttgtgcaaggtactttgtgcacattcgctcatttgcttctgtgtcacagagattgatatttccacttccccagggtggagactgaggctcagaaaggatggagactttcccaatgtcacacaggcaggaagttgtagatctcaaactcaggtgccctgcctccaaagctcttcctactcctattcccagattaggagctcaggtatttccagggccttctgcaggccaggcactgttctcagtgcctttcattccagtggcagagacagcccataaacaggtaaagagtagaagcaaacttacttcattctggtagctctctgggatgttctgaccagcgttgtccactgccaagcctggcagaaagctaggctgctttaaaaccctatgcaggggcagccagctgggaacagagtgagttgtcgaaacagctcccttagaagcctcaagagaaaacccagatttacagctttgagtctttgccagcagcccctgcttcatgcaggctgaaggcgcggcacaggtgcaaatctggccccaagagaggggagctcatgtttatgggtccccttccaagacccaggtgatcctaggggctagttaatctagaggcaactgtccctgccacttactgataacttgcatgagcctctgggcctcagtatccacatcagtaaagtagggttaataactctgctctttgcctgcgtcagggtttctgggatggtgatgaacaaggtgtggttgtgcacgtgttccaaaccacacagggcatgatcctaaaccacacactgctgtgagcacttttttttaatgatcagaggttggcattggctcagaggttttttgccatcagaagagtgatggaaaatgtgtgtcctgacccctgaggatgccacagtctcatcagcagccccactacactgaggagacctgaatctgtaatgtagctgtgagcattctgggtcaagggctgcagtgtgtatgcgcctttctactttggggatcctccccatggagcacgcagctgttcgctccctttgctccctcctcctttttctgcagtaagggctccttcctgttccagacacccaactggggtgagaagccaggcagaggccttgccttcacacagacctttttttgcaagaactgagcactgctcagcttgcaggacaccactgggcttggcatctgggtcctgcctgggtagcctggcttggtaaaccagtgacctgcaaatcacagtctgtttgaagggagagtgctggtgaggggagctccatttttcagctggtttatgcaggcacctgggagcatgacactgcctatttctaaacttttaggagcccatgctggcctcatctgcattcctgcctagctctttcccacagtttccttgacataaggcccaaggtaacaggtttctggaggtggaactgccccaggaaggagagggatgctgttagactccaggacagagttgaggctcagaagtgtgcacatttctagggagtatgcagacccaggggccagccctgtgggtgtgggcctggggttcctcaaactctgggctggcctgtgtaggctgaggcctcttgcttttactgggaatccacagctggaaagcccaatgtttctctttttacagatagatatttgggttataagctacccctggagtgctgcattccagacttctggggaggagggacatgagcttctaagatttgggcaacaaattttgatttccgcagttgatatagaataatttgttggaaaccttcctcctccccttttgcttttcctttccctccccttccttcctgcctttcccttctcctcctcatctccctcctaccttctcaccagatctccaacccctaaattccaaagttagaaaggcaagcatcagccacagggaagtggatttgaccactgggcactcaaacccaaggcgcaggcatgtctctgctgtcattgcctccctctctcttgctccgggccccctcagcacaggcctgtctttgtctgcctccctccagtgctgcaggcttccatcaccctctcaagtccccatccagaggcagggctggcataggtgctcgcttgctcactcactgccctgaccctgagagctcctgcttctatgcccctagagctgtggctgagtatatggcacatagtaaatgctcagtaagatgcagctgctgttcatcttggccagaagtcccttagaaatcatctaggccacccacattgctggacacaagagaaggccagtgtcatacagaggggaaggggtgcaattaaaaagtcattgtctctaggccttacacaggaaatgggaaaataacagagttatttgcagagtaccattttctccaatggttcattcacatccgcagatgccagctgagccctgtcacgaggctttggggttaccaagatgaataggaaactacctggccttcagagagttatgtggtggaggtgggaaatgcatagacctaacatggcagcctcaaggttggccatagcacctaggatggtgatggaaagggtagaaggtgagactgtattatcatagagacccttgagggcctgagggtggagggtgtgctttaatccactagcccatgcaaattgttcaacaatgtacaagactataagaacaaggcccaagggtatcctggaggggatgatgtttctctcctctcttttttttttcttttattattatactttaagttttagggtacatgtgcacattgtgcaggttagttacatatgtatacatgtgccacactggtgcgctgcacccactaacttgtcatctagcattaggtatatctcccaatgctatccctcccccctccccccaccccacaacagtccccagaatgtgatgttccccttcccgtgtccatgtgatctcattgttcaattcccacctatgagtgagaatatgcggtgtttggttttttgttcttgcgatagtttactgagaatgatgatttccaatttcatccatgtccctacaaaggactggaagcttcggagcacctgagaacgggcgcacaatgagaagtgaaacaacttttgggactgctggatcacttgcacggtttagaaatggtcaccttacttgcactacggaagaaatctttacgtttttctgctccagaaaggttgcccacccactcttctgtgaataatgggcctacatggccccctgcaatgtgaggagggcaacttggaaagaacttatttccctccaagaagatgctcagttcatgctctaggtcagaggttggcaaactacagcctgtgagctaaatccagcccacgggctgtttttgtaaataaacttttattagcacacagtcacgcccagtcattaacatattgtctactacacagagcttcaacagagaccacatggcctgcgaagcctgagacatttactacctgggccatcacagaagaagtttgccaacacttggtctgtatcactgggcatttggttcatttgtttaccctaacaaatggtacccatttcaggtagaattacaggccctcatgcggccacgtgtttagcttcccctcctgtgccaaagctggccccaactccacactcccaattccacccttctcaaaagttcttgcccctaaaagtgtttcttttccttccatttctcctcccatcagcatccagagagaactttttcaaagagatgaagccaatccttcctctgcttaagtcccccgatggcttccctacaaacaaaatacaatccaatccctttcccatagcctgcaagaccctctgcaaattcacgactacttccctggtgcattgtgtgacaggcacactggctgcctgcccgtcactggaacagtccaaaagccccaccccagggccttcccacttgctgccctcctgcctgggatgctctgcccccagtccttctcctggcctgctcagagccacctgccattctatcacatcactattttttcagtctttgaaagaatactgcacacactcttaacttgttcttgttgttcacttaccgtttgtcctactagaattccagctccttctctctggttccccacttctctccctggcctgtgctcattctaatggaagtgtcagttctgggccccctaggcagccctgcctgccctttactgtcatatgacttcatctctatagtggaggggagcccagtgccactctgtaggtgcttctttcctagaataagcttcaggccctaaagttgtctagccttagggctgcccatgtgatgctgtcagcaaaactaaacatgttcttgcctcttttcctccctcaagtcaagcccttagagtttagaacaatgaacttggcctatataaaatacctccaggaaatcagtcctcaaacaccaactcccaacatctgctttctgaatatatggcttcaaacagctaagtgtacagtatctaactgctgtccatccttttgttttttttagccacatgacatctaaggaacttagaaaatgccttgccctttcctgtagttaaatttgacataaaattactttattggcagcatattaacaaacaaaaatctcctgtgtttttcccggtaattcagtttcagttttccaggtaagaaaaagataattttgaatgactacaaggagacagactgttttgaggtttctgttaataacacattcagagtgtgccttcttcctctgtcccagtcagtggtgctgttgacagagtggtacaacaagaatgaaatatactgtgggaactcaccctgatcccaacaccctcatcaacaccatcaccaccatcactattgctaccagcaccaccacctccaccaccactaccctcaccttcactaccaccaccctttaaatcaacaccattaccaccatcaccatggctaccaccatcccaccatcccaattgccaccaccacatccaccaccattaccaccaccaccatcatcactaccacccttacctccgtcattaccacctccatcacctctaccattaccatgattactatcgccatcccctctaccaccaccaccctaccacttctctctctatctctctctcatgtacacgtacatggttatatgacacttcatgatgcaatcatagacactgtccacatacacacatacagtgaaataagtacatgtttttaaattgtcattattttcaatatagaacctactcttgttgctatgtgctttggggtggggaacatcaacgtgtgtttatggccaaaattgaattaggattcataagaaagggctatatctccaaatgcgcacttttaaaaaagttaagtttggatgagggatctttcatttcataaaaggatatactgaggatttcctttcagtgacaaatttttgctgcattttattttgatttggtttacaaaagttagcctttcacacagctgttcaggagcgcagccaatgactaaaggcagatctgccttgaatagcaaatgctgctgagtaaaccatgttacaggctattttaggaccaccaagaatgtgtttgcattttcaagagtagaaggagagatcatatttatttggtatctacactatgccacacactatgctaattacatttctaagctcatgtaatccttacaacaaatttacgaaggctttactttccccattttgtaggtaagaaaacaggctcacagagggaaaaatgacttgcccaaggtgaccaccaattagagacaaggtttaaacagaccatgagggctcagggcctacctcaagccctctaatcaccctacactgctaagttcttctattagaatttgttgtgcagaaggttttcttcttcttcttcttcttttttttttttttgtataatcagattatccatttgcctacaaagcctatagtgtgcaaggagtgtgtagtggtccagtcagtgtaccctggcacttgagagctcattaagggcccaggagaatcagcaaattctcagcagccaagctaccctaacgtatatcatagaaactacaataggagatttcttctctgaggtcactgctatctggcactatcctgtgatgtatggtttggaaaaccgtgggtcaaatacaaccgtccctacaggcaagtcaaaatatcgtggctgaaactaaaagtgattttttatcctcagtctaagtgtgaagagctgaagtgatctgcctttcctttagcaccccagaattacctctgggttcattcggggaaggctggcttactgctgaggtgtccacacatctaccactatacatgcctggggttcttgggggttctgttacctgggctgaactctggagtcctgagtgccaagctcttctctgccactatctatatgacttttagtaagccacctgcaactccttcacctcagtttacccatgtgtaaatcagggaccccaagcaaagccctgcctacctcctaggattcttgttagaatcaaaggctgatgaatgagaaagtacactgtccactgaaagggcctgggattttataaaggcctgtagttggtaacaccaagacttggatctgaaggtctagaaaagcacaacatcctgagactctgtgtggatccctttagcctactgtgagtgcttatgtcatgtcatgaacatgatataccccccatacagccctaaaaagtctttgctactagaagccgcatcctgtatgtgtataaaaatacagaaccaacctcccaggtacacacccgttgcacaggcagtctctgctgagtcattgtgcagacacgtctcttgctgcttctggccatgttgttcccagaaatggctctagagggatttcccgcatggctgaatagatggggagcatacgaggagctcaccttttcagggttccagatatacagctgggccggaggggctgggaggcagaagagtgggtgcagcagagtaggcttgtggaagacaaagccttcagaaaagtttcttgcccgaggcaaatgcagtccatgctagatggtacattcccagccaggaagagagtgcaatgtcctctccaactcaaatggcagtgaccagtgggtctccccaaactctgccataggacattagggctttaccaagcactgtccaggttgcagttttagatgggaaagggcacttggccttgagaaggtacagaagccaactccctggtcaccgcatttgttcatgctttttcccttggccctcagcctctggatgccatcatttggcctggagataggaaaagtgttgcctacatctgcctctggtactagcaaagggcatggtacagtgtggtgcagaccagcagcaggaacagaaaggtgcttctctaaggaagctgcagagatttctctgccagtctggagatcagctttgggtcccagctctccctgctactcttccatatacctccaatgatgcaagtttccaagaagaccaaggctgtgaaaaacagtgtggtggttcctcaagaagttagttcaacataaaattacaccatgacctagcaattccactccttggtatacacccaaaagaaccgaaaacaagtgttcaacaaaaacttgtatgcaaatgttcacagcaacactattcacaatagccaaaagacagaaacaacccaaatgtccatcagatgaatggactgaccaagtgtggcacgtccacacaatggaatattatttggccacaaaaggaacggagtactgaggcatgccacaacatggatgagcccagaaaacatgatgccgggtgaaagaagccaggcacaaaacgccacatattgtatgatcccatttatatgaagtattcagaataagcaaattcatagagacagagggtagataaatgtgttgccaggagctgggggtttccatttgggatgatgaaaaagttctggaactagatagtggtgatagttgcacaacattgtgaatgtcctaaatgctaccgaattgtacacttttaaaaagttaatttcatgctatgtctattttacctcaatttaaaaagagaggacctagaccatgggaagagtctttggactgactccttatcccatgttccctccaagtttcagctgctctgatgccaagactctcatggcatcagagctcaccagcctggctctaaatctactaagtggggtcgatatctctgcaggctaaaagttggcactcaggagctaaaatgtgcttattcaataagcatgtgacccctctgctaagctacataggcatgttctggacataaattgttttaaatgtggccattgatagcagcatctctctttggtgtgtcctagcaggaagaggtcatagacaggatgcccctctagaaggttctgaactaatcaggtgtctctggaatcttctcccacctacatagcagttgaatttctcaagcagggaaatattctgcatggtctgaagcttgttgccattttatttagcctactgttggggcacagagagaggtaaggtcacctctggcctaagcttcaaagttcatccctcaagccttctaagacccggtacctaattttgttttaattttatattctgtttcataaagagggccccagattataaaagcttcagtcccaaaactagagacccaaacacctcactataggaaagaaggctctgattaaccagcagctgttttttttctttctctttattctttccagctctattgaggtataagtgacaaattaaaaatgtatatttaaggtatacagtgtgatgatttgatatacatatatattgtgaaatgattaccacaatcaagttagtcaatgcatccatccataacttcatctagttatatttgtttctgaactcatagaactgttttaaaatcatagaaacagtagaaggctggttaccaagagttgcagggggtggggtgtgaaatggggagatgtcagtcaatgggtacaaattctcagttataggatgcataaatttgggcaatctaatgtacagcactgtggctatatttaataatgctgtattgcatatttgaaatttactgtgagagcagatcttaaatgttcttatagcaactatttttctatttgccccatttaaactactctagttggtgtcctggcaatgaggaggactgtcaccttgtttcctgaccttgccactgcaatccaaatggggtctgtttttatcatgccaggaaaggagggggaggctgcgtgggttcagcaggggtgtctcctgactgcgccttccaggcagtctgtcactgtgtgttcccccaggaggccctggaccaaaggccttttcatctcagtaccccaatttctaacctcataaggttacactgaagatgaaaggaattgatgtagttaacagggctgaagcagaggcttggtaactagttgctcttgttatttcctctgcttgtagaggaagttggtatagtctctctctctctctctctttctctagctctggctctccttcaaccattgccctatcatctgaatggcaccttggcccatttcctccaagccccacttctgcttgaggacagggctctggaggctgacaaacccaagttcactccctggttccaccactttttagccagccaaatgcccttaagcaagtgacactccctgtcttcaactgggcaccctcatctgtacaatgagggtgggggtgatcacattagtactgactttcttgagtcactgggaacattaaggtaaagcctaaaatgcatttggaactgtacctgtcacttagtaagtattccaaagtcactcttgaagtctacttataaatcaggtctcccttactaaaacaaaaggaaatggagaaagagaagaaaggagaaagatgggaataagaaaggaagagagggagggatggagggagggagggagggaggaaggaaggaagacaggcaggcaagactctttaatctttgctccttgttctctctagccactcacactcaagttccagcccccaccaatttggagatgattccctgataaacctctaaactgcaggcatctctgttcttcatttctaagatgaggatgataatgggaatatctttctcatagagttgtgaagataactatgtgaatgcatacaaagtgcttagtaccacaatagtcatttgtgtcttgtgattccaggagttttgggcagaggattgtgtgccctggtcagggtgcccacaggcaaggttgccactgatctgatggggccaatccaacaggcatggagcccagaaacaggcttccatgtccaatcccatgtcctgctcttgggaaggctttcccactccgaaccacaaaaccactgggtttatctgggccactctgatgaaagtcacattcccctgaacaaagatcctcaccacaagggcacctgggtcatcctgctctgtgaagcactgaaagagtgaggcagaaaatggagtgactacttccagaaatggaatcacctcaagtcatatcaattctcttgggaagagccccttgggtttgtatagttctttaaagtctgagggacagtggagaggcaggtcccaaggagtgctaatgcagaagtaacatactatggcagcctggcatgggtcagatcataaggggggccagccagggcgtggaggcaggactggcagggcctggcagtaagaagagatattgctactgcattcacacagtcccaatcagaagtcttagagattatctgtagagagagctgtggctaccccatatagtacgtgacttccacacagcccaaactaccctaattaataatgacccagaagctgattgtttctagctctcagattagcagtggctccttattgccccagcttagctctaccagatgtcctgtccctgaaatgtaccagtagcccctctaaaaacccacttggctcatcagggcccagtccagggccctccccacctatcccattcctaatcccatcagcattagcgagaagcctgccactgcctcagggacctcgcatctggagactcagccaagatggtggcacctgtgagaggatccacaggtagccaagtccaggtagccagaggccaggtggcaatggggaagagcataagtgacccctgtccaatatgccctcatcagccaaatctggggcctcagtttgggctttgtggtgtgaaggtaccacccgccaaatgggcctggagccaccagcatagctgccctccttctccctgggtggccctggaggtgccacacttgcagcattcctgggtggtccttctgtgcatgggctgtaggtggaggtgtggaaagctgaagacagggtcaggcacagcccagggcagcctagagatatttacatcatgatgatgggattagacagcccactcgcttgtgcggtatctggacgccactggcttgcagagcatttgggggttactgcttgagagtgttttccactggtcttgtcactccctaggtgaaggaaagtctggcttttgtaggaactgcctgggtctctggtggagtatttccttcctcacctctggattattctgcctctttagagcattctagaaaaggggtgttttctcggttcattggccacacggcatggctgcatcctggtgacattttcccagcatcagatggttggagactgcaatgaggaggctccacacaattcatagccttcagccaggccccttgctgaagtgctgcatgggacggagaagaccaaaccaattggagagggactcgatggaagccacacatggagttttgtgttgttgtccagtacttactgtggttgccctgctcccattgacctggacgatccatgttaccatctgcccctcctcccaaaaaagggaagcttcctgttcttggagttggcactaggagccaccctcagtggcttaaacagatttcttttaactatgaggtagtgcactagatgaaccagactacaggagatgccagctctgtagccatcatttcacaatgcagccatacctaagagcctaggacaggccatacccggtgggcggagcagggatgggccacagctggaggactgaaagtgggatctcagcctcagttacagaggcactccctgatggccaggcagcaatcctgtggagggctttgtcatcagaaaataggagcccatcatctctggaaggttggaagcaccatggtgagatgggatgtgtgtccaagagttaaactggtctggagttctcttttaacaccatcatcacaccccttcatttaatctatgctggactttgaccataaaaaaccaaacttgaaattgggatccctgcaccgactggtgaggcacataggagagggttggtttgggttccatatgactgacataaagcagagcaaatattggcttgggacccaaaccaaccctctcttaggcttgttaaggccccattcaggatagttccctggaggtggttggagagctggcagcctttctggtgactggtgacctggtagtactctctaatagaatatgtcaataagcacagctcatttgaccagaattgtaggccgcctttctcgatccaacaggtgcagacctgctactctcaggattcactttgctagtctcccgcactccacaccggatcccacagtctatgttcaagtaatcccctatttaaatgtcatagatatatttggggaggctcataatttgattcaagtaacagtctgatctgtgcctctcactgagctggtgcaggtaatactttctttaagagtgtgtgcaagtggctctcctcagcctactctcacccccagggaaagaagccctcgtggatggaggaagaagatttatcttttctctacaagagcagcccaggaagaaagcatcaggtaagcataagcttaccaaagctgggacccattcactttacagtggggaaactgaggccccgagtgtgaaagggacctacaagaggtcacaccacaaggtcctttaagagaggcagagcccagggagaagtgagaaggttgggcttaaatgatctctgcccggtggccctggtggcctccaacctcggttctgcctccacttctccctttgcctgtgtgattttgggcttgttagccaaatttaggtgaaatgtagattaagcttgtgaacctgggtccagcagaagtggagtcatctggattgggacagggccctctcctttgacctttagcttctattacagctacctcaggcagcacctacttcctctatagatcaacctcaccaaatccatccagatgtttctcttctccccacagtaatcatctctatcccactaatgacagaacctgggaatgtgtttggggaagactgggtgaggatttcttcctgtgaaaacagagtacaggcctcaccaggcttaacatgagtgggtgtgagcagcccgtcttgaagggcccagcagttctgacggtctaggagttagaggctagctctcaacaaatgcttgttcaatggcagaataccttgattcttctcaggagatggtacaatacaaattctgagctcattaaattcatatacatctataggttgaggatcatccttagagctgtcagttcttccaactggcatgtctacactacagaaaaggagaaagtagttctagaacactgcccacccaggtttgctcatctctgcctttgtcagtgcacttccagccactccaggctgctgctcagatagttctggcagaagcctgttgaagccccagccctcaggtcagggtggctaaaggctgatgactgtggcagccttcagagtggcaggtggtggcaagcagcaggaggcaggagtttccaggctcagccaccaagacagcatccctggctgtcaggtcagtgctgtcaggtcagtgctgtcaggactaagctgcttgcctccccctacttccactccatccccctatcctagtgaatgcatccttatttgtaagaaagcaacagaggcccaacacgaagacacagggccttgagaatgatatcagtagtgattactgctccccaagtgctctcctcagtgagtacaatggaacctttcactaatgctgtgaagcacacatggtgggccaagtacccattttacagaagaagaaattgagcttcagggaggggagtggcttgcccacagccacacaacaaacggaggagctaggacttaactgcaggtcttctcatgtgcattccagggccccttcctccaccgcagcctgcatctgcctgcatcgagtgctggttcagggcgaatcagggacaccaataaatccccgatttgtaggtcgaggttcttgctccaaaccacccattatcagagatttgctcctgagacataactgactcctcttgaagccaatcagcattagcattcagggttccctgccattcccaaccaccctggtattctccagagcctcatgtcttgcaattctggaaatgctcaaaatcctgtttgttctacagaaagatcagtttcagtttgctgggacattctgctgaaaataaacatgtaaataacacatccccaaatacaggcattgatactatacacacggatattcctttgatcccatgtgcaaatgcaaacatattcattctgtctttctctcctcctcgctctcactctctctctttctctccatcccccatctctttgtctcttcaaacccattcctgatacattattttcttatctattctacagctacctccatcatgccccacgacatcttcattactttcttctgagatagtctactgggggccatccttgtcctcagagggcttgaagtctaatttagttggccaacatcaggtgcctcaaaattcatagggggaaaatgtaacaatattgaataaagttgttcatggagtatggatgtaagggaagagactaggagaactggctagcaaattggcctgaactgaactggtgaggcactagtgaagaaagagcagactaaataaaccacaggcgattttcacctttttgacaattttgcccagggcctacaagcccagtgccctctggagggaaaataagtctccctgagtttatctttcctggttacctttgacctcctatcttcttgcccaataggaacagtgcataccctttgctgacctttttattggtgtccatgttaaacctccaactacagtgtccaaaatcaagcatttataacagcctgccagacttctttggataagttatattctttactctccttatgctcatttcatggactgtattcgtataatctctaccttctctaagaaatttttccccttttttgtcattctggactagaactatagaaagggaagagttgccatatgtcattgttcagacagaaccagaaataatgttgacttcagagctgaacttgtctctatcagaagagaaacctttgttttctcattatctagggggtggggaggccatcacatgccttgaaatgcattttaatgaatgtttataaggtcatggggatcacattggtggctttgtctgccggattctgaaatgggactctgcaggcatttatgtatggagagaaaggaattcgtttctaaaagatgccagggcactgtcactcactccctcccccttcctcaccaccaaaggccgggcctgtgagggctctggctgggagttgggacgtctggggtccagtgtccttttaactaattgtctgaaagcaaatcgagatatgctctgaggaaatcctgccagtggctactgattgtcacagggagaggcctgaaagaagtaggagctgtgggacagctaggactaataccctgctgtcatcaagaccgcagagactggagaaaagcacatgggtgaagcagggagattcatttagaaagggctgggagcttggttggggaccttccgcccctaccaggattctgggaggggaggtcattccggagcagtgagctatctcctgcccttgatctaaaatggtggctgtgggatttagtcagaaacacccagtctgggcaggcaaaacctcagcggcatcagccacaggcacaggtgacccagtgaaggcacgagtgtggcactgggcacaggggaaagcccagccaacttctcgcagttgagatgagtaacagatcatgggactgtgaaagagaagacacgaaagcaagtctttatctaggggcaaaattaactggataatagatttccacgcctcactgatgtctggtgaaggcagacgctattacagcaaggctgagccttccgtgtaaacacagccgcctctcctcggccttgtttagggttggctggtgttcttgctgttcagccagggcacttcaggctcactgttgaaagctcattccatgaaatccaaaacatggagctgcatggcctctgacaaagtgagttctcactgaagtccattgaaaaatgaaagctcagaagaggcttgcagcttgccactctgccaaaacagcagcctctatcggcaccccaaaccccacccctgagaaaagccaggtgagcctgccccctttattaggcatccttatgaaagtcagtgagtgtacatgccagcagctgtccagccacagacttggcatagcaaaagtggcatccgctccagcagtggcggcctgctgggatctactttgttattgagtagtcagttggtttctagaattggaattgatcagggaccatttgcttgggatgcagttgatgagtgctggaaaaggtgtgtgtatacgggctctcatgtaggagaggtgcagcctccttccctttgccagtggccccagctggtacctttagtgtctggtggtcatgccctgcctcctccatccctgcaccttactcccagcaggttagtggcagaccaacaattaagtgaaagctctgggagcccatagaagctgccagcaaatttcagaggctcacgtggcagggatgccagaccattgcccctcacagccccttccctcccttcctttccccaacccccaccccctccttggcctgcctggttctgcattgcttcgccattgttaaaactgtcttgcagttcgagacatcatggacagcactttgggcctgactgttgccagctcagactccctgcaggggatccttatgtcaaatccacatgcaatcatccctgattgatctatttcatacatttctatttttaacctattggattctttgggagaatgtagaagagacacaatttcagtttgggacccagtggcttgtttgtaggttactccataatggattgagtaaatggctgagctccctgtgtgttgggtaatttatgttcctttgtccattgattcgttcaactgccatttactgagcacctgctgtgggccaaacagttagtgagctgctccatggaccagctcagggacactatgggtgctgtgcccagtcagactcctgggaaagtgggcactgatgactgcatgggcctcagccctcttattgtgcctgctctacacctctccaacccattcctgcctgacccatggtattcaggcctcagatgagtttggtgacagagctgtcccttgaagtgcccttgttcagattgtgggcatctcaaaagaaaagtcaaagaagtgtgcaagtcctctcactcaagttggcaagccccttctgtgggggcgatgcagtgtcctaccaacaacatggcgaaggcagtgggtctggaggcagctgagtggtggtggaggggccctgcatctgacctgggccttgttgccctctggctgagcaactctgggtaaggcctgcccctctctgggtctcagagacctctctgtctttaagaagggtattggactcccagaacccttccatacctgccctttataatgccgggtaccagttagtgaggagctattaggtgtcatacaatgtgccccgtttcacttaatagtcagagcaccttcatgagaaaagaactataattacactcattttacacataaagaaactggggctctgagaggttcagtggcaaggccaaggtcagagccctatgccacgctgcctccacccttgctctgggccagtggttttctgttgagaatcagccatggagctgttggaaaaactcccgatgcctgggccacaccctggatgaagctgtcagtttgtggtgggagggcccaggaatgtggatgtttctaagtgattctgatgtgcaccaaggcctgagacatacagccctggggatctgctttgatgttcacttggccatgacagtcatgcccctcatcgtgctggcaagtggccccatgcatgccttgagctcctagtgggctacaagctcatcaaaccagaagagccaaacttaaggtgacatcagaggatgagcactgtatgtcctagtgaaacttccaaagctggaaaggggttatttggggggtaccgggtgggggaagctttaaaagaattctacctgttcacctatcggcattcaggtgatttccagatccctctcttcctttccttattttgatcattcctgcacatactcctttgcccccacttcctttcccatttacctgctaacatacaggtcatggtcattaacacaacagcgatggatgactgtatgaagccatgaagagtaggaagtctcacattgctagtgactttgctttgttcccaaaggctgtgcttctataaatgatgggcagctcccccaaggttcagatcccagattggggccttttctcattgtttaatatctccccaacctgaggatgcatcttcagaggaaaatttcttatttagataactttatacttttttaaatttttggattatgagtcgttctcgttaaagacaaacaagcagaaatgaagagaatagaaagggaattgccagtcatcccaaataaatgaccactccaaattgttgggtataggttcttccaaattatttttgtgtacacatagcaatgtgtgagagtgtgtgtgtgtgtgtgtgtgtgtgtgtaaaaataaatggaacaatgaatacgatgcctacaatgactgttctgaaacttgtgctttcccaaaaacagtattttaaacagctccccaagaaaacacatccagatctacttctttcctgtaagggctctgttgtattcaattttaccactgcagcctgatgcatttaaccaagactagaaggcagcctaaaagttcaattctatactatggtattccttcgttaaaatctatgtgtctgtagacaggaaagaattaaaactatttagctacttctagttttctctccaatgcctgcctttggcagcatggttcatttagtgacttctgcatagttttgttgaactctccttgaagtgggcagattaccctttgcataacgttctatcccgttttagtatacagacaacataatgccttatttgaaatgtaattagacagtttagatgaaacataataatgaataaataagcactatggttccaaagacaggctgtattttatagttttcacaactataagtctttaaactgagaggtctgttttatcatgcacatttcctgttcattagctttaatgtgccaaacctttataaaaattcctctctctctctctctctctttctctctgtctctctctctctctctctctgtgtgtgtgtgtgtgtgtgtgtgtgtgtgtcacctctcttcccttctcctctcctctcttctcctcttctcttctcttccattcacagggaactgttaagaggagacaagaagaagaccacttccagtttccagacatggctgatgggggctaccctaataaaattaagaggccttgccttgaagatgtcacccttgcaatgggcccaggtgctcatcctagtactgcttgtgcagaactgcaggtccctccattgacaataaatcctagccctgcggctatgggagtggctggccagtcattactgctggagaataaccctatgaatggcaacatcatgggctcaccatttgtagtaccacagactacagaagtgggactgaaagggcccactgttccttactatgagaaaatcaacagcgtgccggctgtagaccaggagcttcaagagctgctagaggagctcaccaaaattcaagacccttctccaaatgagctagatcttgagaagatactggggacgaagccagaagagccactggttttagatcatccccaggcaaccctaagcacaactcccaagccttcggttcagatgtcacacttggagagcctggcttccagcaaggagtttgcttctagttgcagccaagttactggcatgtcacttcagatcccatcctcctccacagggatcagctattcgattccttccaccagtaagcagatagtgtcaccgagttcttcaatggcacagtccaagagccaggtccaggccatgctccctgtcgctctgccccccttaccagtgcctcagtggcatcacgcccaccagctgaaggcgttggcagccagcaagcaggggtctgctacaaagcagcaagggcccacccccagttggtctggtctgcctcctccaggactctctccaccttaccgcccagtgccatcaccacacccaccaccgctgccactgccaccaccaccacccccattcagcccccagagcctcatggtgtcctgcatgtcgtccaataccttgtcgggtagcactctccgaggctctcccaatgccttactgtcaagcatgacgtccagcagcaatgctgccctggggcccgccatgccctatgctcctgagaagctccccagccctgctctcactcaacagccgcagttcggccctcagagctccattcttgccaacctcatgtcctctaccatcaaaacccctcaaggacacctgatgtctgctctgcctgccagcaaccctgggccgtccccaccctatcgcccagagaagctctctagcccaggcttgccacagcagtccttcaccccacagtgttccctgatccgaagcctcactcccaccagtaatcttctaagccagcaacagcagcagcagcagcagcagcagcaagcaaatgtgatctttaagcccataagcagcaactcatccaaaaccctgagcatgatcatgcagcaggggatggcaagctccagcccaggagccacggagccatttacttttggcaacaccaagcccttgtcccattttgtttctgagccgggtccccagaagatgccctccatgcctaccacctctaggcagccttccctgctccactacctgcagcagccgacaccaacgcaggcctcctcagccactgcctcctccacggccactgccaccttgcagctgcagcagcagcagcagcaacagcagcagcagcctgaccattcttcattccttctgcagcagatgatgcagcaaccccagcgttttcagcgatcagtggcctcagattccatgcctgctctgcccagacaggtaagacaatctcatatctggctgtgttcttttgttttggaagtaacaactgtgtttcatgttgccaatatctggctctggagggtaaatccaggctatagttctctctgagactggaaaagactctgaaaaagtctactgaagtcagctaatcctgtgtggttaaaagcacagtgttaataaggccaaggttatggtttcagtgcctgttcaagtcacctaacttccctagaaggagagctgcacccacaaggtgctcccggtggaaggagccaggtgggacaagtccgaatacagaaatgccttccctgcactgggccatgtagaaagactagtgaatccttcttaagatgtaaggaaattgcactgaagcatttaatcttatccctgctggcagaaggacaaacactgagccttctagaaatgccacagcaaacttttgctgagcaacctcagcatgccatttgtcactgtgctggatactcagtcaggtcgtgaaaggaaaaagacaggtatttgcaaggtagtcactctcatcatctccattttacaaatgaagaaactgaggctcagagagttgaaagacttgcccagagtcacatagttcgcaagggacagagcaggaacttgaagccaggtggtctcactccagagcctgtgctcttcttgaaattacttttgacttctcaccctccctcatctcctccaggcttttcaatcatgaaatgcagctgattccacctgggtcgtgtctatcacagttcccagttttcatttctgtgacccctgcctgtattagttatctgtggctgcataacaaattaccccaagcaccagcttcgaaccatatgcatacgttaccaccacatcctgatttctgggtgttaggaatcctggcatggtttaactgagtcttctggctgagtatctcctaaggctgcagtcatctcaaggctcagtggggaaggatctgcttccaagcccactcatgtggttgctggcaggaagcagttccttgcaggttgttggactgaggcctcggtttctcatgagctattggccagaggcctccctcagttccttgccacacggtctcttcacagagcatctcacaacatggcagctggcttcatctgagtgagcatgagagagtgtgccagtgaagcagggtaatggggagagagggaggagggatagtgccagcaagtcagaagtcacagtctctatgacctggtctagaaagtaacatcccaccacttttgctgtattctattcatgagatgtaagccagaggagattgcatgagggtgtaaataccaggaggcagggttcagtggggccaggtcacacatgtgcctacacagaatactcagtcaccatctaccatccctccttcccattcctctcatccttgcccaagttcaggtcctcttgattctttatctgaactcatacagttgacccttaactggtctctcccaataaaccatccattgctctgagtcgtcttgctaaaacagtgacctgatcatgttttacacttgctcagaagtccccagaggcccataagctggccccaccagcctcctgggcccttcagcatccatcaggccctgccttgcactttgtttctattacccagaagtgcctgcagcacttggcccacgccatctggtctcagcctttactctggccgttccctgggcctggtcatcccttcccacattttctctcctgtccaacacctgcagctacttagggctcaggcaccatccctccaggaagcttttccatgactgtcctcagtacttccatttcccactgtgcctccctcttctggagagtggtcaaggaggagattataaagtgcttggccagagacctggcccaagggaagcacctgtcaagggctgacctcttatttaagagctctgtatgagcacacctgtggcaacccctagagtacagaggttgtgtcttttccatccaggtttcctggagcataaccatgcagagtgcttgacaccagggagttggtcgtttgatagaccatgcggcaagcagagctcccatgggggtggccgggggagcggtgtggagataggcaaagcacataggacacggcaggccacctggggctcgggccctggtctgcagttcaggagcactttggtttgattttattatagggctgttgccatctgtttgcatggacttctgcagctagctcggtgaagccccagcatcaacacgggaactctttcactagcaggcaagatcctcagcctggagacgtgtcaccgtctaacattgtgagcctttctgttttgttttgtcttcaattgggtacatttttgtagactgattgtgttgtcccagagctggatcagctggctcagagggagaattcttaattattggggtcatgcaaatcatacccaaccaattacctaggtggggttggagaaagtgttcaggagaaagaccgaacagtcaagctccctggggctaggagcacaataaagggggcaagcgacttttgccagcagaggcaagaagctgggtccccaaattggaaatgctattgccaccaagagctgcctttccagcccatgctggcctgtgcccaggggccaggcatgggacctggtgcttcacctgcctcttctcattttaatcctcagaggcaggggctgttaccattctcctgagagttggggggaaaggcacagagaagtgaccgaagttgcccacagtcacacagcaagctggggccagagcagacaatctggctacagagcccacactcatactcccatgcatggggcactgcctctgtagccttctgtttccactgtcacctcttaactgtttcctcctctacaaatcaaggtgatgataggttgtctgaggactaagtgtgttaatacatctaaagcactttgaacagggcctggcataaagtatgtgctgacaagggatttgctgtcacgatgactctacctcctgaccctgtgctcccagatctgtttcatgggactaagatgtggttctaaaaaccagtagctgtggcaggacagacacaagccacgctatctccagaccctgtacccaccatgagattgataggagttgtgcagcctctgagccttgtgggctccttttgctctaggccctgcctctcctggacaactcccagcctgatgggaaaggggaaaggggaaaggtccatccctgctttgcagactggggatctcactttgctctttcttgagctctccggcactctcactccgctcctctccctagcactctgttctctacctggtattcttccaggcctccaagctgggggaatctcaacagtccttctgtttcttcttatggcctctccctattaactctaagacctaagaactcagccctggtcattcttccaggggagagaaaaaaataaagaaaaaagcgagtgtttgaggcaagagctgggaccgctgtagaaggacagatggtggccccaatggtggggaagaacatatttcccacttccagcaggctaagcaaacctcccaagttttactgatggccaagctgagcctcaggaacactaattacctatgatatggcatttactagcctgttacatttgccgtggacgataatggttaccatggaaaaactggacattcatttgaatctggatctttgaggttttgtgcggggggtgggggcttttttggtttttgtctgttcatttctttagaggcagggtctcactatattgcccagtctggtctcaaactcctgggctcaagtgatcctcccacctcagcctcccaaagcactgagattacaggcaggaaccaccgcacctggtctagatcttagttttctaaaggagttatttttaaatgtgagatgagacacaaacgcttgagtaagctgaaaagccaaatccagccttctatagaggagctcatttttatgtacagaccagcatctctctatttggaggattttgctttaccagttgagtgaactattcaatttcaatgcaccattcatgtccacgtaaggtaaaaggcaaatgccacatgactttggggcagctgtttagcatgggaggttgagcaagcaagggcactggaggcagacagaactgaggctcaagtctggctacagatgctgactgattcaggtcccatgagcaatgttactcaactcctgagcctcagctgaaaatggggaaaggaatagtccccttcacatagggcattgggaaggcaaaggagatgctaacctgaaactgcttagaacggtgcccagcacacactacaggctcaatcagggctagggcagccttgtgggcttggacctgaaacctccggggcctgatgaatttccaaattcagaacatttgggactttgggaaggtaatgtggtgcaaataccaaatgtcacacaaccctccagtgtaatctgaagcagtgtttcattacttttgcagagaaatatgaatatttaaggaagtccagagtcaacttttgcccccacataaaatttggcaccaaatttacaaaagtaaaattggctttcagagcttcttggactttaaattacagataagggatgtggacctggaattattaagggagggatctttaactctttatggagttgcaacacccagcactggtttgtcagattttaatgaccccaaattgcgtcactgaattccccaccctccctccaggctgggtgatatatcttgatgtttaatcagactgaggcaaaatgaattttgtttgcatcatctgatgtcccttctccctgcagattactggagataccttggcgtgttgcaaaaatcgcggttaggacttacttcagtttcactattcacgactgcagaacagatcttacatttactcaaagacacaaacaagtatgtcaaggagatgggagttggactgtggaagactggggatagcaagaggcagcctctggccagagtgccctcagtgcacgtgcatttgagccccactcagatctgcagagctgggagtgtggtttcatggggaggagggatgtggatggaggccagttggaataagaacaaaaaaaagcctggaatctgatccttgaggcaggctgtgcagcacagagggaagagggcagctgtggagaaatagaccaaggaggcacatgatgttgttttgacaaatatggagagggtagagaagggggaatcaaacctgccttggagaaggctggattaagcccctactgggtctgatatgctttctatcttaaggataagctttagcttaggcagtcgtgagcaccaggcaattgcagaggcagtgaactcaccatcttccctttctgaggggttgggcctatgaagaggatctgggcagctccctctaaagtggggccttggggaagcccccactatccccacctgtggcctctctcacccctggtagactgaaccctccgaagtgcagtacttccagcacccagggcctgaagatagatggcacagggcgggggacacaggggccttaccctggggccttggcaggggacaggccctggggctgggctcaaggccaagttcaagaaagctcagactttggatcacttgggtccaaatcccagttctgccaccttttccgcggggcaagcgatttaccctctccaggcttcagtctgtaaaatggagattagcatacctttctcatggggctgctgtgaggattaaatgagatgaggtaacagcgcttggcatagggcctggtacacaattatgctccattgatattagctgtcactctcaggaaagttcccgaaacccagaacaccagtaacccaatggaatgaatttagtcagcctcggctcagcatccaggctcctctctgacccccaggggtggacggtgacttggagagaaagggcaggggagagctcagtccctctggggctgcgtgctcacggacagtcccttaggggcgttaaggaagacttttgccaggtggctgaggagcagccaaggcagcagacacaggttggtgactccagaaggaagtagagccgccaagccaggctgtggtttcctgagtgcccctgaccgtgggtaggggagaatgttgtcttctcttccctctaagcacggccagctgaacttctaggagttacgtggatgctgaataacaaatgcaaccacaggacgactttaggtgggcagagaggagggggaaggaggagctaagttccacctgcagccagcgtggatctgaccccacctgcttgcagcaggctcaggggtgcctgacatttcaagactcaggcagagggcttactgatacacagtgacaatgaacagggcggaaagcgtgtacatgagtggccaggaaggaaagctggtcctgcatagtcatggcgcacagagcacgcatcctgaggggatacctcccctctctcctctcgtttccgtccttcttctgcaccactgactctcactcctaaagcctccaaaaagaatctttgcagaaacccaagattccttttggtttgaacttccaaggctacactagcccactcagtagggcataacctttaattactgctgtctcaattagctctgcaaattaaattctttatatttgaaccatgacttttcatggaaaacaaaaaggaacaaaccaggttagtgaggccaagagaatttccgattctgatcaaagttacatctgctccatttacaactagagtcaggagaggcagagacagcaagtgagccttttcctagtctcagaatcactcattaacattttcaaaaagtaattattatattactaaaatacatgacctccaccccaaaatcagatccaccacatattttcaaggaagggcctgtcaccttggacttacaggtcttctccctcacttccctgcattcctctctcgttttgagagtaaggcttgcgggagagcaatactgctgtctgtgttctcagagaaattttgtcttttactaattctggcgagaaacatcacagattttatttcaaaggttagtcctgctaaaatgcaagaacagaagcctctagaggaatctctgtgttgtccaccagtcaaatgataagtaaggaagtgcctccacttgccagataaaggactggggaccaggcagatttcaaagagcccgtgggtcagagccggggcctgccctgtgcgtattctctggcagacaaggaaatgttttcctgaatgagcattcttattttgtatttaaacatgatggtacatacaagcttagttttaccattctttctaaattaagctgcaaagagctgtttggtttcgggaaactttttcttagctgttttgtgtggaactatgattagacaccgtgtaacatgcattttgaaaattcggggaccgatatctcagtgttgaaaatgttttgttttaacctctctaaattgccaggaaatgaaaccacatgggctgttgaatttgggaaacacaggcttagaacttggtattaatcttaccaagaatcaaaaaaaagtttttttttcagtttctttttcggtttctaagggccattagtgatcctccacctcaaagctatttttctttttcaaaaagcggaaatttaaaatgagctgcttgttaaatgctaaccttttaaatgtcaacattttttttctattaaaagttaaagaataagtgagacgacactttcaaatgaaggtgactttacattgttcccctggaggaatgagccatcagttagtgtggtcaaccccaaaacttacggggatgcacaaggccgcctacttaagatgcatcagtagtagagatcaatagatacaatttttttcattgcttagtaactggcttatgaaagctgaagaggcaatcattttcagaaacctcctgtcaagttttttgttttgttttttgtttgttttgtcttaacatatctgaagagaaacaaggaaacttgctgaagttaggacacccaaaatgagcccttttaaaaatgaagtgcacaaattattttatgctaagttaattaagacaacctacttatttgtcactgtaaagcaaggcaaggaatctcattgcgcttttcaaagaacgtaagaggacagaaataaatcattgtgtcgtgctgctttaagctgtatctccttatgaatacctacaaacccaaaacacagaacaccatatggagcgagcagtccagttttgcgcacacaacaaacatgaaagagaagtgctgtcgctctactactactatgtccccaggtgaaaagttcgcaaaatgtaaacaagatctagagcagatgaaactcacggtagacttgctccattcagctgtggccctaacacctacagccagcactgtcactgagtgcaggagtggatggtgcagagcgccaaggggaatcaaagacgtgacccttccatccaggtgagcaaaggatgagtactcagagggctggactgcaccctcccctccccatcctgtgcttctgactctcagatccacttctgactctcacttccagcttctgactctcagatccactcatggtcccatatcgtggatttatggaatcctttcccgagtctatttgtacttttagcctgttctgtcccttagggattgacaaatcccacgatctgggcctgccctgtaaaacaactatgtggggcctgacctggctgctttttagcttgaaggggatagcagagggtagaatgctggttacatttaaagcaccctgctcccagatccaaaagaaagtttctgctttttcctaaggagttgaaacagtctgggattttatctgattttgttattttgcctacaatgacaaacactgcttttgtttgttttatcatgttgtgttttttgctagatgagtgtttatcatgccggctgcacccatccaaagcagtaaggttgttgaaagccaaaagcagcagaaaggcccaaagagatcaccccacctcacccacaggctcacctctgcaggtgtcttcagacagctgactcttaactctcatctcagcaacagtttctaagatagagagtggaataaagagtcagcattcatccatttcttcgatgttttctcctttaccccatgtgaaccaagtttcttggtaacgtgcagctaggactcacacagacgaaaagcacagagccacaggccttggctgggttattggagctaggtgcacaggaaaaataaaagtgggtgctccaggacattatatatatagtcctgggctaaaggtggccttcagggcctgaaagatggatagctgtacctcactaggaattatcccacctcttgctttgcttgtgggagctttcagtttgcagctaaaggctcaggttccggccagctttttcccctgtagcatgctaccaaatccggccatcttccagttttgagcagaggaggtgagcgtagctgtggagacacatattcttctgcaggcccatgtcggggtggcccatgaagagaatttgccaaagccagctggctcagcagaccaacagatgaaggtggactactcatttgcaattgtgattaatgatcatttatttccatgtgacaaagctttgaacgatgtgggaggccctcacccatccctgagtgggaataactgggaatgattccatgaccctttccctttatctggcaatcctttcaaagatgagctctggaaaatgtgaacagacaatgcactccactatagctttctagtttcacatcttcaaacaccaaaatgttgacacccattgggatggttattataaacacatacacacagagagagaaaataacaagtgatggtgaggatgtggagaaattggaacccttgtgcattgttggtgggaatgtgaaatagtgcagccactgtggaaaaaagtacggcagttcctcaaaaaattacacagagaaataccgtatgatccagtgattccacttctgggtatatgcctaaaagaatcgaaagcaaggctggacacagtggctcacacctgtaatcgcagcactttgagaagccgaggtgggaggatcgcttgaggccaggagttcaatgccagcctgggcaacatagtgagatcccacctttacaaaaaattacaaaaattaaccaggcatggtggcgttgcctgcagtttcagctactccggaggctgaggtgggaggattgcttgagaccaggaggttgaagctgcagtgagctgtgatcactgccctgcactccagcctgggtgacatagagagaccccatctcaaaaaataaaaaaaaagaaagaaagaaagagagaaagaaagaaagaaaaagaaagagagaaagaaagaaagaaagagagacagagacagagacagagaaagtaagaaagaaagaaaaaagaaagaaagaaagaaaaaagaaagaaagaaagaaagaaagaaagaaagaaagaaagaaagaaagaaagaaagaaagaaagaaagaattgaaagcaggggctcaaccagttatctgttcatagcagttttgttcacaatagtcaaaagagagagacaacccaaatgtccatcagctggtaaataaattaaaaaaatgcagcatgcccatacaatagaatattattcagccttaaaaaggaaggaaattctgacatgtgctataacatggatgatcactgaaggcattaagctaagtgaaacaagccagccaccaaaggacaaatattgtatcattccactcatgtgaggtccctagagtagtccaattcatggagaaaggcagatagaactgtgagtgacaggggctaggggagggaggaaattaggagtgcatgtttaatggggacagagtttcagtacaggaaaatgaaaaagttctggagatggatggtggtgatagttgcacaacactgtgagtgcacttaatgccactgaattgcacacttaaaaattgttaaaatggtacattttatacatatttttaccacaatgaaaaagtaaaggctgcaattttaaaacacttgctagtcctctcctaatcaaaagcagtcttttcttttgcaataatattagtgtacaatctaaaagaagcagcaagctgaactgctcattttccatccctggtaagagcagtatttactgcacatccactcatcatgttgtatgggccatctgggttttttgtatgtcttactgaggtgcatgtttgttaaatgcacaggcataaccagaaataactttcctggaaaattgagcataatggctgtccctctcttgacattttggagaaatgataatacgtaggtgggggaaacaaagaagtgactgtaaacaagaacggacattatctctgcttctgaatgagatgagaaacccacttgcttcattagctctctggtatatctgcaagtctggaaacaccgggatgactcacagtttgctgagtaatacaggagccgacagaatgctgctagtgactcgccatctctgactggctttctgtgcaaactgtcactctagagcaagtgctaggccttggaatagagttctgaaaaaggttacggttctcaactacagggagaaccagctcctaaggccttgacactggtacacaaagtaggacacctctgaccaatgccaaaatgacttttagaaagttcacacctggtcattgtgtccctgctcatgctccagctcacaagatctctggtttctgcctttcagggtgtggtgatgtccacttcttcatcagagttctttgtgacttgtctgcttctccacttggtagtaaactcctcaggcataggaagacgtcttcgctagctctgtaatgtaagctgaatgatccttggaatgaatgagtagaatatagaggggaatgaaccaatgaatgagctgtatctgctagccattgcggaatgctaagttttggaaactgttttgagcattttagaggaagtattgatagacactctcagtcttcaaggcttggaggccgatgaacccatattcttgcactgggcagaaaggagaactttgcatctgcatgtagggcccatttacccactgaccatgatgcatttctctggtccagttaagctccttatccttctatagcacttgtgcaatgtctgaaaacatgtgatttcttcaacttccaacaagtacacaattttataccgccagtggtaatttgtcctggtggttctgttgtttctgctgttgttgttgttgtcgtcatttaatgcaatttacaaggacaaaacaaaacttctggctgccatttcacataccacagtgacagcttcacatggtaagaaaagccaaaaacagctagtttcgaaattcaggccactcattttattacttttccctgattaagattcattcataccactttggggtggtgctgatattcctaacataagccaatcgattttggtcagttctgagagcagtgagtggtcttcacttacacacagtgtgtttgtaactctgctatttctttatgactagcacagtataaagtgaacgtttttggaaggctgttaagcatatgttctcctggtaggcttaaatgtgacttataaaaatacttgatagtatatgaacaagctcccactactggtttaaaccaaaaaaaagaggtttattttactagttcataagcacagattctacattctttgtgagaattatctttttaggtttttgtttttatttgttcttatcattttgatagccattttaatcatttcttttattcttttgtttgctttgttgacttttaatttggaaatgtctgctttggcagaataattacatcacaaggaggccctttccccacccacctacccagaaaggtctcctgactcccttatgctctatgaattgccctagttcaagattgatacagatcaaagcagcagaatggggttgaaagagcagcctctggcaatggccttgaccatgtcaattccctgtgcattcatatagatctggaatcatgtagatctattctgcccagcttgttccacagcagctggtgggcagaaccactcttccaagccgtgtagttattctgcactgcaagaggcaagattacaaccgaggactcattcattaataaaattgtttaagttggctttctgaatgacaacgtggtctcaggaacttaaaagacttcaccaagtccctgctgcaaacaaaaagtctgcattgtgatttgtcagagctagattgacatccagtttagagtttagaatccttctccatgccccacttttgagacaaattacaaatcttgaggttcatcaacattctagtacaatatgaccccccaaggtttaagagccctttagagatttgaagacaactgtgatgttcccactaactctccctccttcccccagttctttgcccctatcttggctgctggcctctgaactcatcacagagcactggagtgagggcctctgggtaagtaaggctctgctaaactgatcaaatgctccacgtacatttgtcccagtagagaggaaagctcctcttttccaaacaatctactttattcctgctcccctacatcccacttgcaagggtagcagccacatcccccatctgtcctgcccgagctcattgtccaagccaactccagctcagaaatttcccccagagaagaggttcctgaaggctaagcattgctctgtaaccctgaacttgatttatgtctatttctcactctctcattatataaagtttttcaaataatattagactaggaattgagaaagagaatgagctctcacaattgtttctagagccatcacaatcctacccagcaacaccttttacgggcttttaatttttttgtttacagttattacctttgaaaccaaatcttgactttctggtatgctcttggactttttaagggatttaaaaattcaggagtttgatgccaataattgcttttatgagctagcattgcttcttttctatagatgaatcccattttaaatcatcaattattttcttcacagaaacccacaaagtacatattctagtttgcatcagaattgaatatgacccagaaattcttaatgttattaagctagactattgtatctaaaatgtgtatcacattcaactaatgcatattgaagatcttgagtaccacacttgagatctgaatgaagagcccaggattgtgatatttgatccatactgaatgtatttgctagagtgcattgtacagatggttcaggtgtgttagatttgtctctgtaaatgaattggtcagtagataaaagaacatgactcaaggctgagcagggttcagcaggccccaagcttcatcattaaaaatcgggtgttttttaatatgaggctggctgtgtaaagcagacctcatgaactcaggggtctgagaggccaggccagattatcagttgggatgttttcagtcccaattagcagacagcgcagttcacactggcttaaacaataaaggggacttactgattcctgaaagttaaagtccagcggttgggtggacttcagggttggtttgaatcaacagttcctcagtgtcatcaaagatgctgtttctttctggctgtctactctgccttcagtggcatgagcctcatcctaaggctggctcccccttgtgggcacaagatagtgccagcaactccagaggctacaaatttcctcctgccccattcagagagcaggagaatggcttctagaatctctgtcagaagagccaggaagcttctttcccagaagcccccccagatttcatgctttttagtctgaatggatccaacgcctactagcctactgtgctgcttcatgtcagctgtgtcccccgctagaaccttgtgtggagccaggttcctcctaagcacagaggtggtatgggccaaacgaagctgcctaaatgaaaatggggaaaggtgtcaagagaaggaagacttagtgctggcaaccaacagtatttgttgcaatcaatctcttggccatcctcattcatacacaccttccttcccacgcatacacctcccaaaatgcccacacttagggaaaacctatttacccctttcccaaagggatccaactccaatccggaaaccctaggtgatgtgtcatcctctgaatttggtcagtatatagctcttcatgtttcagggaccactggtcaccatgctcaccttggcatagaaagtaagagtgcaataaaaagaaaaaaaaatttcaattgggaaagaggaagttggaaagcagcacacggtggtcactgatccatcatccatatcacatcctgctggacagcagtagcaaggcttgaccaggggtcagactcagtttcctattctgtataatgagaggattggattaaattagtggttctcacattggaatgtggcctggagagcttgttaaaatgcagattactgggttccatccccagagtttctgactccacagatacaggtggggccctggaatttgcatttgtaatagatttccaggggctgctgctgctgctgctgctgctagtacaaggacacccctgcccttccactttgagaacctctgatttagattatccttatgggcccttctgattctgacatttaggactcagggatttttcttagctatctcttctgctctatactgacttatgatggattgttttataaatgggacacacccaactctactgtgtgaacaacttaaaaacatatcatggaattcctgctttggtttgtaatctaattttcaacaattgaggctgaaaatgaaggacaccttacagcttcaggaaagtaaattttctggaattgaagaaattagaaacagaaagataaaggctttcccatcctccccaaccccatctactacagcacagcggtctgtgggatgattccacgtgactgcagaaagcagctcttttcccaaggacatccaacattttgcaagcattctccctatgtgacccgggtattcattgggtcttagaataggagtagcactgggtgaagctgtgacatagatcaagttggtttaggaattttgccaactttcttccccagggcccctcacctggccaacatctattcatcctcaggtcacagcttaaacctcatgtcctccaaggagcctcctctaaccaacgccccaccccagcctaagtcaggttctcctgttctttgttctctagtgtcctacaatgttcctttatagcacttaccagcctttgttaaaaatcctcactgacgtgctccaccatctgccttgtccatcaatgttttcacaacacaggtcctggatcactgtaaatgctcagtaaatgtgtgttgcacaagtgctatcaaaggcagactgggagcagattccagtcacagtattttattacagtggtgaactatcaagcaatctatataacacatcccacagtgtatgattatgcatgctccaaaggaatgaaacataagtcttcagaagacacaaacacacagctggagagtcccagtgtccctggcatctacagccaactttttcatggccctcccccttctctctgggaagctggtgccttccagtgcccaaggtatctctctaccaggcaccctgggcattggcccagctccctcttcccccatgcccatttgggttgttgattgacacttaggtgaagacaatagaagaccctccagcttacagagtgcccaactcagcagggcctggagagctaatctgggtcaacaccacatttttcccctgagaaagtgggagtccagcaaggctgtaaaatgatgagctccaaataacagcctgagtctcctgacttctggctgcatcttgaatgcatctgcaggcagcttcaaatgtgagaataagatatgaacttatgacactctatagtttatcaccattgctataattctctgccactaaatataattttaccattaaatcaaaccaaaccaaacacttaaaataatttctttagagaagccagattatttattacaaataacgtctacaaactgactaaaagtatatcccacatatattgaatttgaagactgtgcctaagtttaaggtaattgatggattccattctcattagatattcacacatcaaaaaagttgtctgctttcccaggcacagtggtaggttatgcttatgctcatcgtttttcttcccagagctggctcttcctttgaaacagacccatataagccacccatttgctgggtcgcaagcccttcatgagggagagagaagtatggtgggacaccagcaccttctctacagaaacgagcagcatgtttgctaagggctgctggactttggcaggtagagaccatcagaggactcaactgaatccccttttatcaggaaccctaggagagtagagttgtcaggagtttccccatgacttacattgtcttttttaaaacaaccaattcatgactgaggtgaagaaggaaaataacagaaaaatatatctagcccaagaaatctacagaataacaataaaactcaggcagaaatgaacccactgatctgtgagccaagtgcttaagggaggggttggggcacttctcatgtggctcactgtcttagtcagttcaggctgctatgacaaaataccataggctgggtggcttagagacaatggaaatgcattatgcatagttctggaggctgggaacttcaagatcaagacactggcagattcagtgtctggtgagagctctcttcctgattagtagatggtgccttcttgctgcattctcatgtgatggaagagtcaaggtagcttccttgggcttcttcttataagggcactaatctcattcaggagagctccaccccatcatctaatcacctcctcaaggtcttgcctcctaatgacatcatattgtgggttaggtttcaacatatgaatttggggggacacaaatactaggtaggtgcaaaagtaattgcggtttttaccattaaaagtaatggcaaaaaccgcaattacttttgcaccagcctaatattataccacagctctctctgtggttgttcactggggcagtgggggtgtggcagaggggtgagggaaaaagggttccctcgatgtttgtggtagaaagaagagctaggtaaccaagtactcctttttgtctgcttaggtctgccaaaagtcaggcacccgtatcgggttagacattcaaggaatgtactgggggaaatgcctgtgaaagataaacagggaagagcaagagaaggtggggagagactcagaccacaatgcaggtggtctgtgacaattggggcgagaaagaggattgggtaagaagagtctcagacagtagcacagttcaggaaaagttcaaccaggccaatagagagtccttgagccaaagtcacctactggaggagtcctgctcctcacagaaatgggcctgcattactatgctcaccatgttcagtcattggccgggagtacagcccaggccaagtgcagcaaaaatgatggatctaagggggaggctgctggaggcaattatgtttcccatggcaggagatgtcagcagccactggtatggtcaccacatccttccattggtagttgtgggtgggaaggcagagtccctggcaggcagtagacagctacaggaacagaaactggtggtagaattagactgactactttggataacaaagccaaggctggcttgactggctgatagctagactatttctttgttactttgtcactcagtgtttagattgttgtttttccccctttccattgtttgtcaaattccccatctgaacccaggtctggaaaaataaaaccctatgcatttggaagaactttaaaatgaattagcttttaggctttagttgccatcataagcatctagagatattcaggcctcggagttggggcagactggagaaactaaggttatttgagaaataagcacactgaatatttggcttcctaattattctacaaggagtctaagttttgcctgccttgtgcctatgaatcactatttcttaattttcttagtttcacagaatcagaggacatgaatactgaaagatattggaggttgtctagttcgactacatcattgtagggaaactgtggccataaaaggggaaggtacaccaatattccttatgaatcaagacataaaaatcttcaacaaaatactagcaaactcaacccagcaacatttgtataaaggattatacaccatgaccaagtgagatttatccctggaatacaaggctggttcagtctatgaaaagcaatcaatgtaacacactatattaacagagtaaaggacaaaaaatgcatgatcatctcaatagatgtaaaaaggaaagggactttctcaagttcacacggctaatggcaaagctgagattaaaactcaggtcatctgacttgtaggccagagttctttatactggtgagggtaggggtggagggctgaaccggaccttgcaagactgtccactgcactgaatcctgtactgagggatttctgtttgttttttcatcctgtcctcacaacacccccaagcagtgggctccgttgttattccccctccttttgcatgaggaaactgaggcttagagaggtaacactggttgtctgaggtcatacagctgccaagtatatgaggagctaagcctagatttcaggtctcctgccttgtctctgatattttccagtgcccgccactgctctcctcactcaacagtgccacaggattaacctggttccattggttctcagatcacctactgccaagcacagtggatgggctttttgttgtaagtggatgggagtgccctccaaattctctggaagaatagcctcctctcctgtgccagtgtgtgacaattctcagagccccagctgttgacctcactgtaatctgggctaagtggccatttatatacactaatgactagaaggtcttttcaaggaatggaggaccacaaagaagcaggcagctctggggaagccagaagctgaatggctgggaggtggggcaggggcaggggacagtggggataagatagaaacaaggctgttctttgctccttgagaagctgggtaacaagctggcttggcttctggtggagtctggcccagtgatagctcttgcctcctgatgggacaaaaaaggggagacaggcatctcagagaatgaggtggagagagacacaactgggccaggacccagaaaagagagttacctttttcgtctcagacctgggcatcccagatggaaccgtgctgagcttctggttagtctagcttcctccaggtgtgcaacacaggggtcctgctagggagccttcccagttgagattaaggaggttgctttcaaaatggccagctgcccaagattgcacctctgtcactgttgaggacagtgggggtaaacatgcctgatgttctgccctggaagggctccagagcctttggattgaagccacaaaggaggcctggcatttggctaccattccttcatctggttcactatcaaggatccctcatctcacccattctgctcccccgttctaatgtgggcttccataagcctctgtcccatcttccaaaatgcagtctggagagcgaggcaccaaggctgcaggccatttgcagggcacagccctggaggctaaagtggaggtgcagtggctttcctaacactggtctgcatgttgaactcagaaatacacggtacccttttcagcaagaatcaaagcaaggttgaaacaggccagcaacgtatgggacactttcttctcttccctttcgtgaaatttgcttcttgtatagatctgttttcaccaggaaatgaatcaaagccgcatactctgccttccatccttctcttctcttctctcttcaggtctttcagaccagggaaagtggctgcctttgggatagtcacaacaaggtgccctggactgaaaattgagagtgatgagttacactctgccctggcttggggcaaggccctttcctgccatgagtttcagtgtccccacctaccaagtggggagttggtgtcagacaatgtttcttagtgggtggcattccaggagtccacacacaaaggctaagtccctgcaaaacagtgcagatagatgctttctgtaggtcttgctgactctcatactctctgtctttaactcgcttggcaattcttgagcaaaccattgggcctcttcatctacagagaatgatgacctgactaggtgatctctcatttctcctcaagttacaaaagcgttagggtggtaaggagaggaggtggccccaggaaaaccagatgggtcagaagaagacagaaggtggagccttcagtgacaggagagcagagaatgatgtccccctcccataaatgtagggaaggaaggataccagaaaggttaccatgaaagagaggagtaataggaaagtacaggtcatttgtagttgaaatacatacttgagtgtctgtgtggaccaaatctggggtgggaaggcaggcttcaaatcctgaacctcggaagggtcggcattcctgacaagagctcagagagccaacaccagacaaactctaagtcccctgaagagagtgtgctgagctaggtacttgcagccttgaacccaccctaatcccctctgcctggagcacgtccagaaggagcgtggtttgctgcagaaaagacaagtcagttagaccaaaattccaaagcaactttttaagcctataaatgatgatgattttatataaacttgagttgttccttcaacatagcaccatattttctacttatgtgattctggttttctctaaaggaaatctttttttggaatccacaccatacatacggaagagtatataaaacatataataataaaaccaacagtcatgtacccaccaaccaggttcagaaatagaacattcagaatgttttagaagccccttgtgtgcccctccctcttcccagagataacaactatcctggcttccaagagccaaccctagaaatagaccctaggctctggcaagctttgtgctcatcctagtgagatcatgcacgtcaccaatctctttaggtagtattctgtgcggatttccacagatggctcatctgttttgtgttgatccttattagtttcaattttgtctttttaaatatattttatgactttctgattataagagtaatatgtgctctttgtagtaaacttggaaaatgcagaaaagtggagagaaaacacaaacctcatggcataatacaatatataaacatttaatatataaataatccagaaacaactactgtgtgaacacattggagtgcagtatttcagtcatttttttttctatgtagaaatatatgtttcacattactggtatcaagttgtgtatataccttttccctttattgtggaatataacattgatgcagaaaagtgtgcaaggcctatatgtacagtttaataaggaagtaaaaaatgggccgggcacggtggctcaagcctgtaatcccagcactttgggaggccaaggagggcggatcacgagatcagaagttcgagaccagcctggccaagatggtgaaacccagtctctactaaaaatacaaaaattagctggtcgtggtggtgcctgcctgtaatcccagctactggggaggctgaggcaggagaacagcttgaacccaggaggcggaggttgcagtgagccgagatcataccactgcactccagcctgggagacagagcaagactccgtctcaaaaacaaacaaacaaaaagaagtaaaaaattaaaacctgctgtcaacactgatcaggtcaagaaatagaatattgacaacccccaagtagatcctcatgtgaccttcctgatccaagataattattctgcttttctacatagcttcatcacttattaatagacttaaacttgtaattgcttcattttcaaaaccttagtggcggggccgggtacggtggcttacacctgtaatcccagcactttgggaggctgaggcaggcagatcgcttgagcccagagtttgagaccaacctgggcaacatggggaaaccctgtctctactaaaaacgcaaaaattagctgggagtggtggtacaagcctgtagtcccagctacctgggaagctgaggtggcaggatcacctgagcccgccagggaggtggaggtttcagtgagccgtgattgcactactgcactccagcctgggtgaccagagtgataccctgcctcaatacaaaacaaacaaacaaacaaacaaacaaaaaccttggccgggtgtggtggctcacacctgtaatcccagcactttgggagaccaaggtaggcagatcacctgaggtcaggagttcaagaccagcctggccaacatggcgaaatcctgtctctactaaaaatacaaaaattagccaggcatggtggcatgtgcctgtaatcctagctactcaggaggctgaggcaggagaatcccttcaacctaggaggtgaaggttgtggtgagctgagattgtgccactacactccagcctgggcgacagagtgagattccgtctcaaaacaaacaaacaaacaaacaaacaaacaacagcaacagcaaaaaaccttagtggaagacacaatctaagcatttaagggaagagtcccaggccattagtagatgaaggctttcagaagaagagaggttgacctgtcctggtcattatctgccttcagcttcccgggaatgtgtagagcccaccaccatcaggacactagcagagttgtggacatggtattggatatgcagaagaaatatggccaaagagattggactgccctctgtgttttgctttcaagctcaccacagcctgcctccagtacctccagttcccaggtgtagggcaacacagaacatccctgtggggtgaagtgagtggcctccactgatccggccagcaggaccaggaaagcagagcaggaaattcaccagacaaagggtcaagccagacctcttccagggtgggggacaggcagatgcctggggacacagagtcagagaggggattcagagatctgcctgctccttaaccagcttccagcccaaccccattacgctgaccatgtccccccattccactttacctcccagatctgggaacatctagagctcctcctcctgaggcttgggaagattctgccgtatagaccacgatcctttccagttttctcctctgctgtcttgtgattcagcttccttggtgctgtgtagtcagttaatcctggtctatctgcattttagtttcataaattatgatgctgttatctcctctcctattctctctatcctggtgggattttgtctttaaaaacaaaacaaaacacaaactcttactgtagttttaatgagactctgggaggaagagaatttagatgcttgcattaaactgctgtctaattccagaagtctccaaaggaaatcctgccactcccttcttcggttgcccgaacatgacggttagttggatggctcccttggaagcccaaggtgccatcagggagatactgagagaatttgaggctgggaaggcaggtgggggttggggtgagggttatgttttgaatattgcttcatattgaagcatttgtagtatttgcggttaagagcctggattttcatgtaagtcaactccaggttcagcttccagctctgccagttacatatggtgtgactttgagcaagttactttgcttttctgaaccttattttccccacctgttaagtggggatcataatggtacccatctttcaggcttgccatgggtattgaatgtttcacttagtaaacatttacagcgtttcactcagtgcctggcacattgtatgtgttcaatacatggtagctattgtcatcatcattatcgtcatcatcatgagaaaatagaaaccttccagaaactgtcagggcaacgattgccacaggccgttgttggctactaaaactctagactctggagagccttgatgcccttcctcttttaccccgtccctgatgctcccccaagtagcatgatgcccagtggcccaccaacctcattacccagcattgctgacaacaggcacagccttggtcactgtgaaaatgccccacagcctcaacctcagaagtgggaagtatactgcagattcactctatgccaagcactatgggatatccacaggaatgtgccacagtgaggtaactgcccaggggatagtaattccttcatttctttatacattatggattctaccattttgttattgggttatttttccccttgtcaaagtagcaatttatcagttgaacttaattctctaattaaatttcaaatctgagaatttacatgatgaagtgaatttgattttggacccagtcaatttcagtcagccctaaacatattttgaaatgttaaagttaaattatatacgtttgtggaggaaaaactccaggaaagcctaaatttttccaggtcttgcttaggggataccctgctccaagaaaacttttacaaaatgcaaatttacagaacagatccaccaaatgggtgggattggtgctaccctagagttttctgtagaatttcttttttaaaaaatttttttcttttttttcttttttttttttttttttgagatggagtctcactttgtcgcccaggctggagtgcagtggcgtgatcttggctcattgcaaactccacctcctgggttcaagtgattctcgtgcctcagcctcccaagtagctgggactacaggcacgcaccaccatgcccggctaactttttgtatttttagtagagacggggtttcaccatgtcagccaggctggtcttgaactcctgtcttcaggtgatccacccacctcagcctcccaaaatgctgggattacaggtatgagccactgcgcccagccagaatttctttagtgagatttatctaccccctccacccaccataccacacgtatcataacagaggtcccccaacttggagttctcctcatttcaaggtacagttattataaaaagaagaggacacctgggtctcacagcagccagctctgcggccattgcacagtagaacctcagtggccttacaaaatattcttgctgttagtctacttactgcaataacaaaagtttcacttgggcactttgatcacacaaagcttggcacaggctttgaaatcagacaatacctaggttctagtctaggctctggcacttaactaatgggtgatcatgggcaggtcgcttaacctttttgtgcctcagtttccttatctttacaatgggattataatagtacctccttcataggattgtcctgaggattcattaattgaaatgaccctaggaaagggtcagtgccttacactgagtaagttctcagtaaatatttataatatcatcatcatcatcaattattattattattaatttactttaccaaaacacaggtcctgctgagccatgttggccagaccacacctagaacagcatgtccagttttaggctaatctgtgtaaaattcagtgcctggaccattgaaaggggctcgatatatggtggaggtattattgttaattaatgctgctgctaaccttcctggagtgcatacaacatgccaggcactgcatacgtgctaattctattagtcctcttaacctttaccactctatgaataatatacaattattaatcccttttgcagatgagaaaattaaggcacagaaacgttaagtaactctcccacaattacaaagcatggaagtggcaaacccataattcaagtctagactctctttttccagagcctggactcttagccaccatgccaaagagctgtgctgtccactgctgtagccagcagtcacatgtaactatttaaattaataaaaaatttaaaaaacaagaattcagttcttcatttttactagccacatttcaagtgctacacacttcatgtggccagtggctaccatattgaacagcacagctctagagcattctattctttctgggatgattcagcatcaactcaggaagttctgttggatggtgatgcttacagagattctgtttcttacaaaatctcagacttcagttgtacagctttcttgcattgttattaatagatgcatacttatgatatattgaaatcccatttgcacttggccaagtagggtaatggcaagaaaaaagccaagaagcgtgacttacattacgttttcctgtttccccggtgcattatttcaaattcacaaagttgtctcctatcacctctctttgatatggggcaggaggcattcatcaacttgcccaaaaatccaggttcttccacatgtctgccttcacctctttgggctatctggataatatttagtgctctagcatagtaacctcacaagtgacttgaacaacggaggttggcttctgaagtcagtgagccacagaggaccttggactctgagcatctttgacacactcatcaagtctccagttcgctttcttgggttttctctgctcatttctgttacatggttagtaaaggccagggaaagaaaaggtgttgaggatccattaccttaattccagaatgattaagtcaagaaacctacaagctctcagaagccagtggaattagagtgcactactataaccttgcaaatgtgcatatgcctccttccgaatcaccagagtggagattgggccaatatccaatctcgtcaataatttataaagccagagcattcatccacttcttgcaaagcagctgaatatctatgggggttagtcataatctgagctccttgcaccagagccatttgagctacagaatagcacagagtgtcacagaatagccaaaagtgcagagttatttcagtatgaaagaaggaggagcacctgactgctcctcgccatgtgcagaggaggagcccatgcatttccaaacccaggggttgcttggtttctagcttggtttctgtctgtaccccatcttgctattgtgtgacttgagtaagcccatctccacttcctcatcttattagctaggaacaatctatctcaaattcacatgtgcacagagttcagtgcccagcacactaaagcatgttcagtaaatatgttagctgatgttattttcaccatatgattatgatcactctctgttctactgatgggttttataaacccaccagcattgaaaagagatgagtagatgtgctaaaatgagagtaaaggctcagtttatcattggtgtttatcccaaaaaaaagactagcacaatgctcaccagattataatctcccaagtgcctagaacatcatgccaagctagtaacatagtaaagtttattgaattttgcaagtatttgctgagccctttgcctgggctagatactgtcggggcaccagagggatttagagatgattaagacttggcccagcaagaatgttcagtcagccaagggtattcagccacaggagctggacctggaaagagaggcagaatttccagggtggaggagcttcatctcgaaagacacacagaattcccagagtacaatcatggagaaagggcattccaggcttggcaaaccaaggagcacaagcacagagggccgaccacacatggcagcctgtctggagagctccaaggagattggtatgactgggggtacgtgacattatggaacgcaaaacctggctgctgagagggtggatgtgcttgcacttgcatctctagtcttggtgcgagccattggaggatttttcaggggaagggaaactgggctgacctggttccagcaaactctctgacaatcatgagaagcccagggtccagggggatgagtaagtgtgacctccaggaaacggggcaccactatcagactctatctgtcccatggcttacttctgtgagattcgaaatagtgtagaccttgtcagtccatgagctagtaattatgcccaccaattactgatttatttgcctttctgagatgtgcagtgatcccaaggacaaagatggatttaccttatgtttagaaacttctagaagttgaaatgttcctaacaacctttcctgtggaggttgtacctcacacttagagtgtgtgataagcagtttcttttcctaattaaataaaatggagaaaagacacaagcatcagctataaagctcccagtcagtcacagtcaagagactgaatctcatctcttttatttattttttgtgttaactggggattgcattggtctgcacagtgcttgctcccatcctgctccacttgattgagtggctccaggccccctcttgattgctgctgaaatagaactgcccacactgtcggggtatcttccgccgctggtcatttccatgtgccatctgcagttttttctgcctgatggactactgaggcactgcgtatgttatgctgatggggggtcctgtttcttgacccatcactaatatcttgcaagtcacaggaagctaccagggattcctgagcaaaagcttaaaatgcttcagttctctacaaataagccccattcattgcttttagagtgtgttatcatggagcagacaagtaatcagaacctgagtaatatttgcatattgaggtcttcaaaactccagtgtggctataaaatggtatttaaagttatcaaggagctaggtatgcaggcagaaagaactgtccattgtagaaagcaatgcctctgctcatgtcccagataaccttgctccaaggacaaactggagcttgataacatgaagctgcagatggccggtgagctcagctctgtactcactaaccaccccatgggaggggcactgagccctctatggttggcataaatcccattagaatggtaaagaaatccttttcacaagtacatagaaatcgcttgctaagatttcatgggttttcttgactttgttgtttttgtttgggttttagagggtgggcatgagtcatctctaaaactgttcaggtagttaggttgtcttcttattcccatttttaagtatttataatttgttcttaaaaatttgtccggaggtccacacctccccttggaaaaccttgcctgtacttttcttaatggcacattttaagtttctatgtttcaaaacttgcttatcatataacatgctaatgactaaacacatgcacacctccacaccaatgcaaacgacatgtgggcttgggaacgaggcaagcctgggtttgcatcctgctctgccactagtgggctgtatgattttgggcaacttagttaacctctctgggcctcattggcctcatttgtaaaataagggcaataatagtccctttctcatagatggctatttatacagatcgaataagaccaaatatttaaagaacctgggttagtgcctaaagcacagcaaatgctcaataaattcagtggtggcaatttttattgttatttcaaatattacatcaaaatatctactgaactattatccattgcaaagacttgcccacaataggtgcttagtaagtgtttattgcaataagttgaagtgattccaactatgtagcttagatttcgggtatgagtgtttccttctccactgggatgtttgctaatggacatagatgatcactcacagctcaggtattaaaagcaggagagtagaggtgttccttcatgtagaaagaagagcaacttctcatcaaggcaggcttccagctggtcctttggacaccactgttgctaagcacttggtgtgctcgtcagggtaccagggctcttagcagccacccatttgcgttttgcagcttttgctgacatggatatcaagtatgaagttattttaattgcctttggctgaaaaaaatgggtcatatgttcaatatgttcaattctggtgaaatccctgtcttctaaagcatgatagaaaggggaggtcccacccacacacaagtcctaaaatcttggggccctagtggggtatagttcaacaagggctgcagctcaggacgtggttgttgtgagatttactcgtgactgtttggttttgcactcaccatttggttttgcagattcctcagcgtgttcacacacacatacctacaaaccagtttagagttgtgtgctccattgtggggggtggtcactggggtggggtggggtagggtgggatcaggcttggtcaaagtcattgctgatgaaccagctatctgacttagctttgttcccattttcaacaagacagtgatttctcaagccaggggagtcttcacatgagatccatggatgggtattaagtggtccagaaaacccccccaaattagatgtaaaatgttggtgggctggaaagggggagacaccataagtgctttttctgtggagagaaaccatagcttataactggttctcaaagaagtctatgacccaagacaagctaagatcacaaagctgtttggtttcgttccaccaaagcagttggtgggtataaccacaacacccagatgacccagctagacactcagggcagtgacaagatcagtcagaaccattttgtggccaagcagctgatggattgttcaatcggttgttgtagactcatgtagacaaagcctgcaagcttggggaagccaggcacccccaggtcagcctcgggcgacagcccccgtcctgccaggccctggggagtgagtccttcctgcccggcagctcctttgctcatgagctggcccgagtcacctcctcgtacagcacctcagaggcagcgccctggggcagctgggatccgaaggcctggaggcaggtgcccgctccactactgcctagctgcgacgccacaggtaagtcacttccccctgagcctcgctttcctcatctgtcaacggggcacagtcccctgctcagcctgcccgcctgcctcacagggttgttgggaggaacacaggaggtgacagctccgaaggtaaagctctgtccacccatgagggacttctagtgcttcctgggcctgcttgttctctactttctgcccggcattctttggcaaagggacaacccaagcaagcagagtgctccaggtgcctcagccccacctccagggaaatgagtgggggattgaccagggtgcagctgctctctccctcagctgtatgccttccagtaccccgtttccatacctacctgcctgtctgtccctgaggccagactgggaacctgagggggacaggggctgtgcttctgcacctccgaagccctgcacctgatacctgcctgcttggcacctagtgggtgctcgggaactgcctctcctgccagccatctgctgtggattccaaaccccgcccaggactcccacaccctagaggcaggaagttggattgccctgctggaggactggcagtctgggtagtacaggcagaaggaatccaaagcaagcttgtccaagaggcctgtgagttgggatcatcctctagattctagagtctagaaggaatggcttgacttgcccccagagtcgcatcagtggtcatgagagcaagcggatggacaccagccagaggggacctttgcagagaattgcatctggtgcataaaatatcaatgtgcacaggatgtctgcactatctgcagagaaaactggagacatgaacattttctaagtgatagtgatcagaagatggtcattaagctgaaagggcctcccaggattctggcctttaatggaaattcggctttggtatgtacagccttgttctctttatcctgcctgccctggcctggaagaacaagcagtgctttcctttcaagggctattgatttctctctctctcagagtcacagagctcctcagctgttcactcttcagctgaaaccagagaaatcttgtccagcacaaagctgccagggaaacagaattagcaaaacggacgtcgtcccctcaggatgtcgctgtttccaccctggtctgccttgcctttccctgtctttggaagccacagatgaaaggatatcagctagcttgccttgagaattattgtccctcacctattctctctcttctcaagccaacagctttcacccagcagtgaagtggcagagcagatttgtggccccaaatcttctctaagaaccttggaaattggccccacctgagggcctttgagggtcaggcctggcatccactaaatcctccctgtcaacacagccactttgtcagtccagcctgtgagtcagtgcgagacagaggatgcaggcaccacaggggaagaagaaaagcaagctggaaatatatttgtttcctttgcccgggatcattcccagcatctaaaccaagttcttcccagaccggccaagactgaggaggagtcagaatagagtttgcagcagtcatagatcatgtgggaagacagaaaacaaagggtaaaaagaatttcatatacagatctctgccgtttgctttcagtggcattcattttgtgaagcccccagtgacagcttcagaccagttcaaacctgagggcagcatcattaccatgggtgaggtctctagaagggcaaggaaagacccctaacatagaaaatggtgtggcagtttccagttccccattggggtcccatgacttgaccttaggtttctgccagcacctgcccaccctccatcccttcaccctactgggtggtcattagaacattatctgctttgattgatttacttgtgtccataagagtagagacacacggtgttatccccatgcccggaacagagcctggcccatagtagacccatgaccatgtttgttaactgagtgacagagggactgactggactgtcatgtaagcaataccttcccgtcagggtcttgggaaggtaggttcaggggccccagagttactgtggcccgtatccctctggctgcattctgggcaacgcaaaagggcaggtgttcagtgggttccaccccagatctcggcgttaacagtccactgggagaagtggcccaattcgtgctcattactcccagtggtcctgcctccctgcaggcattctggagaagctgagtcacaggctctgagagttagggggaacttaggaaacaatcaaaacttgcctgccattcattttaggaagccgttgtagtttctgagggacgactaaagggaattttttcctaaaagcatccatccgtcctccaactaggcttcagatagcagtgtgtatgttgtcactatctatgggccatggccagtcagagcccacgggtctcagggggctccacccatgtgggggtgggggtccccacaactcagatcttgaatgtgtggtggtcccatgcagtatactatcttcctgtcattgcaaagggaaagtcagaagggtgaacgagttgtttctaattctggcttccaaacagtacaaaagaaggtttttttccttgtggaatacactagtgctcaacctttgggacagatagctgagcaccttctgctgtgtggcaggctggctctctgtgggggcactcatggagcagtgtctgctggaaaaggagacaggagttccctagcatggaggggtagataatctccccgctccctcccctcttctgtcctcccttccccttctccctcctcctctaccctcccctttttcctctcccctccccttcctcctcctcctcttccttctcttcctcttctttattctctctccctctcagtctccccttccctcccttccttcctcccttcctccacattctttataaaacaaggctttggatccattcactgccatcccccagaagtcttgtcatttgaattcttgtctgagtcaggatgctctcctccaagggctcatagggcaaggaacttcagcccgaatccggctaaaatccaggaacattttgtgggcatctgtctcagtccccgaatcgtttgtcctctgcctttcccccgttggagtccttttgcctgcttaagtggttgaattggtaatgagatcattcttcccatgcagtggtgagaaagcagcactcaggtgattgcacctgggtaaacaggagacattagcatgtggtagctggtgagtgaagctggtgcagtgcctggcgtgggctcagttgtgccagcaggcagtggtggagtttgggctctttcccctctctcctgcccagcacacaacccccagggacaggtgggggctttacagctccctggcgtcagcctaaagcttctagaaaggcatccccaggacttccaaggttgccatcttggctgagactgtctgtgaatgtggtcccttgtctgacagtgggggctgggaggggtgtgacagaggaagagctgggccttagttctctgggggtcaccatgagagaagcacacctgggcttgcatagaactcagtgctgcttgtcagtgtcacctggcacaacaggacgtagtgccacagttgcagccctagaaaatttgacgaccccttcatagctttgtttataaaaggccacacggcctaggctgtccttcataagagagcagaaagcgagtgtcccagtcactaagcagcaactttcaggcacggtttcctcctggtcactgaaaccatttgtcatttcctgttttctccattttccaacgattctaattgtcagtgtcaaaaggcaacaactgttttcttggggcttatctttggagcacattgattcagaacaaaggatgggagcctccatctgcaaaacaaaggaagcagcctcctcgggaggcctggagagaatgctctggctcctttggccagggacagcaggaccagcataggagcagaggactggcggtgcctctggacactgccgtaaggtgaagagaccatggaggaccgtcgcttgctggtggcaccccagacttgaagatcctgcagagctggccaccggcacccaggctgggtgtcagcagcgctgtgtggccttggcagtttccatagtgataggctggccagcttttccattagactccggggtcctctggaatgtgtgcttcccgggatgaagacgccccagcacccgctgaagcctgccctgccccggcgtggcctttccttttgtctggcacgcccctgggcttggctttctctttccgtccctcccttcggactttaccgcacttcccctgctgtttccttagtcacactctccagcctccatctgcccctgcccctgaacccctacctctgtacaactgtgttatttgatgaaactaatgcagcaaccggtggggatggagttaaggaccgtttagacctagccagccacgcaggaatctgtccccagaagcagcggaagcacctggtctgcagttaggagatactgtacttcttagccgtgtcaccttgggcaagtcatttaacctctctgagcctctgctgtcacatcagtaagctggggactgtagatcttctgccctgatgtcctgagactggtacaagaagagccaaagcgaaaggactgccttcagaaatggctgccaaccctgaccatctcaggcagatccggatggtgtggccttgggcagtggtcatgtgacccccatgctcctcagtgtccacatggggtgttgctagatgacataaaataatgggtgagacgtgctcagtataatgagagcttgagaaggcagatcccaccccccatccccacccccaccccttgccgccttgccaatgctttggcagggagagggcagctccatagggcagctgagaaacagcccctcactgcccacacggcagctccagtggagggggaggcagggaccaggacaggaagcaggctaagggcgggatagaaaagcaaaccccagtctggtggaatcgcttctggtgtagtcttcccggtgccatgtgtttgtcctctctgccttggcaggaaccaaggccaggaactgctgccaggcctgagagccgggcacagtcccaagcactgggtcgctaccccgccccactcccaccagccccactgagtgcagagaagggttcccagaagccctttgctggaaaagcaggcactgcacgggcagcccgtgttgtagaggcaagtcctctggcatcttcggggggacacagaccagaaagtggacttggagcttgtgctcccagacagagctgccttggtggttgagaaggggagagagatggcagcagttgagcagagatggccgggctcccctcactgtgtggggtgaggcttcaagcactggactgggagtcagacctggatccgagtcacaacctgacaccaactggctgagggtctcagagcaagtcatgccttttctgggtctgggggccttcatgttattccctcctggctatgttcttcccctttgctccttgagccgatcccagactgagtgctgaaactgcggccttgaaacttggctcgctcctccccctgcccacccagccagctttcagatggagacaggaagctcctcccaattgcctatgctgcaactagtcaggagaagggcgggaggttggcagtaagtgtttggctactcccagtgttggagactgtgtccacctgaccatgtgatcatctggccgttcatgccaggaccaccaggaacaagcctcagtcctcttctcaatgtcctttccctatgacagccctgcagaggctaggtatccaccactacatagcccacagtctgctctgccccagccacagcatccttggcttgctcagccattctttgtctgggtagtttgaagtccaatccccactctcattacttaccatcctctgaatgcagccagtctgtctgggtctccctgagactggcatgcccagactcctgtgggtatagtctggccaaggcagagttagcataggactgtcacctccctccttctacatactctgcttctattaatgcagcctaatgttacatttgttcttttggtgaccgcatctcactgctgacccatcctgagcagatggacatccaaaatgcctaaaacttttttctgtgtgctcttgctattaagttctgtctctcctgccccattctatgctgttgcagttgtgtttttaacccaggtgcagaatcttactttatttatacctgtggaattttgctcgagagggtggggcatgcatgcgagtgtatgctggtgtgtttattcatgctttctgctgcaccaaagccaagtcctaggtccccacgcagcgatcctaaggctaattattaattggtagctgtaatctaatttgtctttttcatcttctgtttagcaagaggaacagagatcaggtcttatggcaatgacccctgaacggcagaatgcatatatctcccaacagatgagtccatttgaaggtaagcagttaaggccagtgttcccaaaggggtgggcaaggggtgcatatgtggaagtggggtgagaattcatttcagagtaagcagttactgtgcttctgaaagcattgagaaagaggagatctgaaaatcagttaaataattcatccaactctaagagcaggatcccaattgaaggcctggtctaaatgactccaaaatcaccacttaattcaagagactgatttccctgagtcaggccccttaaagcagctatttcaatgggacagggaaacaaccctaggatctggattagaatcacttgggggctgccacacccccagggctctgatcctgcccttctcccacacgcacattcacatactgctgcagtgaccttccatttctaatgggttcctgggccatctgtcaggtatagggaatggaaaaggggttggggaggctctgcttcagaaagtttgtgtcaggggctcccagagcctccacagatagatagcaggggtccccaccctaccatggcagctataaatgtgatcaacatttattggcctaggatacagcagttagcaaaatgcctgatgtagttcccactccgtggaggttgcaggctagccaagaagtcatgagttcagcaacccttacgcaccagtgggatgagattggaccaggccgagggtagtcttgggaacactcagcatttgtctgagggccagaagaggctgcttgccctcagacaggaggtcagcatctttattgtagcccatgacacctctacaccattgctcttctggtcttatggaagacatctttgggcctgataacagcggagtctgtgtcccacttgtccaggctggagtgccacatcaggcacactccagttgcagggacagcacagacaagtttcaggaaggctggtggcctccaggaggttaaccttataaggccagattgtaacctagttgaaaaacatacacatgccatgataataaaagaacctaggcaccattacaagagaaaaaatcatttttgtagatacgagcatggattcttgggtgggtcagacacactgggcttgtgctctgactgcactgtctcccctacctgaccttgggtaaaccataagactgctgcatgactcagtgtccaccccaaaaaagtaccggtagatattggccacagtagatatcagctagagtggactctcatgacaatgaggggagatgtattccccatcttaggcacctgggactctaccttccatcttctgctccgtgtctctccatccccaggctcttcagaactcagggagtccagaatgtcagctcccagatttcagccttcagaaaggaaacccattaccgttcagttgaacaaatgttgtctgagccccagatctgggctcagaggccatctaggctatgagacaagaggggaacaaagcaccgtctgcactcactcaccacactcacttgctgtcccaggtcacatccatcgggtagagaatctaagaggctgagctagctcccgccaccagcccagcccaccccacctggccccttccttccttctacaaaatatgcaccacctgtcaaagggtgggcagtgccaggcctgcatacagagcactgagtgtaaaagcagacatggaccctgacctccaggagcttccaattttcttgaagagacaaatcagctggcatttcagtccagtgtgatctgctcttggtgagcacagacctagggagttggggcagcttcccagaagaactgcagtccaggctgagggcagagaaatgaggggaatggcgaggaactggggagcaggggggagctcagtagagagccaagggcgggaggtgagaagtccgtgttgggccaggagctaccctccggtggccacagcccaagtcgaggatgcctttggaactcatccccacttctctctttctgtatgtagccgtccaagaacaagtcacctccaagtgtagccggatcaaggcaagccccccatctagcaagcacttgatgccacccagaactgggcttcttcagaacaatctgagtccaggaatgatcccactcaccaggcaccagagctgcgagggcatgggagtgatctcaccaactctggggaagcggcaaggaattttcacctccagcccccagtgtcccatcctctcacactcaggccagactcccctgggcagacttgactctgtctgccagcatatgcagagtcccaaggccaccccaccagaagtgcccctgcctgggttctgtcccagctccctgggcacccagtccttgagtccccaccagctcagacggcctagtgtgccaagaatgcccactgcgttcaacaatgctgcatgggtcacagcggcagcagctgtgaccacagcagtttcggggaaaacacccctcagccaagtggataatagcgttcagcagcactcaccttctggccaggcctgccttcagaggccatctgattgggaggcacaagtgcccgctgcgatgggaacacaagtgcccctggccaacaaccccagcttcagcctgctgggcagccagagcctcaggcagagcccggtacagggcccggtgcctgtagcaaacaccaccaagttcctccagcagggtatggccagctttagtcccctgagccccatacagggcatcgagccaccaagctatgtggctgctgctgccaccgctgctgctgcttctgccgttgctgccagccagttcccaggtccgttcgacagaacggatattccccctgagctgccacctgccgactttttgcgccagccccaacccccactaaatgatctgatttcgtcacctgactgcaatgaggtagatttcattgaagctctcttgaaaggctcctgtgtgagcccagatgaagactgggtgtgcaacttgaggctgatcgacgacattttggaacagcatgctgctgctcaaaatgccacagcccagaattctgggcaagtcacccaggatgctggggcactttaaatctgagcaggatgcccatagaaacccccatggtgacatcactctaggaagtggtgtcgatccatacccgcagttgtctcccgttacaatttgagtggtgttgtcagcccatgcttatccctctctctacctgtgacaaaatggaaagctggtgatttttcaagctacgtgtacatatttgaaaattttgtaaatggttttcctaaacattaatgacagaagtatttatacttcattttgtgactttgtaaataaagcgacggcttttgtttcagtagagttgtgtttactatgcattgttttgtgtttattatacaatgttacaaatatgcagaccgtgttgtttgctccagtgataccttgttaagctaggtggctgagtcgcttatggttttaatgcaatgagcaatgtggatatgaccaagagttgttgtgcaagttgacaaatgccaaatagaaaaccacttggccatttatttctatgttcactaaaaatcctattgccttgtgtgattcttaatctcttttgcgaacctttcagtctccgctagctctttcctaatgagctttacagcagaagccgttttatcgttaagtgccccacagagacactttaccaggaggctgggagagttctccagatttgggagaggcgcagagacagtgtgtgagccgagccctgtctcagcaatccacctggaggagctagagtatcctcctccctttaccattcagaccgagagaaaaagcccagcttgtgtgcaccctcgtggggttaaggcgagctgttcctggtttaaagcctttcagtatttgttttgatgtaaggctctgtggtttgggggggaacatctgtaaacattattagttgatttggggtttgtctttgatggtttctatctgcaattatcgtcatgtatatttaagtgtctgttatagaaaacccacacccactgtcctgtaaacttttctcagtgtccagactttctgtaatcacattttaattgccacctcgtatttcacctctacatttgaaatctggcgtctgtttcaagccagtgtgttttttcttcgttctgtaataaacagccaggagaaaagtgcc

SEQ ID NO: 11 - DNA, 3254 bp, Homo Sapiens
gaaggtagaaggtggggtctgccggacgcgtgttcctgccaccaggtgcccgctccccgcgaggccggctcaggagcaggtaggtgggcgggggctcgcgtctctgtttccggcgggtcctcgcccttgtccacgcagcagggctgtagtccggggagggcagtattcctggctaggctggggcgcataggcggtgcgagtcgaggagagacgcggtgcccgcgctcagccgtgccctagcagcgggaacagttctgcagtgagcgatcggtgctctggggtattgtttccgctgccagggtaagtctgggactgccgttcgggcctacccagcaggtaagtcttaggccatcgcctgcggtgtcggccccgggagcagcgagacccaagattgcatcaaacgtttgccccgtctctgcatatgtgactggacgtgaatgatgcttcattttggcaccccctttccctgctcaggtagaatgtaaacaattgaaaaaaatcccttcccaatcagaataccacccacaggacaacgaagaaaacctatcttcagtccccacccacgaaatgctggggggtggggaggactggaaaaggagtaaggggagaggaagggtgagcagctgcaagaagtctttacacctctctgcggttcctggtaaacgcgctcatgtcctgggtatggaagggacttaagaattcaggaaagatcaaaataacgggcctcttccccactccctcgccctcccttccccgctgctggggggttagggaggctccgtggagctccagcactctagaaggatcgggtgaggcgcgaggccttgcgggcgggtgaacccaaggtggggtggaaggctccaacccgcccaatctgagcccgaggcctgctgagaagcatgggggccttgggatagttccagaatgaggatgtgcgtttctagctgctttgcgccctcctcccccaaaaatctgctaccacaattccaacccggcggcacgcccccaagactcctttgtcgccccaggggcgggacctgagctgtcgatttcaggagcccttcgtgacttcaaaagtcctgggcactgttgctcatgagtgctgcacaactgtcgccctctaaagccacctccatccctcactgggctggcctcctgagccttcggtgaggaaacggggttccgagttgcccgcctgagagcttaacagtctgactagaaaagggctaattcgctttctgtgcaaatctcttgagctaattatttaatctgaaacatggacaggtaaaggaccattggcgggcgtggggagggaggtgtggaatctttcccacactttttgtcaccttaaagaaaaaaaaaagacacccaaactcctctggtctgaatgggctgcctggaactgggcttcccggggccaggagtgggcccctagaagtttcccagtttggggtggggccggggttccgaagtctagagctgggagtcgggttcagcggcccgagacgctggctctcccagactcccttgcgccggggcagtgcgcgggggcggctcgggtccctcccgggccggcggggaccctcaggctcccggggcgccgcccaccagcccgacccggcggcctagaaatccccattctgctcccgcctcgccccggccggccagcgcagggcccctcaggcccgcaatctccaggctcaaacggcgaacaggtccccgcatccgcctgcctttgcacttgggggtgggagagccaccttgtgacgccccttctgcctctcaccagcttccccctttctccccgtcctgtacggttccccctggagccagaaggaagcccggtgccagccagccttcctgaaagaccaagcccgcgccatccggcttcctccagtggacgcctgcaggacccaggtgagacacggaaccggttggggacgcgagccagggatcctgaccggttgggggcggcgagcaagggatcctgacttgggggcgttgcctcccggaatccaagcggccttttgcccgggtctcccgagatgcatcgaaattgagctcgtccacacagccccctgactgcgtgatgcccttttctgacttaaaacattccttgtacctttatttacacgatccaagttgcagtgtgcctagattttcctccaaggacaaaaatgtgaataaagcaatattttagccaaacatttctgtgtcaattaagaagattgcaattcgttccagactataaattctctttaacaactccctaaggtattcttttaaattgtttttcagcgttgctaaatgtgcatcataatgtgtgggagacttgtataaagtgaatcaatttatactcagctgattaattgacccgatgttaccacctccaaggaggcacctttccactattttctcattttttccccaacacatgttatttgttagtgaggaagctgcgtgcacgtggcattgtataaagtttattagacagacgtggcccttaaactaggaagagcttagtctaactctaaatctaaaattcgacatttcggtaagttgtgagacaagatacccaggttgtttgataaaccagaattgaacataattttttaaaaatttaaatcacaggaatgtttttcttgaaggcatccagcatctccagttagcagtactgattttttttccccccaacaaaggaacactacatcaacactgttggcggggacctggacacagaagactcctgtttcaagaaaatacaatcatctctcaaaggctgtaatttatatgcattttaaaactctaggcattgaaaaccacccaagtgtcccaaatagaagggtaatatataatcaatcactcagtgtaatattatacatcctttaaaaatgttattgggaaatgttttatgatctgtaagtccaaggaatcctctcccaccatttctttccccccgctgttcccccatacccacacttctttgttccaattggcatgtaaatttggttttcccgccaaatgagtcagtcatgatgggaacctcaactgatttgaacagatgtgtgtcaatgttacttggaaaactagatgtcaataaccagggtcacagaaaaaggcagtggtcacaactctgtaaaaatgtatgcatgcacacagacaagaactaaagtggaaccccacacaggaaaacagtgggctgtactccagtgctgggacattgaatgactgtatgctgcttttgatttccgtta

SEQ ID NO: 12 - DNA, 68031 bp, Homo sapiens
gcaccccggccgtgacgtcacggcagcgcgccggccgcgagagagggccccgtcgcgaccgcgtccccttgggtccttgatcctgagctgaccgggtagccatggccttgcggctcctgaagctggcagcgacgtccgcgtccgcccgggtcgtggcggcgggcgcccagcgcgtggtgagcgggcggcggggtggcagggtggcggggtggcagggtggcggggtggcggggtggggagcagttccacatctcccccggcctctggcggcggctcccaggtcgctctccgggtgggtttgggggacccctcctgcctccggaattgtttggtctttggtcgtggacagacctcagggggccacgagcttctccaggccattttatctcagctttaagcaaaacgctggagcgcggaggtgatcagggccccgaggctgccctgatgcgggaggcccgtgtgcaggtggcaggccgggggcacacgcgcttgtcattagataattcacgtagcagccctgtcaagagccgtttaaaggtcgggccctgctgggtgcttgggtgatgccatgttgagcagacacggagttcagtgcttgtgtccgcttccttttgcctttactctgactgactactctcatttcttagcattttgcccccaccttcttcagtgaaatcgtttcatacatttgtaacacagttggattgctttgtcacattctgccttacatcttgggatccttctacctaatgcgttttttaaaatgtgcatacattgagcgcattctttgtgctataaggttctatggattttttctttgtgctataaggttctataggttttgacacgtgtgtaatagcatgtctccaccattataggttcgtacagagtagcttcactgccttaaaaaattcccctctgctttacctattaaacccttctttttctccaacccctgacaaccacagatctcattaacatttccatagttgccttttctggaatgtcatataattagaatcatacaatatattgccttttcagacgccttgaatacttggaaatatctatgtaagattcacttatgtcttcgtggcttggtaactcatttctttttaatcactgagtaatatctcattgcatggatgtacttcaattcattcagcaattgaagggcatcttggttgcttcaagtttttggcaattatgaataaagctgctgtaatcgtgtacatgcagatttctttttggaaatacatttttatatcatttgggtaatacctggaagagcgattactcatgtagtaagactagttttctaagaagctgccaagccatcttccagagtgactgtgccatttgactcccaccagaagtgaaggctctccttgttgctctgcgtgctcgccagcatgcggggctgtcggttactttggattgctatccattctgatagctgcgtagtggtatcttgtttcaactttggaatatctcatgatatacagtgttcatcttttcatatacttatttgctatctgcgttaatttcatttgcgagaggtgtttacatcttttgcccatttttaaattgggttgtctgctttgccttgttttgtaacttgtttcttccttactcttcagttatcaaatcaagatcgaaaaatatcttgatatttcatattctcctgttttatttaaatttcactataaagtattttaatatttttgtgtttttctgagtacttagtattccataatatggatatgccttaattttgtttaactattcctccgttgttggacatttaagggtttctatttgcatttttggtgttacatcatacttcattgagcatccttataggtcaatcttatgtatatactctttgaatggattcctaatgctgtagacccagcgtcctctaggtttcattaccattagcagtttaggatggtactcattgtcttgtcctaactctgtaatcattttttaaattatttctcattttgacacatgaaaaactaatgtttccttgttaatagtcttttgtttttttgtagcaaggttgaccactttttcatgtggtttttggctatattttataattttaaaataagctgtgtgtttttattctttgttttcttattgttctgtacaatttctgtatatagtaaggttattaccccatcatatctgttgaacttcttcagtttgttttacttttggttatgtttcttttctttttttggaaggaatgttcccactttagtgtggagagtaaattgggctgctggagacaggcattgaagcaggtctttgccttgtagatgagaggtgtgagggtgccgacagagtcagcacatggcatagggaggcgatgcagtgtccagagagtctgaacagttaggattttgtgtgtaattctgcagttgaaggaaggagaaaggtatcaaagacgacactcaaatttgctctcttttgcttgttaggtagtggatattccttgctgtgagggaaagcagacttgggggctaggatatggatgttgcatttcaccttagctctgttaccttcaggtgccttcaggacatctaggtggagctgtttaataggcagtggggtaacgaggtcaggacatggggacagaagcttggattagagaaatgttttttattcccttcccttcactcctgagcttccctccatccctgtctttcttcctcccgtctgtccgtccatccatccatccatccacccctccctccctccctccaatttttattgaacatagtaaacatatttaataaaaatttcaggcattgttccagggcctgaggatttagcagtgaacaaacagacagtatatctgcctttaacgaaacttacatggacagagtggtgggggatagacagataattaaacaaattaataggcaataaagatgtagatgttggcatttttatcactaagaggtttcttggtatttttacctaatagttactaatgcctacaggaaccagagtggtcacaatgtgctgctgtgtgattttgtgtttttcagagaggaattcatagcagtgtgcagtgcaaactgcgctatggaatgtggcatttcctacttggggataaagcaagcaaaagactgacagaacgcagcagagtgataactgtagatggcaatatatgtactggaaaaggcaaacttgcaaaagaaatagcagagaaactaggtatgattttatgttacacagaatgatacctttttctcagatatatggttgcttatttcactggtttttcttcaatattaatattaaataatattaaatatttaataattgggcctaaggtgggtatttcacatttttgtttattgaaaaagctgttttataaaacgaaacaagaaaaagctgtttttaatcttttatgtttggaaaatttgtgaaaatccatgctggttgtcaatttgaattggaattttatgtgggcagtgtaagcagggcacttccacataaactgtcgtgtttgaactttgtgacagcctctgaaatagagccgaggatggtactcactcacagatgggtgtactcctgagtgagcagatgccacatagctgggtcccaaagccaaggttagagccccttcctgactcctggtgcagctgagtgtccattgtacctttctgtagcacctgcatgacagcagctgcccgctagagggggctcctgtggttacagggagcagtcctttcaggaggaacctggataagggcactgtgcaagctctttcgctcacatgcttgcttgtatatgttgtgtgttcccttcatacgtgatgaaacccaggcatgtaggtgactttctctaggtcattggctccatccctggcggtgagattcgggcgggctgtgtgttttggctagtccccactgctccctgcggggagtgagtgatgtgcatcagactgcatccgactgtttctcttttcaggcttcaagcactttcctgaagcggggattcattatccagacagtaccacaggagatgggaagcccctcgccaccgactataatggcaactgtagtttggagaaattttacgatgatccgagaagcaatgatggcaacagttaccgcctgcagtcctggttgtacagcagtcgcctgctgcagtactcagatgccttggagcacttgctgaccacaggtgcagtatttctgggcagttagatctgttctgtacttgaacactattctagaattcaaccacgttaaattgccactgagtcgagctttcctttaagggtgtttgatgaggtgagttctgtctttccaacaagatcatgaatttcttgagattgtgttatttttgcttcagaattaatttaatgctgtttcactatggatactggagtgagatttatggattgtatagaattctcaaggcactactttaagcttctatacttacatattcatttatatatgaaatgtgtcaaaacaaaggggtaaagagagcacagaagtgtccaggaggaaacgggatcacacttatgaagactgtgcatgtgccatgcagacagagatgtggatgccaacaacatagggttgtcccggagggcccagagataggccggaatcaccataaagccacgaggcagacgtgaatcttgataagatgacggggggaggcagaacacacagggtcccataggccagtgcagtaggggaggatgcttcccttgaaggtatccaaagcagaaaggaagagctgtgtactggggagcctgggagacggaaacagggatcagaaagtatagttaggagaggaagggaaggtggatgaaagggcatgaacatggactacttgtgtgcagaatgaggttagggtccagcgacgggttactgtaatcattctgggaaacagcagtgcatgctagacatcctgagagttggaccgcagatgcactgccaatttttggtcaaagctaccatgccacggcggtcctcagttcacaggtagcagcaaatggcacatctgtgtgcggagagagggagatgggtggactcttagggccttcgtgtctgttttatattgcagtgcttgctgctttcgttgattggcagtgcccctgatgagcttctcacgcacaagctcagccgccactagggttggcttcatggggtctgagccgtgagaacaagaatgtggttttcactgggagtggccggctcacaggcttcttctcagagctgagctaggagccgctgcctatgctccttcaggtctccacggatgcagtgtgtgtccatgacacgtatctacacagttgtacggtggtggagttattgtcttgctttgaaaaagttgaaaacattttattagtgcttctttttttcttatatgaacgtaaaccctgatcttggttagtgttactcctaagaaaacaatgtggtctgctgtttctggtttgaggttctttaccaggagccaatccaggagctgatgtcgtagcgtggacttcacactgacatccaggcttactccacgttctttttttttttttttttttttttttttttttgagacggagtctcgctctgtcgcccaggctggagtgcagtggcgggatctcggctcactgcaagctccgcctcccgggttcatgccattctcctgcctcagcctcccaagtagctgggactacaggcgcccgccactacgcccggctaatttttttgtatttttagtagagacggggtttcaccgttttagccgggatggtctcgatctcctgacctcgtgatccgcccgcctcggcctcccaaagtgctgggattacaggcgtgagccaccgcgcccggcctccacgttctttttaaagcattcttcaaccctgtcttctgactactcatttcttaaaatgaaaaagaaacattttacttgttaaataaagccttgctttttttggtgctatagtaacctatttcccatttagaaaaaaaaagtgcagcttgctcccatctcagtattcttggggcaaattggaactgggttaacgtattcattaaatatttagtgcatgtctgctgtgtgccagacccattctgggagctaagggcgccacagggagggaagcctgtgttttagtagagggatgaagactcgatgtggaaacaggaatgtcttgccccaagtgagtggtggctgctctgaggaaggaggctgtggggagaggctgggtaggaagattaggggaggcctctgcccagacacagcagggctgactgcaaggaggctggctggggaccctggggactagtgctctgagctgcacaagtgtccgtcggggctgctgtgatagtaacacagccagtgaggctgggagtggacagaggtgaggttgagaagtagcccaacatcagtagatctgactggaatggtgggggcaggagcaggatgggggtgggcactgtaggggtggaatacgttatttaaaaacaagcactttttgtattaaccggatgctttctgttatagctgacttaatgaaacgatgttatattgctcaaaactgaaaagatacttcagtttttgaaaatggtttcccacttacaaatatgtctatgttcttttcagtattttggtgtggaaatggaattgtaaatgattgttattttcttttctctggaatgcagtgatcagttgacagtgctttgctatctgtctgattttcaatttctgtttgcctatgtttaaacaggacaaggtgttgtgttggagcgctccatcttcagtgactttgtgttcctggaggcgatgtacaaccagggattcatccgaaagcagtgtgagtcagcattgcagacccacttctgggtgtgtggtgcgactttgcaagggctgtgatagactcaccttgcacttactgtgtttatgaatgtctgttagatagatgaataaatgccattacttaatcggtctccgctggaaaaaggaacttcctaagtatcttccaccctttctccctcctgaaataggtgtcttttgtgctgtcatgtctccctgtgaaagcagattggagccctggacctcaaacacacgcagcttaaagtgcagcccccacagcctcccgttagaacctcccccgctcttagcttgccctagcaatacctaggctgtagctctaattgtaacagactttccagtttctagtgtgtgattttgatgaattgggatgttagccctgccagttgccagcatcatcacagtgcttccctctgacacgctgccgtttttcaggacagtagctttgtgttgctgtattggggaaggtctgacaagtggcaaatggaaaggaacaaagaccccctggtttgaagcaggctgaccttgaggagtcagggtggggttggggtgtctgtgactaggactgtgttgggcggtgggttgaataggcctggtggacagtctgactgacggcattttcatctgtagactggggtggctggagccagtggaaagctggaatctgggagctcagaggaagtactgttgattaatgaaagaggaggccgaagcaagccaggtgaccattctgtggaggaggcgcctgcttctggctgcttgtgtgtcctggtgttgccggtactccacctgtgagcttgccgcccgcaagagcactgcaagcccgtgcttctgataggggctgatcctccctggacatgctgagcagcgggtcaggtcaccagcaagtgtttctggagtgcctgtggtgtggcaggctctcttaggtgctagggatatgaatatgaagaaacttaagacaaggctcccacgggcccggggttgggggctgttgaaccaatggggatggttcattgtaataaagtgtacttagcactcctgagcattactcctgggtgctttgggggcacataggagaaatgtgtaaccggctgggagatgggatagtgtcagggacagctgttttgatgaatggcctgtcatctgtagcgcagtgggagtgagggacgtgtggggatggtggagaagcctgcgtgtgccacaggctggtggtggtgtcctatagtgagggctgggtgctgggggagaatgatgctggatgaggctgcacgaggaaggagctgcgcctcggcgaggatgcttggcttctgtcctgaaactagtgagggaccactggaggatttttagcatggcagagacatggttagatgtgagtttaaaatggttgcaggccttcatctgaaggatgcatttggtgaggagagacggaaggggaaggagcctatctgggaggaaattggggtgggacaggcgtgcacagcagggaggctgcactgggcagtgggagttgccgctcaggagggacactgggcaggcctgggtgggtggtttcctgtgtgcacagtggggagtggcgtggacctgccctggctagtgggccgctaagggggaaggatgcacaggggcagtggaccgatgtggcttcatgtttgggcgttggattcctgagtgtgaggttcccatggcaaggtggcaggagatacctgtcggcatctgctgagtgtctgctgaagtctgaggactggcctgggctggagtctgcaggcgttgggggtccagcactgaccgtgagcatgctttccttgggaaagcccaaggggtgatgggggagggctgagaccagatcctttggggaccatttctggggtgatgagacccccactgagggattgaagctgaatgatcagaggtgcacaggaggaagcagaggggatgtggggagggttggttgttggtgtcacatgtgctgtgactctgatgggaactgagaagtgactgtcacgtttcacctttcgggggctggtgatgttagccagagtcgtttgagtgctgggctgggggaaagcagatcatgttggctaaaggacaggtggcatagagcaaggtggggaccacctgagaagtgggtgtactgacaggagtaagggtgagggtgggaagcagggtgagagcagactcggtgaagggaggtttcacctcagcagcaggagagaccggcctgctaccggtccagcagtcaggaagcagacccgaggtcccgtgtgctctgcctggctgcgggtttgtgtttgtatgctcaggtgaacggtactccactggcagcctccgtcctttgctttgtcacacctcctcctgggtggtcttccttgttctttagctcgtgccgttcctgaccctgagccaaaggctcatcccacagttgcctctagagtgaggttactaggaatgctcactggaacttttttttttaatttaatttttaaaatttttatttatttattttgagactaggttaggagactggctaatgtttgtatttttggtagacatgggatttcaccatgctgctcaggctggtcctgaactcctgggctccagtgatctgcgcccacctcggcctcccaaagtgccaggatgacaggcgtgagccactgtgcccagcccatttcctttaaagcaaaatagttgtctttctgtggaccctagcatggccatctgtcacttctggaaggttccacacgtgaaaagctgcagaggggatggcttctcagcatggcctctccacatgcactggcgtgcactctctgttggcttctgggaggtcgggtgtgcatgagcatgtgcaggtgcagagtgctctgaagagcggcagggttcccttgggtggcacgggccctgcgggtgccccctggattatgcattctgtgtagtgatcactttaggagaattattcctcagccttagctgctttcaatttcatgttgtcactaaatctgactcagtagatacttctgtgcagctgattatactactgaaacgggataaatgcagcttgatgattttcagctgagttatttgaaaaataaagtatttaaagctgttctttattcttcagagaagaccagactcttgtatctattattactgtgaagaaatatagtagcatgtatactatatacctgcaacatatatactgcaagtatatggaatatatttcagttcaaagatcactgaactgtgacctccatcttgcgtgacctacgtcttgcctcaggagcaaaagtgaacccttaaatgtggctaagatgtgctaaagatctgtcttttaggatgattaaggtcacagtttaaatgctgctgttttactctgtgtaagtagcttaatttctctgggcctcagacctttggtttgtaaatacagtggaggcgacaagccctgttttcagggttgtgggcaccacagctgctgtctgcacatgccccgtggcacctggagcacagtcacatgccatgtgtgtggtcagtgcttagaactgtgaccgagatagggtttgtagattggtacgtggctttgagaattgcgtgtatgtttgcccttttattcaaggaggagtgtgttttggaaacccgtgtggggactggtaggtgacagcgcccctttctcctatgtgccaggtgtggaccactacaacgaggtgaagagcgtcaccatctgcgattacctgcccccccacctggtgatttacatcgatgtgcccgttccagaggtccagaggcggattcagaagaaaggagatgtaatgcagttttcaatcaaaggccaagcatctctattttgaatgtagatcagcactaaaagccctgttttaatagcatttatactaattcctaccagtcctcacgaggagggtgacacacaccctgttcccacttgagagagggcatctgcaggggtggaggggagaccccatggctcggcctggtgccacagcctgcgggcctgccgcccaccagtgctctgcggtcccactgtggtccccgagtcccctcagctgtttaaacttgggaggctggtgagggcctcctggcagagcgtcctccatccctctgtcacgtacctttctgttctctgatgaggtttttgtgtcctatcgttttcttccacattggaagcaatttctaatatccctcatcacttcaatctatttaacgcaaatcgtgcctctccccctttttcttacttaccaattctagaacagtagagcagtgatatccacacacatccatttactctttgtagttttcattggatcttaattaggtggcctcgaagcaacgccttttgaagtgaccctgtggccgttggtagctctgttggcggcttgatggaggatcctgagatgaaacaaagaccgtctttgccctgtggcgagttctttgttttttttttttgagacagagtctcgctctgtcacccaggctggagtgcagtggcacgatctcggctcactgcaagctccgcctcccgggttcacgccattctcctgcctcagcctcccaagtagctgggactacaggcgcacgccaccatgcccggctaatttttttgtatttttagtagagacggggtttcactgcttgtttaatactatgttattttttcctggaggagaatatggtctcctttttgatactgtgatgaaaatgcagggctacctgcctgttcctcactctgatgcccatcctcagtgccggaattcttgtaggtgctcaggaaatacctctctggatggtgggttcttgtcagggcaacagtaaagctctggttattttttgctgctcctgaaagatccatgggactaactttccttctctgttgcaatagtagaaacagcgagatgtctatgtatgcctttctattgccactctggaacttttattgtttaagcatatgcttgtaagtatgttgtatagctagacttctaagaaccttccatcaagtggcaaaaggagggaactgcaagttcaaaatgtttgtttctcagtggactaactggacacctttgcttattatgctgacatttattgagaaaaacaaagtcatacatttaacattctctagataattcttttgttatctgggaaaacagtatttcaaaaataattctgaggtctaaagtagagctgtcaacttcttaatttttccaagtaaagtcttcaatactgtcatcaggtaaaattaccccattttataaaagacatcacattatcagtaagtctgtgttcttattttgatttttatttcaatgcagtctgtgtctcagtattgcaccttttgggaataactgataggaatatccgaaaaccatttctagattctaagaaaacagtcaaagtgatcaataactacatattttatcaagtaacttcaggtcagatttctgagatggttgtgttatgttgcatgttatgggcttatattacactagagtttcttttataatcagttaacatttaatcttattctacttggcacatagctaatgatagagatttagaatcatatcacctcttttatacttttgttgatttcactcactcctctaatacagagcacctcctatatgcaaggcgcctgtgccaggcacctaggaggctgcaaagatgaacaaagatggtctctgcccagacaccaagtccttattggaaaatagaactcccaattactgcctttcccccttttgacagagcaatgaagtgcagcattgcctgtatcatcctttccctgtgccccgtcgcattactggaattaatacatgttcagtaaatattctttgaatgatagggtttttcttattttgaacagctttaatgaggtataatttatgctccataaaattcacccattttaagggtacgactgaatgattttgggtaaatttaccaagttgttgccactcttgccataatccagttttagaatgttttcatcattttgtaggttgaaaccgcaggcctattcatttctttcttccttcctctctctcctgtaagtgttgattgagcatccaccctgtcctagaccctgcttggtgctagggacataccagtgagcagggtggatgaggtcctcacccgtgagctcatatgctgatgggggagacctacagcaagcaaggagataaataaatacatcaaatagaggtaaatgatgtgaagaaaacaaaacgggctgagaagatagtgtgagactgtaaggagttttaaattttaaaacttgctactcataattagatattcaagtttctgaaattcgcatagtgcatttcagatgatgagagaggtgacagccgtagaaagtgggagaagtggttgcggggagatgggtgagcgatggaggtggcgagcaagttggagagatgcagggagagtcaggtgacaagaagagagtgtgctgaggacagatggcggacagacaggccgctgcccccaatttttggtgctctttcattcctgcactcaggcacgaggcagacaggaaagacaggcagtgctgcttcgtaacaggcatctttcttgccctaagtatacatcttagaatgtgtggagaaagtcacgctatgggagcacttgggcaggctcaggtgttcactgtagtagaaggagaatgactctagctgatgttgggaccctttgctgtcaccccgcagtccccacagtgcccggtgtgagttgtaagaaaatggtggtcagtgattgtcttcgcattttatatacgcacaggtcaaagagaatgaactctaaatgtttcccagtttgatttttctgcttctgtttagccacatgaaatgaagatcacctctgcctatctacaggacattgagaatgcctataagaaaacctttctccctgagatgaggtgagccaaacacacgactgatttacagggctaaaacttcttcgccactcgtttcttaggccccaacagcccagggagttttctgtcttatttactgcagtggatattgtctgagatgtttaatctgatgtttataaataagaaaaacaggagacatttcagtttgatttttgtggggtttattggtttatttgttttggtttgcttatcttgtcagtacttttgctctgctatatttctgaagttttttgatgctagaagtaaaccaagctctattccatgacaggttttaccatagagaacttgtgtatttttacttcaggtggcaactaaacattcgtgtttacctagaaggattgattggaagtgtattcatggagaaaattcatgaaagataacactttctctagacattcttaattgatgtccttgagagatgtttggattagatgaaggaaacaccaccagactgtttttctttcttttccccctttctttctttgttgaaagcacatggaaaatgtggtttcactcatcctatggcttgtcattctgcgctccttgggtatattcgtgtgtaaggaatgtctgccacactcattcacgtccagttaaactcagattgtttgaataatgcttgaattgaagatttttatactatttctcatactttttaaaaccctaagcctctttcggtgcctaaaaatctcatgttcttgttgtttaaaatttcaaagtaactgaagttgtgaataaaaacaaaagtatagcaattttagaaaaaaagttttatttttacatttattttagttaaatactgaatatttacaatgaacagccttagaagataatattgttagaccataggtaataataaaatcaaaagtgaataagagaaatgttctattcagggagttttttctgtaccgtaagtattaacgtttatgtcatctctgcttgtttgtggtgagcgtttctttcttaggtggtaagaagactgggtggcctctggcttccttttaacctgttgtactgccctatttccaaggccacaataccaagggaagtatctagagccaacgtgaataaacagcataaacagagatagttgaccctagagtttcaggctcaaaaattactcttggagatcttctggcttcaaaaacatcactgagaaagagctttgtcataatttctcaaatggagtttctagctacaacatcagcaaaataatggctggtttcagcctgtgcacagggcaagagtttcttttactttgccgccctcatagactcgttaagcctcaagcatttatttcttaccacttggtcttgctgtgtttttaactcctgttttaggaacagatacagtctctgttcattgttaaagtagatcttatctgacagctcaagccgtatggattgatgggagccacttgatgtaggggtcatttgtcacacattgaagaatgagtaccagatgtactctatgcagtatgcattattttaagtgctgaattgtagaccaagatcaaactgcagctttgtgatggacttggatcttaaaagttttctcatagaaattcactatgaaatttggctgaaactattttttgtaaaattgcaagaaacctatgacgagttgtattttaaaatttattggccattagcattttagaattcaggagttattttccaacagaaacaatattaggtttcccgggcttgtatatttaaaccattgtttagttaaatactgaatatttttattgttagatcttaggttagaccttagaagacaatattgttagatcatagataattaataaacagtaaaatcaaaactaaataagagaaatgtttttagttttaatactagtatttgaaataaagcagattgacctgacaagatgatggctccgttgaagttctgtgtctcctgtctttgagcagttcctcctgtgttagcccttctctctgtcacgtgctgatacatggtgatgcttcactgtttttgtatttgttgcttatgaatgcataaagagcattgcagccttttccaaaatatttgtattgtgggattttaagaggtacaatgagctaactctcataggaatgtgtattttctggctttgtcaatatttatgacccagatcttaggcgtacatgtctttctcctcattaccttaattgtgaatgtgttaatgagtatcaacttagtttcaccaacatttggccattcccgcgttcaacatatacttatttactcagctccaacactgctagctcccagtgtcagtgttagctgagacacagaggtacacaagacagagtagggaaggcctttctgagaaagaatcgtcacctctgagatttcagagacaagaagaggagcactgagtgaccagcctgacatgtagcgagttttgtaactgtctttattgtttcagattgttctaaggtgggtgaggagctggggaggctctggaagtattgaaataacttgggggttcagtaatacagcttgtggctctcctcggccctgagctacctataggaataaccaccattgaggttgcacgtgaactgctggcccagccctttatgggggtttcctccagatccctgactccacacttgataccttcttattttaggcctcctttcacaaggcagtgggaatgagaggcaggtgtgactggacggaggcggttttatttgtctgttgccgaggttgttagcatgctgaatggaggcgcacagaagatagaaaatggactctccaggttgctctcatcaggtagtttggggtctggagctcattaagggcaggagccctgtcttccccaccttccataccccacacagcacctggctcctggtggggcttcagctaatgtctgttcagttatgtgtgttgaacgaaactgtcacatcgtcctgatctctcatgaccactcttgtgcaaatatgtcaaatagtttgtgacctttcatattgctgtgtgagaacaaataatgtttctgtgccagccctgttcatcagggatgtttaagacctctgtctcctatacacttcagttgaatattcacttaggtgacttgcagagggaattattctcctttgtcactttgtgcctttctcttcgtattaacaatgggtagctgtagaggttcaggaagcaatacagcaagtcctgtaattagtgtggccttttccttgccagccctaatggcaaatgcagtaagttactttcctcactatggatttattgttcattctgcttgcagtttctgaccatttatgttgatcttaagggtgctgtgaggagtgcagtgatctcgttgcagtaagaatctgttatccagttgtatgactctgaattgtgagttatagacttgtgtggaacagatgtgttactgagtgattgtagagcttgaagacttttttctttttcctacactttggaagtgatgtgagtcagtaatgatgagacttaataaaatacaagcactttacctgtactacgtaatttaatcaaccagtggtctgttgaagatggtcagcagagttggtgaagtttgtttggtaccattgtaggggtcagatgctgatttcagtatgagaataaatagcttgtacattcttggagtatttacttaccctgtatgtttacatcctaaatgtgtggagggtgctctggtgtaaagatgccctctgtgcctgtgctcatttaggccctgctgtggagggtgctgtggtgtaaagatgccctctgcctgtgctcggttaggccctgggctgtggagggtgctctggtgtaaagatgccttctgcctgtgctcggttaggccctgggcttcgttgtccttccgtgcagcgggcactgcctttggcgatggtatgtgcagctgctgacatggctcatgtaccttgctcctgtggacagtgatggctgtggtctgtcacgcccttggcttgggggcagtgtagtcaggagaagggaaacgaggaaatggtcctgctgttgtcactgtcaagccagccatgagaacattctggcttttaacatgtcctcctgaaccagtcaagctctaatgcaccctcacatgcccagcacaatgcccagtgcagagaatgtgaggttttaaatttgagcaggagactttagcggtatgtattcatttgtacatttaacttcagcttggaaaagtttacactgaatttcatcttgttttttcttacagtgaaaaatgtgaggttttacaatattctgcaagggaagctcaagattcaaaaaaggtaagaaaatggttgaaaagttgaaagttattcctacatttgattcatgtgtaaggttcttgcaaatcagatcgtcagttagattcccactggtcttaacaaacatcactgttttatcacctgaaagcagtgccagtcaaacccatcatcacactcccctggccatgaggtttcgagtttctttcaagtaattcggtttctacgatctgaaaattacagatgtcacagaatcttgggtcatccactctaccatttttattaaagagatggaaaattgaaagttggattagttaatgggaaagatttacatgtaaagataacagttttccttaaattcgtgtgttttgtgaaagtctagtaaatcttggtgtagttttcagggaactttatgaataacagccagacaaacattaaaacatctgaagaagaataacgaaagaacatttgccctctcacatacaaaaacaaactatacgattgtagtaaggagagcattgtggtgttaatgcaagaattaataaagagcttaatggaacaaaacaagagtccagaaacatgtatgcacctgtgtgtaagtatcttcagtttggcaaagttagttccttaaaggataattacaaaaatgaagtagaggaaaattgtttcctaaatggtactgaggcaactgagcatccatttgttaaaaaacaagttttttattttgtattttatatattaagcataaattactaaaaacaaaacgaggtgtaacaattctagaagaaaatacaagtttcaggatctggtcttgaagtgtgagtggtgcccgtgtaacagagaagctttgcatagttggctgctggggtgacaagcgtgcttcagttgcctctcagcattgggagggtgagaagagggaggttgactgagcttttctgcacagagagtagcattctccttgcagagggaagccctgcattctcgcccaggctctcctactaccagttgtaaagttcttttgagaccttggtttattctactcagactgattaaattacatttcattttctcctccgccttctgtttctgtttttagagtatttatatacctttgagagactgtttaggtggcatgtatcttagaagaagaataatacgttttgtctccaatactatgttatttgagttcatttttgaatttactcaaattcccgaaactaaagagggttcatgagtttggcctgttgtgaggagagaatgcgtatggaaagattactcctctggaaagtcagactgtgtagacagccagccttgaggccgggcacctagatcattaggtctctctaggtaatgggtttgtatcttattcttttgtcattttgaggggctaggttttgccttttagaaggaacttacttgggaagaaatgagtagcctgtcctgaaggctgatttttctcccctagtcttcattgttctcacctgtccttttctcccagcctgcagggtaatgtctgtcctacttgatccctgagtgttagctaggcaaggccatactgtgatgcaacactcaaccccaccatttcattaaaggtcagccagcttcacttccattctgactgttacggtgtgattcttcctgccaaatattcatagcttataatgtattaaaatgttacctcttggccagccatggtggctcacgtctataatcccagcactttgggaggctgaggcaggaggatcgcttgagcccaggagtttgagaccagcctgggcaacgtggtgagaccccatctctactaaaaatacaaacatcagccaggtgtggtggcatatgcctgtagtcccagcaactcgggaggctgaggtgctgaggtgggaggattgcttgagcccagcaggccaaggctgcagtgtgctgtgattgtgccactactttccagcctggatgatagagccggaccctgtctcaaaaaaaagttatttcatttaaatttctaaaatggggttctctgtttaaattggaatttttcctgtcttaggtggtagaggacattgaatacctgaagttcgataaagggccgtggctcaagcaggacaatcgcactttataccacctgcgattactgtaagtgcatctgtgtgggggctgctgcatgtctggggtctacttgcatgatggggaaacttagggaagtttgaaataattatgtttcaagttaggtgttagcagcaccaacccaatacttagaggtattttttcttccaaacagctcctgaatcccctggtctgatacttaatttattgagtgccattattaatttaacaggcattttgcttccactatgtgcaacaccgttccagatttaagagatatagtgtcagataaaattcttgatgtctttgaaaatgtgttttagtaggtgagacagagtaaacaaatagataaaactgcgtcaggtcacaaaggccagggagagaagtaaccctgagtaacagggtggtgagtagctaggggtgacaaagggcctctctcgggatgaggcctaagtgaggccaggattgggtcctgtgggccgtggggtgagcagagggcaggggcttggcaggtgcagaggctcttcaggcaggagtgtggtgggaaggtgcgcccagcagccaagccagtgtggccagaaaaagtgtggggaggggaggccacagcggaatggagcaggactaggagaggaggccatggcggaatggggcaggactaggaggggaggccgcggtggaagagggcaggactaggaagggaggccactgcagaagggggtaggactaggaggggaggccacagcagaaggcggataggtcttggtgcgtttggtgggttttcttctgatgagatgagatgccgtttgggggtttgaagcagaggagtaatacgatatgacttatatccattcagctattgtgtggattctttggtatctattaaatgaaaaacaaaaaccataccgattaggtaaggttgaaaaaagctgtcttcatctgcaccactctattgaaactgctcctgccaaggagacggcctcgccattccagatgcggcagacccttgtctgtcttcatgctgctccctggccctggaagcagcaccgctgcccctcttctccactcccttctcctggttccatgccctcctcctcccccactctctcactcctccaccagctgctgccttctggggccgggctctctttttctggttccttctgcctgctgctgggctctggcaggcacagtgaccccgggcagtgtctcgtccgttgaattcagtttcttgaggacgtacctagtcacacagctgtggatagcgtggataccaccgtaggtcttggcccagacctttaccctgcacacccagcaaatatccctcggctgcctcttgcagtgtctctgtgcattgaccttcccaccggtgatccccagctctgcctcttctgtcctggctggtgctggccacccgggaatctcatcctgcttgggtctgtcctccaccacccaccccctgctgcttctcatcactgcaacgcccagttcctggtacaggcctcatatccagcgtgcactcaggagatgtatctggagtgagtgactttgatttcttttagggctataaattctacaaaattcagagatgattttgtaatgagaagtgctgttgtatcataattctgattatttataaatcaagattggagtaatttgagggtctttgacttgtgaaaatgcaggaaacatgagtagctatttggggatctgccttttgtgttaagtctcgagcccttggcctgagcctgccctgtgctgcttcctgcctctacccaggatgctctgtgcagactgcaccaacactttgcctctcgagggcctggaggcacaaggatggccggggcactcaacttccctctcctcaacgtttggatgtaaattaggaagttggtgcctacagatggcagctctgttcttggccctgtgatgttggtgttcttaggccgttggtgcttaccttctttctctgcctgatgggatgtgagtgatacagtagtctcctaggatgaccagagggacagctggctcactgcacatgtcactaaaagttcactgatcaaaatgtaaacagaatgtgtaataagtttacttctggccaggcagcgttcacgtctgtaaacccagcacgttgggaagctcaagtgggaggattgctggagccccggagttcgagaccagcctgggcaatatagtgagaccccatctctacaaaaaatttaaaaattatctgggtatggtggtgcatgcctatagtttcagctacttgggaggttaaggtgggagggtcacttgaacctgggaggttgaggctgcaatgagctgtgttcacgccacggtactccagcttgggcgacagagactctgtctctcaaaagaagttcacttctgtttgatgtttttagtacagcattaataagcaaaaaataggtttacattaaaaaaaactagtcattctacttagtttgttaattcctgcccccctgttaaaatagtatttgcaaaatcagttttctagttagtggaatggatactgaagggtgagcaaggtaggcacactgtggggtcctcatgtcagactgaggagacgggaagggtcaggtcagcccttagctggctgtgtgacttgggacaagtcactttatctgcctgtgcctccatatgtaagattatggcagtgaggtagagtgctaggccatgtgtattgaaggaaaaaacaaatataaatttcatatattatattccatatactgactactgtataaaatggtgttaatctaaaagtagcttactgaaatgattggctctctagaaagtcttttgaaaggaatctagcaaatcttccattagaaagtaaaacaaacaacaaaacccgctttccttgtcttttttttttttttttttttttttttgagtcagagttttgctcttgttgcccagactggagtgcagtggcgcaatctcagctcactgcaacctctgcctcctggttcaggcgattctcctgcctcagcctcctgagtagatgggattataggcatgcaccactatacccggctaattttttgtatttttagtagagacagggtttcgccatgttgggcagactggtcttgaactcctgacctcaggtgatccacctgcctcggcctccagaagtgctgggattacaggcgggagccactgcgccggccttccttgtctttctgagccattactaggagatggaagtaaagcacaaagcactgcttttggcctctgaataaatattctgcatcctggagacaatggccaagggttacagtgcctactccaggtggacaacacatttcaacctgagggccgtgagtttgctgattgacagggcgaccgaccagaaattagaggggtcctctgaggtgtctgaatgtagaagtttctctgagtcattgaagtcagctgattattccctgtgcagccatttttgttgcaaagtcagtgtgtgctttgctgtgaactgtggcaagggccatcaaacattggtttattccgagtaattttaactttaggacagggatgcgtaggtgatggagaccaagaggagaaaataaaagtatatttctgagaagaaaatgattgttgtaataccagagactcaccatttcataaccaggtcagaaggatcccttgagagggactcagccactcacctgtcactgtgcccctgggcaaggggcctaacctctctgagcctctgtctccttgttgtaaagcaggaagaaaatagaagctacctcataggactgttgtggggattaaatgtgggaataatttgaaaggctcagaaccatgtgtatatatcataagtactaaagttttagggactatgttatgatactgtttatggtatattattatactctgattgtagatgcatgatgtgtttacatttctccattaatatttttgttctttaatactaagctttttttcttttactttttaagtagtatttttctgatcttagaaataatttacattaattatcctcaattcacgctttatggaaatctacagtgaagttgaacgaacccacctcctaaagacaaccgtgttgaagatgctattcatatttttttctgtgcatgccccagtgcagttgattgttgtaagccagattcccagtgtgccctgccccttggtgggagagctgaccttccgagtgatgtgctcaccacccttgcaggattgagcaccacagggcttagcactgctttgtgtatgtagttctgtgttgcttaacgacagggatatgttctaagaaaggtgtcgttaggcgatttcatcatcgtgaaaacatcatagtgtgtgtttacacaagcgtagatgctataacctgcacacctaggtggtgtggtggagcctgttgctcctaggccataaacctgtacagcatggtacagtactgaatactgttggcagttgtaacacgacggtaagtatttgtgtatctaaacataaaaaataatatggtataaaaggtgaaaatggtccacccgtctggggcatgtaccgtgagtggagctgacgggactggcagttgttctgggtgagtcagtgagtgagtggtgggtgaatgtgaaggtctaggacatcaccgtacactgtggtagactttgtaaacaatgtacaattaggctacactaaatttatataaaaagtttttttcttcagtaagagattaaccttagcttactataactttctttataaacttaaatttttttctttctttatatccttattctagaagtattttctgatttttaaaattatttatttttactttttaaacttttgttgttgttgttgttagttaagatacaaacacagtggcctgggcctacctggagtcgggagcatctgtatcactgtcttccacctccacacctttctcactggaaggccttcacgggcagtaacacgcgtggagctgtcacctcctgtgacaatgatgccttcttctggatgccgcctgaaggacctgcctgaggctgttgtacagttacttttttaaataagtaagatgagtactctaaaaatcacgatgaaatgtctagtatagtaaataacctaaagcagtaacatggtcattgatgagaatatcaggtattctgtactgtacataattgtatgtgctggactcttccacgactggcagtgcagtaggtttgtcaatgccacatcaccgcagacacgggagtcatgcgctgagccacggcgctgtgacagctgctgtgataggaagtgttcagctccactagaatcttgtaggaccacattgtatatgtgacctgttgtggatggaaacgccatgctgtgcataactggaaaccggcaggaacctgtcacatggtacaaacaacatgggtttcacaggaaagccacgggaaggctctgttgtgcactctccatcagtataactttgtgaatttgccgtaacatttccattttcccaaaattcagctttagctgcagctgtcaggttcctcgtaggaaacagatggcacatttgaccagagaacagaagagagttacgtaaaggaaccattgataaagagcagggcagggttgagggaagcaacaggatggtgagacacccaggccatccacagtgggaaactggcagttgagggcgggggcactgggttttggagtccagagctgctgctgctgctgctatggaagaggctgtccagcatcagatggagcccgagggggatggggaacccgcatgcagggaaccagcagaacaatcatccacccagctgtgcttgaagtcagagggcagtagagcccctcggatgcaaggagccagcctctgggcacagagcaccttggaggaatggtagagaggagatctaaagggccaggtggaaaacagccccagactgtccacccagagaatgcagaggacggtcggcattcaccgttgttccctgtccagaatgaaaacgtgcatccctacgtgaaacaggggcagccaccatgtcattgtgcggtgatgaccattcatagtcttgagttggtcactgcaggtgtttttcatataaagtagagggagaaagaaacaacctgccacagaattcctggagtccccgcttctgtggtgagttcggagacccaagttcactttggtagcttccttggttcccacagcctcctcccctctgccagcagctcagctccatgtggtccttacctggtgcagcatcctgagcctgtgtgctgtgggttggagccttgggggctccctctgtggtagctgcctatctctgttcagaataagatttatcacagtgaatgaggacagatacgcagacagatcaatacaaaaaaagacatgttggactctggagaaatccatgcacaggctcttcctcctgtgagggacactgacacattgattgagcaactttctcaagcagtgaaaaatacagtaacatatgggcagtatttctgcctggaaagccctttagacactcactgcccgtaatttttactgggggctggtcacgtaggaatcctctgcttcgcaactactcaggttccagactcccagaaagaaggcaggtgttctccataactcccatcgtaccctggtagggctgagtttgctgcccagcctcattagcatggggcactttttagaagctgagtttccagaagccaaccaagggccagcctcgcaaggaggccctgccacagacagcagcataggcctgctctgtgtgtggcgaaggaaaggctttctgagagcgcaagagctgtgcttttggcagaaaaacttcaggcaggggaggcaaatccgaacctaggagatgtggttttttaccttgggcagagcctgggattttaacaggactgaggttttgtaagagaggggcaagggaactgagcacagacaaaatcgcatgtgagtagtggtgaaccatgacgcttagtctgggtaaggaggaaagtgaaggagggaggggtgaggggactgaaatgacaaagtggatgagaggccaaaggcacaccctcttggaagagaaagtcgggaacaaaggttgaatatagaatcaaatcacctgcgcttctgccaccacagtgccaggattaacagttgaatgcaggttcttccagtctttaaatatttgtgtgtgcatatatttctaaatatatcttgtgtgtatttttgtattctacttccaatattttgagcatgttcctgttttgttaaacattttaaaatttgattttttcatggctccccatatatgctgcacttaccattgattgagatgcaaatcagggcttggcaaactgtttggcctgtgggccagatccagccgtcagctgctaagaatgatccttaacgtttttaaaggattggaaggaaaaggaaggattatgtgatggaaactgtatatagctctcaaagcctggtatttgctatccggccatttacagaaaaagttttgacttctccgacactacataatctgcataatttactgtttctttaaaatagatctcttggattatttcagtttcttcatgttcataatacagtaaagagcatgtagtaccccttcttgttcaatttcaggttacttaaggtataaaagtggtcagagtatatgaacgcattttacagctattgagtttttgcaaaatgattctccggaatatgtgtaccagtattcatacttggacctggttctctgaatttccctataaagaatataattaaacaaaatgcaaacaaaaactttcgattctgatacccatacaagtatttgttttactttgcattttataaacactaaacttcaatttatatttttattggctatttatttgctctttgtgaattttcccttcatatttattaactttttcgaagaacctggtttttgttttgatgatttatccagttgttttctgttttattgatgtataccctagttttattattttttctctgctttctttaggcttcacttgttctttttctatagattcctaagcttattgactttagatcttttttcttttctaatatagtcagccctttgtatccctgggttccgcatccttggattcaaccaaccttggatcaaaaatatttgggaaaaaagccaataaaaataacacagcaataaaaaaataataaaaatgtaaaaatacagtataacaactatttatatagcatttacattgtattagatattataatactatattattgtattacattgcattaggtattatacatactctagagatgatttaaagcaggggtgtccaatcttttggcttccctgggccacattggaagaagaagaattgtcttggaccacacataaaataacactgacgatagctgatgagttaaaaaaaaaaaaaggcaaaaaaactcacaatgttttaagaaagtttatgaatttatgttgggctgcattcaaagctgccctgggctgaatacagccatgggttggacaagcttcatttaaagtgtgtggggagtgtgtgcatagtttatatgcaaatactgtatgattttatgtaagggacttgagcatcctcagattttggtattagtggtggtctgggaaggaagccctggacaacagaagaatggttgcatatgcatcagtgctgtcagtttccctgtaggtgctgcttttgctgtatcacacaaatgtggataagttgtatttttattttcgttcaaaatgttttaaaaaatattttgagactttttctttgacccacatgttatttagaagtgtgttgtttaatctccaggcatgtagggattttctaggtatctttctgttgttgatttctagtttaattctcttgtggtctgagaatacactgtgtatgatttctctccatttacatttattaaggttttctatggccagtgtttcctatcttgattagtgttccaattcagcttgagaagagtgtagattctgctgttgctggagtgttgtataaatgtcagatcgagccgattgacggtggtattcaagtcatcggtatccttactgattttctctctgctgggtccatcggttactcagagttggggtcatcggtatctttactgattttccctctgctggatctgttggttactcagagttggggtcatcggtctccttacggattttctctctgctggatctgtcggttactgagagttgggtttaaatttccaacagcgctggatttgtctatttctcccttgggttctattagtttttgcatcatatattttgaggtactgttgttaggtacatagtttattatcttaggttattatcttcttgaagaattggccgctttatcgttatgtaatgcccctctttttcgctgatgtttgtccttgtttgaagtcagctctatctgaatttaatatagccactgcagctttcaattagtgtgggcatggtgtgtcttttttcctcttctatctcgagtctttagttttcttgtagatagtaagtagtaattgggtcttgtgttttaatctactctgacagtctctgtcttttaattgctgtatttggaccattcatgttagaagtgagcgtgaagataatcaagttccattttaccatgcttttccctgttttctgtttgctgcatttgttgtttctccctgcctctttttctgccttctctggatttcattgagcattttataagattctcttttatcttttcccttaacatcttgattgtactttaaaaaaatgtttgtagtggttgctgtggagtttccagtatacatttacaacccatctaggtctacttcgtgatggtgctgctgctccatggggctgcaggtaccgacggcacagtcttcttggctcctcctgctgtcactgtgacatggctgccattccttccacttttttttttctttgagacagggtcttgctctgttgcccatcgcccaggctgcagtggcatgatcttggctcactgcagcctccccttcctgggttccagcagttcttatgtatcagcctcccaagtagctgatactacaggcgtgcaccaccacacctggctaatttttgtatttttagtaggaatggggttttgccatgttgcccacctagtcacaaactcctaatctcaagtgatctgcctgccctggcctcccaaagtgctgagattacagacatgagtcgccgcacccggcctcttccactttttataagctataaaatcactcaattcattgttgctgttagtccaggaaaggccattgattttcagttttttcttattggaaggatggaaattacagcttccagccttcaccctttggagctgaagctggaagttccctctttgttttttaaaactctgttaacattttggactagatgcctatatttgtgtgtgtgtttgtaaatttacctaaatgatatactctattattcaaaactttgctttaaaaaacctccaccttctctttaaactgctctattgcagcggtcccaaacctttttggcaccagggaccggtttcatggaaggcagtttttacacagactggggcggggatgggtggatggtttcagcatgattcaagtgcgttacatttattgggtactttatttctcttattattacattcttatatataatgaaataattctacaactcaccatgatgtaaaatcagtgggagccctgagcttgttttcctgcaactagatggtcccatctgggggtgatgggagacagtgacagatcatcaggcattagattctcataaggagtgtgcaaactagatcccttgtatgcacagttcacaatagggtttgtgctcctgtgagaatctcatgctgccctggtctgacagcaggtggagctcaggcagtaatgcgagcaggggaatcggctataaatacagatgaagcttcactggcttgcttgctcacctcctgctgtgtggccaggttcctaacaggttgcagaggtttgtggcccggaggctggggacaggaccctgctgaaccgtgttttgctgttatgtctgaaatctcatagttaacagtagatgtcaacacagcgtctggaaggtgtttcggaaataatttgtctgttccacagcacttctgtggggcgggactccctcattttacaaggaggagaccatgactcgagagctcgagcctgccaaggttgtgtgactgtgtggggcatctcacctctcgggctgcaggagctagagctgctgctctctgcatcctctgtgtggtcctgtgccctgggccatcttgccttccctcctgccgtctgttcaggcttgaatcctggtggaacctttgactcctctgtcaaccataatcctagcttgaaccctcctttttccctgctgacccccttatcctccccaaagtcacaccctgcaggtcagtgtgccactttcagtgacttctctcccttgtctctaacactgctgctccccttggtgtgtaatcccctggttcttggtctctgctcctctgcctctttatttcttcatcccactcccaccaggtttatttttttaaaaagtcacagtgaccctgttttctctttacttgaatctttgagtggcctatcttcatttagtcataggtctgaatttcctttcccagaattaattcagaatcccagtctgccctggttctgcgtcttctaccaggataccaggcaatctgccaggcccttcttccaccaccacctgcccagtagttacctagaaatcctagcagtctttaaagcttggacgtaatcacccttttttctccctgacaccttcccttaactcttgtaggctgttacttatatgaatgtatatggtatccttgtttgttagtattagctactgctgggcatcatatgacatctaacaaacttacggagacaagggattgtgtctgacttgacctccctgtggtaacagtgtcattttctaaacacagtgtgaaatgtgtgttggttcgattctgcaccattcatgtagttatttagttatgtgcttatcggagcatagagaaggatcctgtaattcccccatagtgtatcaattatagcattccgttgttttaatctagctcactatgaatggctttgtccttttttctcctggtattttgcctttcttcctccccaaagatgtttcataagtttacaatatcaattgtgtttattttcatttgagtaccatttctcaattgagggactcaagtgataattatgaccaattttctaacataattattgtaaacatgccgcttaccagtgacattcattttatccataacctgaccaaattattggtttagaacatttctgcaccatctcagttacgtgttgccagtgtctaattatgtgtatgtgtatagctatgcttgtgctgagaggcagtaattgtatttttcagtcttgttcatatccacatccctaactgactggcgcctgcttgggctggtttcagtccagtcaggacctccgaggacacgtcaggcctccagctgtgcaagctcctctcagaccatccctgcttctccagagcccagaccttcacacccaccttctttttgcttaattgccaagatttttacatgactcctggagcacgtctttttaacatgaaatttcagtgctacagaaactgtagcatgtgagtttggtttcagaagtacagtgtttcagatagaactttgcaattcaggagaaactgaaaaatagggtttggaaatgttataggacaaagtgttgacattcagttaattgggaaacagcttgagtcataaaacactatttacaattttattcttttttctgtgttcctgccttactcttgttttaaaatacgtgtcccagcacctcatattgtaaccaagctctagtatattttatattcttctttagacagtgacttatgatattaaaaggatatattatcctcaatcagttttgaattcttcttaatgaaactaagtgctttgtgaagagaatattttctttcactgccttttgcttcctgagtcataaaatgattccttgtatctttatttcttacttaaatctaggagtttactggagatataccatggactcttcctagtagtcatcattaagctcatagtaataaattgaaagggtagtttggttaggtataaataaattgtagaatcattgcaacagattctttttttaatcttcaaaaatagtttgaagcctacttgttaaaagattttccgggactacatgtaatgttgccaaattaagcatagatggcgctgttgctctctatactacacatggtccaggccactgattgctttcgcattttctagcattttcttaggtttttcaaactgtaaagagaaccatgtcacctccctacattgatatttgttaacatttaaaatatgaacttcatttttagttggaatttcttattgtgagatcacttcaaaaattatccttatatttgtgttaacagtaagaagatacgtacttgtagattattgacacatgcatggaagtgtttagatagaatgcataaggaaagctagcagcagtttcctctggagagggaacttgtagtcttacaattaatgcagtcttacaaaatacagcaactttatgcccttcacaaactttctgttttgcttgcttgagtttttaaaaaatatttgcatatcttttggcaagtaaaaccaacttaatagtaaaactaagaaaacgatcttatctgtaagtatgtacattacagccatttgcctacccatgtggaaacgcacataaatacacttaggaaagcaaacgatcattgttatcctggcagcagtttcttggaggggcatttgcattattggatcactaaccgtgtatgagcgacgcggtttttactaggacgctcctgacgctatacctaccgtccactcatcttcagcttgccgcaggttcgcagctctgtggctgtctgtggaagcatgattcatggatcccgtgagccttgggttctggtcaggttgttctgtttgtgggagagcctacctgggtactgtggggaacaggccgtgggtttgctcagtgggcctggactgtctcacaaagtctggccgagagccagatacactcacataatttccatttgagccattacaaatgagaaacgtctcctgcttttataactcagtaatgggaatgtgactgttgaaaataattattttctttgttttgagcccttaagaaaagagactttattttaatgtttttttttccaaaagctgaaaaaatgctttttaaaaatctttaagtatagtggttatattcagactatatttaatttaaaataagcaaattgtaacaaagtataaatattttaacattcagcaaaatgaaatgataaagctaagagactatcctatgatttgtatatttattggtgccaagaaaagtggagaattagaccttttacaagccgtggtacaacagaccatcctatgttggcctcagcatacagaacagagcagtaagacgctggctgcaaccccagagggactgaagctactcaccgttcctgccccaagatccactcatctggaaaattgttaatgggggcatgctttgtgtgtagcactgtcatgtaaccatttgcttctagctttttgttcctgctattcctgtgtttaaagcacactttgcctcctttttctatgtctccaaaacagcatccattcccagaaggtcgtcctatgtaggtactgaggcttttaaaagatgctacctcaggttctgagagtaatattaaaaagcagctccagatcgaccatgtggtctttgggaggaaggctttgctgctgggatgattgcttggcaacgaatagcatttattgggatatatagattttttatatggatgtttaaaaaaaatcggacttacacttcttttattgtatttattttgatggtttggtgtgatccacatgtgtcttattttttagggttcaggataagtttgaggtgctgaattacacaagcattcctatctttctcccggaagtcaccattggagctcatcagactgaccgtgtcttacatcagttcagagaggtaagactgtggaaatggagaaagctggccagtggatgagtctgcagcacctggggacaatgcagtcacttctccagaaaggagtttttgttgttgctgtgttttgtttgttttagtgaaggagcctctttttcattgaaataattctcccttttccccgtatttctgtgtggaaagctgatgaagtcctcagatgacagccccagagcagagatgttcttctggaaggttcttcatcaggcatattatcttgataggagaacactctgttcatcagctgttatgtcagtttctttactgtcagatgttacttctggtattttcttactctttgtctgtaaataatgagggttccatttctgcagaaggcccttaggccatatgggaggacatagggagggcaggcagagcttgggacagacagcgagggtggaagttggtaggggcaactgtgtcattgatcttcttatccaattgccataccttcttagtgagttatttgttctggcaagattccattaggttcgaggcgtgtgtaagtttcgctgggaaccagcgggtgagttgcagcctgcactgcaaatcccaatgtcagtggactgggaagagcacgatccatatccgcggcagtggtggctgtggtttgttatgggtaaaagtgaaatagttgtattaaatcagaactccaagctatgccttcaacatgtagatgagttgaaatctaaatctttttgcattactataattgtctgagttgatatgagcaaattgcctgaagcacccactgaaagtctgagtagatccccttgcttgctttcttactctacttggcattttcttttaagtaaattttttggattgttttggaagtggttttattcagtgtgaggatttggggaaaacacataaaaccataaagatatctctcagaggcacctgcggttaataatctgtgttcacctccttctgtctttgtacacgtgtgtgagtgtgtgtgctgtttctccctttgtccttgtatacttgtgtgagtgcgcgtgctgtttctcccttatctgtccttgtacacgtgtgtgagtgtgtgctgtttctccctttctgtccttgtacacttgtgtgtgtgtgctgtttctccctttctgtccttgtacacgtgtgtgagtgtgtgtgctgtgtctccctttctgtccttgtacacgtgtgtgagtgtgtgtgctgtgtctccctttctgtccttgtacacgtgtgtgagtgcatgtgctgtttctccctctttgagtggggctctgcggatttgctgcttccctggcatcaacgctgtagctggtgctttgcttgctgctcttgtgtaggccagaaaacccacacttggtgttcgttccctgtctctgcttttgtgagtggccaggtcctgttgcgtctgtttcacaagtggcttcgcttcttcctgttgacctccaggctgccatcattcccacctgagcttgttcggcggcttcctcttggtctccttgggtttagtctctgccctcagtccttctccagtaaggcagaagcagccgtgatctcaatgcagaacccaccatctcagtcctgtgcctgaagtccttcctttcctgtaggaggtgtgttaaagtctgccactctttgtggatttgtgccccctttccgttttgtgagattttgtctcatgtatgttttagggccgtatgattagatgcgtaccaatttagaattgccttgttaggagggtcacccttttcatgatgatgttttcctctttacctttagtggtgcttcttactgtaaagtttattcaatatttatgtagcatctgaaactttcttttggttagtatatgcatgatgtaactttttctatgtcctttaatttcaagctttctgtgtctttatattcaatatggataccttgtaatttgcagttatttttaaattttttattctgaatatttaggatatttatctgttcacatttaatgcaattactgatatatttgtaaatagttatcttactgttttatattttttctacctgttctatgtattttttcttcttttttttctttattccatttaccccacctatttccctactactagttatcattcttttaatagctttttgttactaaactgataattaaaatatttatctttggtttaatgatgttgaagatcaattagctttccagttccagagcagagtacccactcgcatgttttgcatgatctcggtcgtcttaattctccatacgtgttagtcccacaggcatctgcgactgttcggagctgtgctcggcagctctgcctgcgcattcgccccacggctgcccaccccttccctgggcgctgcgcctgcatgtagcatccttggccttctgcctgaagaattttttgctaatactaaattctcacacttattttttaaaatggtctttatttgatcatcatttttacctatttgtttttttttagtttgggtagtttgggatgttccaaactaaaaaaagaaaaataacttttcctgaaccatttaaggtaagttattaacatgatggtctgttatcttcaaactcttgaatgtgatggttcgccgagtgtggtctcggtgtcaggatcatttgaactgctgttgggaatgtaagttctcaggcttcagtccaggcctcctggactagacacgcaggggatggggcccagacacgcattcgagcgagtcctcctgtcgatgcacagcgcctggtttgagaatcgtggcttgaatgtgtaattctcacaaacaagggtgttctcctccacaaccccaggacagctgtcagagtcaggaaatgagcatcacgcgttactgctgtccagtccacaggccctcttcatgagcatcacacgttactgctgtccaatccataggccctcttcatgagcagtcatttatcctagccatgttcttctgagcaagaatagccaatccagggtgatggcctgcattgaattgtttcctctgctacatctctttgaatctggatcagttcctcaggcttttcttggcattcaagaccttgacatttttgaagactacagaacagttaccttgctgaatatccctcaatgtggttttgagggatatttggcatatggttcccatttgtcccatcactgcttttgttacctttattgcttgttaaggtggtgtcttcactataaagttatcttttactcttaatatttagtcagtattttgagggggacatactttgagaatatgtacatgtcctcttcctcatcaaactttcactcagtagttttagcatccattgattttcttggctaaattattactatgatgattgccaaattataattttctgtttctatcgttctttctgtatgaccaggtagtgtcctactagaagcaagtagtttcccttctccccatttatttattcattgatttccatatatcactatggactcccagattcctgtttattcagatacatctatacttgtttctgtgtttctatttgttgaaaactgtgaatacacaccagtgtcttcagttccagtgcaacacatcaaggttcattttagtgctctcgtggtccatatccttctcagatgatgagaaagccagcccctgtcatctaagtgtatttacctgccggaatcccacggggcgtagctagtctcctgtctctgctaccatggcgtccctaatccctgccacccaggcaggtgcaggcaggcattctccagtcccgcagaacagctttccatttgaacttgaaggaaggaaggctgtcttcattcctgcaggttattttcattgggtattgagttttaaattgccaatattttctttcagtgcttccaaacttcactgttttttatacttctggcttttgtgtttctaatggtagttcctcttcggaagatatttcttatttctctggcaggttttttccccttctttttaaaagagatttttctgacttggttttatgcatttatactctctggggtgtgtgttgtgtaagtaggtgtgcatgtgcgtctgtactcacttggcctgaggttcataacactctttgagcctttggctggtgttcattgtctgtagcacttttttttttttttttttttttgagacagaatctcactcttgtcacccaggctggagtgcagtggtgtgatctcagctcattgcaacctctgcctcccaggttcaagcgattctgctgcctcagcctcccgagtagttgggactacaggcatgcgccaccatgcccagctaattttttgtatttttagtagagacaagttttcaccatgttggccaggctagtctcaaactcctgatctcaggtgatctgcctgccttggcctcccaaagtgtgtctgtatcgctcttgccacattttctgtctgccttggcgtcccacagtgtgtctgtattactcttgccatattttctctctgctctctttcggttccagttggtcatatgttggaccttttcaccatgcaccatattcttcgtgtgtctgctcctttctgtatatcttgtcttttttttttttttgagtgtgcatcagcctagatgtgttcttctaaactgcctttcaagttactaatcatcctttcagctcgttctaatctgttgttagacctgtatttcttatatttgagttttgaattttcatcctggtttgtttttgattctagagttttcattgttataatttcaagtttactgctgatattattttgtcatctaatttcttaaacatattcatcacaaagttacacagaattatctgataattgcagtatctgtgtcttttgtaggcctgtgtgagtggtctggtccctaacgtttggtttggggttgtttaatcttggcgtttggtggcctcatcattggtgttttgttgttttccaatggcagtcattttttgtggagactttgcctggagtcatctcaccctggagaggatgcgctttaccgtcttctggcaggcatggaggtcagggcaggtcccctgagagcgctcaggaagcaagctggtgacgctgggcttccgttttgtgaggtctggagtgtttctagcttgcgcttactgagaggccatttttgccagggtcccttctttttgttgggtcctgaactgcatgtttggccccacagtgcactcctgctgctgaaagctctgccgggcttctcagccccccggctctgctggtgggaccagggagcgcctcagggacgggaacgtgcagcccagctgtgtttgcttcttctctggaccttggcatccagggccctccctgccctgttgcctttacagcctgatgttgcctttgtagaattcttttctacattgtcccctgtttggttgttcaggaggggacagatgtgttagccgttttaacagttacatggtgagctcacctagcagtttttcaatcactgtgttttatgtggttttgtctgcttttcagtttgtgagcattaaagagaatctaagagaatatatgatattgggcttgtggtttgaattaaatgtttagaaatgttaaaattttgaatcgtatttaaatgactgggaaaatccgatttttaaatttctaagcatttcaaaaagtaaacttgaatgtttagaacagttttagatttacagaaaaaccgtgacggtagtagtgagctctcatatctcacatccagtttccattttattaacttcttctgtgagtatggtacacttgttataattaatgaattaataatacttactgggtttttgttttttgttttttttttttggaaaccgattgtcactctatcgcccaggctggagtgcaatggcatgatcttgactcactgtaacctccacctcccgggtttaagcgattcttgtgcctcagcctcctaagtagctggtattataggtgcctgctaccatgcccagctaatttttgtatttttagtagagatggggttgcaccatcatggccaggctggtctcaaactcctgacctcaagtgatctggccacctcagcctcccaaagtgctgggattacaggtgtgagccaccaaattcggcccttattgttaactaaagcccacactttgaattattcagattaccttagtttttccctaatgtcctttttctgttccaataccccgtctagaatatcacatgacattgggtcctcatgtctccttaggtacctcttggttgtaacattttctcagactttgtttttaataaggagtgctggtgaggtattttgtagactctccctcagttgagggttgcccgatgtttctctagcgattagattggactgtgtgttttggggaggaatccacagaggtgaagcatcaggggcacttgctgtcagtgcagcctggcaccgtggccctgaccgtgggctcctggctgaggtcgtgcttgctgggtctccactggaagctgctcttcctctttccagaaagccccatgcacaccacagcctttatgttcctttgttgagtaagaattgtctgactgtttagaggattttgtttaaggaaattcggttgcttgatattaaaaaatgatcagttgaaattaaatagtaataaataataatgaccatttctggaaattcatagaattccttttgtccatcagagacatcagcagcagttctcattgcatttccttctggaaacagcattgtggggatacctggaggtgaatgaacaaagcccctctgggtttcatgtgcagctgtttcagatctgggaaggtttgtggcttctcacaaaaggctctctgcatgggttgcagagctgctttctagattggcttctctgggtactggggaaagctccctcccctccggtagtcccctccctcctgagcctgtgctcagggggcccctcagggagcttcattctgacctgagtgacttcggtagagcccttagcagacaaggaagcgaatactgaaatgtcttgtgtgaagccttctgtaactccttgcacacacccctgagagagtgcaggccttccccaggagtaggaggagatggagggtttttatttctaacaaaaggccccaccctggtgagagtggcttccttttatctggccacccgacagacagcttgtgctagcagcaatttccatcagatgctgagcggaaaaaacaactgttgctctaaaaacacgttaaaaatcaaaccctaactataaaacccattttctccaactcttttccttcttttgaaaacaaatactaatggtgtaataggaaggcaaatgttcatgaaaatgtagtttctcttggatcatttgtgtttcaggttgccttcatctcatttctgtctagttcagctggagacaacaggcatagctagaaaaatggaaagtgtataggaagagatagggcctggagacaggaatgtgtgcaggtggaggtatgtctgatctcatcagaacagatggagaacatgccagagcccaaggagccatcagtctctgacacctcaactcgcagaggccaccaggcaaagacagttgaagttgtttttagttgggtcacagttagaggttctgaggtttagcaagaattattgtgatgtttgaattgctaacaaaattaaatgctgttttctataattacacgttagaagaaacagtaaatacaatcaagacaagaatctttttagaaaagagttcaggttttgctttatgaaaattgcaaaagacaagtaactaaagaaaagtaaagtcggcctttgtcagaggcgaggtgaacagaattgtttcgtctaaccttgtagctggggatcccctacccgcagcgggctgtgcagagtacaagagagggtcctgaagtgcttctcactggtctttggaggtgggaagaccttctcatcggtcttcaggtacacgtgtcaggtcactggtttgctgcaggggagcaaacagcatttgaggacattccacagaacgtgtgactattagagcagaaggtagttggcagccggttatttcctggagcaagtggaggccatggatgccttttcatggcagtggttcttagaagcccattaccctgctaggcaatttctcgctttctgggagacttttttttttttaatgttgaaaatatgtgttttagccaaattctgccattaacatgagaatttctataatcccaattaattttctaaaaataataaaattactaaaactatgccttataatttcatgagaaacttaaaatatacttgcactgtgcttctgtaaataggtggtctgtgtattgtaacatgcccaggacgttgcatgcatgttttatgatgggtattgtccttgttgatacctggaggttaggagttattaggtagcacttctgattcttggaaaacgagtaatgctttgacctttattctttagattaaggattatagtcttcgtttttcttccaggattttcctgatttttctgactttagtgtttttgtagttttgtgagatgggtctagatttgaatttttctttatgccagtgctatttgcatcttgttggtaggatcttattccttgttggtaattcccccattgcttctctctgtagacattttaaacctagttattttatgctctgtctctggagcgctgctctggacgctgtctgatcttgttcgttgtttcttctttttctcacccatggtggcttcttttcttgactgtgttggagactttgggtacagagcttctgccctgtggggctccatccatgggcatttggtgagagtgggtccctcctgagtcaggttgccagatgaagtacaggatgccaaggtaagcttgaactgagagcagctagtattttagtataagtatgtcccaaggtttttaaccgggtatcctatatgatttctcagtcctggcagccctactcctgaaaggaccctttgctgctgccaggcctcagattcctgaggagcagggagggattgatggcacctttgttgcttgtggtattccaggccctggaggtaatgcaaatttcaaccctcgaacctgtgtggagagaagctctggttacgaattcccagtggagaatggtttcaccactgggtgccagctggggtctccttgctggcaggaggccttctccccgcactgaggtgtggcccttcaggagtcacctcacagggacaccaggccgtgtcttgtggctctctgcagctcttgggcgtcccgagggcaccgcggcttcagctcaccactctggcttttccactcactcttccttcttagccctttgtgatttcttgcggagctcagctgtacatgtagaagcatttccagaggtttttatatcaagaagcttttctgcatattagggctgctgttttgctagaaatggaaggctcccctatttttctttataactggaaaccctgttttggtgctggttctttctgtagccattctgtggaggacctgtctgaattagaaagtctacattttatatactcaataggtatttacccaatgaacagtcccccagaatgcagaattgattaaatccccaaccccgaaggcacagaagggaaacctggctgatcaaagaattcttgccttttaatttaatctgagttctatcccagagatagagtcaggcatcttgggagtgctaaggtagtaggaatgacagtttatcccaatacctgctgccaagcctgacatttcagaccccctgcccgacagtgtcatcccagtgtcctaccacttctgcacttagccctgattagatctttatcgtgccaggcactgttgtaagcattggggccacacccgagagtgaagccaagccctgccctcatgcagctcacctcctagtgggcagggagaacagatgatagacaggtaacagggtgccagggtcttggagaaagcacagcgaggaggctgccatgtggagagaggtctcaggcacctgacgcaggggactgagggatgtgggggtgtaggggagcaggcgccacaggggagtgagggatgtgggggtgtaggggagcaggcaccccccggaaggcaggaacaggtggacatggtctggagctagagaagagcccgtcatggtgaggtgtgatgcgggtggggtgagcttgagcagggagtgagctgaaaaggcagcaggccaaggtcagccggggtccgcagctgccacggggacctcagttcagcggtactcctggtgaggtggtggcgttggtgcgccagagagtggcatcatctgggtctcaggtttaaagggttgctctgcttgccacgtcgagtatcaactgtgggggcaaaggcagagggccaaggcggtcagggagggtcctggtggtgcaggtgagagtgctggtgctatgggcgggggcgctgagagtaggcactgtctcttttcccgagagcccccacttaacaggggcattgttgcccctccttgcccagccaagttgcttcttgctttttaggttttcaaaattaagcagactattgctgaaggattccagcagagggagtcagggaagaggtgcagggtggggagcgggctgctgagggcctggtggtggcctttcctcaccggacggtggagccctgggcctctgctgtgttgcctctcctgcagagttgtgtgtgtgactggaggagaggggtggagccagttcagccagcactggggtctaactataaagcacaatagagacaggtagtggcagctgggtggggtgggctgtggggtggggttctaagataggaatttgccgtttgtaacaaaggaactttggtgtaaaggctttaatttaggaatcccaggcatacttcctcatggatcttttcctgacccttatgtttaatttaatttactgatggatggatgagcccagaaagggttacacaggagcacacttctcagggagtggtgtgacgctggggaggctcgcccaccctgtgtctgagctaatttctgaaatctgtttggagcttatatattgaaacaaagccgttattctaactttcacatgaaaagagctccatgtcttttaagatacttttttattagagctcaagttcttttataagcagaaactccttttttaggtttctaaaaagcatacaaacggtgggaagacagaattcttccccaaatcacctacaggtggttcgcccacacctatttcaatagaccttattttagcgactcaccttcatcaaatggttccaaagtgtttcagcctagttttaacagaacagcagctcttccttttcagacgcgtagttttcataacatttaattaaattttgcaattgcaatgacaagtacaactggcgtcgctgctgggaaacagaccactgactcataccacttggtgggagggacagaagtgcctgtgggccagtgggagcaggtcctgccacttggtgtcctgtgtaggctggcttgtgagtgatccaatcggggttggtcagaagagctttctgctgaaaggaagaagagctggtgaagaggaccaagctcgccagagtattaggaggcaggccagactgtgtgggccctgggcgccagcagaggagcctgtagaggagcttcagtgtctgtcagaggccgcaggaaggtcaggggtggtgaaggttgaccatgcccaggatactgcgttgatgaccaggtcataggtgaaccttgagagaagtgtcaggagactggtgggaattagagattccatcttctatagcttgttattttgtcttgtttttaagggctaaggcattctcagtgtgtttataggcaaaagggtaagtgcttgtggaaagagggaaaagatgcaagagaggaatgggaccgttgatggagcagggatcccagaggcaggggggcctcttggctcctcagagatcccagttcaccaagcagggatcccagaggcagggaggcctctcagctcatcagagatcccagttcaccaagcaggcgtggccaggccagatcactgtttgtttcataggaccccaacctagtctgctgaggggaggctggaggggtgggtgagggctctttcctcccatggggagacactctgttggattggccatgtgtggagtggaggcacagaacctacatccagggtgctgcgagcgtagctgagaaagccagctgacccatgctgggtggttgaccaggcccagtgaccacgttggccattgtcattgaagcatctcattccttgattaaaatccactggtgctcttcacatcacagggccagttccagacagtagattacagccatttgatgtgtcatatttacgttctcctagcgtgaaagcagcagtttgtgtgcttaacattataaatatacatggttgaacatcctggatgtgatggctaatgagtctctctggaacagattggttttggagatgtcttgactggcctttaaggggcacggtcgtccagctgtggagcactcgtggagtcagatctccacacagtggttcaggtccctgtgaatcctctcacctgcgtgaagggcctggctgcctcttctaggtgtctgggaagcctgctctttcccatcaactgcacccttaaatggggactccagaaacaggagcagtgtcaggggcgagttagagggcctagcacgccatactcagggacagtggcgggacgctggcaggagcagtggcagctcatggggctccggatcccaggtgcctgtgctcgcccacctgcacctgccaatggatgggtgactttgaacaacacgagaagacggcagttggggtccagtggccttcgttactgttaggaagaaggtccagttgcccattctagacttgctgtctctcttgtctgtgtttccttatccctgaacctggcttccagtctgagtttagggagatctgcttggcgggggaaggtttcccagctcttcctgtggctggatggagtcaaaggcaccaagacctgagtctgggaggggtccagccaactcgtttttcttcttggggttctgtaatttttgctttgcttgcccttgtgtaattctaagaggtgcacagctgctgtttgggttgcagttgtctaaatcagtggtgccccagaagttgccagtgttctgggagctgctcttactgagagaatcatgtctttttactggaactccttcctagggccactctgagcgctctcagcctctgccacagctcatagtttctggctccgcatggtggagtcgcctcgccttctgctgtggctcctccttgtcactcttcagtacactcaaggctgttcagcctgtcggcgggagctccaccttccctgtgcattcgtctggcccccatttcaccgcactcagtgccagacactgcaccagggctggagacacaacccagtttccacaccctggagactcggcagagacacgtgcgcagatgatgcgatggaatcccagaggctgtggggacccgtgagagggtagggatgtgcggtaggttgctgtgtctggggtctcaagactcgcacctcacaggatgggtatgagtttgccaagtagagtcttggggggggcagttgagggagaaggaggatggctgtgaaggccggaggctgcagggcatggccggcaagggccatgatgtgaagggaaaggagacagaacaggtggggagggtggcgagtggggcgagatcgcacagggtctcagggtggaccgtggagcttactttccatcctaagccacgtgggggttacagcaggcatgagattaacccgaggagttcaaatatagcagagtcagagggcattgcacattgttatgtaaccaagcctggaattgcagtgtgaagaacttctcatcagcgttgatgggatgattaagaaaggtggtcagagatgttggaatttgaaccagaatttaagattcatagatactgaggatttatgggctttatttagagtaacttcttgactattagaaaccctatcagataaattttaaaacagagacccagagctcaaggtaggactactaaatggatgatgtggagtgatggttaagatgacattttcctggctggtgctgtggctttggttgggaacagcgagagatacagaaccgacggtctgggatccaggagggtggctggcaatagggaggaagtgtggacgcttgatccaggaggcacttaggattaatctggcagccatggcctgcgaggtggggagaggctggtggaaggaaggattatgggctgggggctggagtgtcatgggctgaataggacctgacaagaaggggaaagagcagagagactgaggctgaagagggcaccacttctgctgctgatcgcagtggtaacaataccaggtcaccccgagcaccttctgtgtgctgggcactatgctgttgccacaagaagacactattattcttattcccatttgcaaatgagcagtttgacacagtggctttctgaggtcctgcagcttctgggagggcaggactcacatttgggcaagtgtggccgggcggccatgctgcttcccatttccctgcttcttgcagggcccctggggtgagcaccatgcacagactaaggtgtgggggttgtattaggctgttctcgcattgctataaataaatgtctgagactggataatttatttaagagggttttattggctcacggttctgcaggctgtacaggaagcatagcaacttctgcttctggggaggcctcaggaaacttacaatcatggtagacggtaaaggggaagcaggtacatcctaataaggcaggagcaagagaatggggcagcagagtgtcacatatttttaaatgaccagatctttggtggcagagtgtcacatatttttaaatgaccagatctttggtggcggagtgtcacatatttttaaatgaccagatctttggtggcggagtgtctgtcacatatttttaaatgaccagctctttggtggcggaggagtgtcacatgtttttaaatgaccagctctttggtggcggaggagtgtcacatgtttttaaatgaccagctctttggtggcggagtgtcacatatttttaaatgaccagctctttggtggtagagtgtcacatagttttaaatgaccagctctttggtggcagagtgtcacatatttttaaatgaccagatctttggtggcagagtgtcacatatttttaaatgaccagatctttggtggcagagtgtcacatatttttaaatgaccagctctttggtggcggagtgtcacgtatttttaaatgaccagatctttggtggtagagtgtcacatatttttaaatgaccaggtcttgtgtgaactcagagtaagagcctactcatcaccaaggagatggcccaagccattcatgagggatcagcccgcatgatccaaacacttcccaccaggccccacctctgacactgtgagttacatctcagcatgagatttggaggggacatccacactctcatttgatgaacatgctggtgacatgggtacacagacgagtaaagaaagaccttttcacagcagagtggatcttagattttcatatgaatagaagggtttatgatttttggttttgttgatcctgtgaccttggagtgtttgtcttgtcacttgtctggctagtgtcctgatggctctcaggcacctgtccacactctaggcgacacccagcgctagggcactgatgcctcaggaatccaagttttcatctaaaacagcgttttcattgggtgcagtggctcacgcctgtaatcccagcactttgggaggttgaggcgggcggatgacttgaggtcaggagttggagatcagcctggccaacatggagaaaccctgtctcttcctaaaaaacacaagaattagccaggcgtggtggcgagcacctgtaatcccacctactcgggaggctgaggcatgagaatcacttgaatccaggaggcgggggttgcagtgggccagaattgccactgtgttctagcctgggcaacagagtgagactccatctcaaaaaaactaaaattaaataaaaataaataagtaaagcagcattttcagtggggcatgtgtacctggggtctgagcaatatatatgaacatgtttttccttagcgaccctcctcattttgtgcccggaattgaccctgtgtaagttcatgaaaatactgaatgtgtgcaggacaggctgctgattttttaaagtcacgttttaaacattgtatcaggtcactttttatttctgtacagcccttctttggattagacaaactgtgatttggtttctattttaccagttcagtctcttcaatggaaggaagccagatgctgttaagatactgtgctccctccttgaagctgatcgttccctccttgaagctgatcgttccctccttgaagctgatcgtgtccaagatagttgctaggacaacagaatcttctgttttctcgcctgctatttttgtttcttttactatctcaagttgttttcattttcagtattgagttctcccttaccattttttaaaacagagatgtttttattaactttaatatgttaatactgtatgttcttgcctttatgaaattcaccttacagaaaggcactaggatcagtttacctaaacatgcgggagacggaaggccagacgtgactgctttaggttcctcatgacattcagaccttacttggaactcagtttggtatctagttgtgttaaaatacaaattttcagtttataagttacttaattaagtttgaaagtaaatgcgtaatgccttcagtgttctctccactttgtgccctgccacctgcactgtggaaattaatcatagaaactcggcgttaatctgtatgcccgagttatttacatctctgtgtatggaaaattatcagcatgtgtccctcgaagaagatgatgagcataaaaggtgatctttaccaggtccattggtttgtatgtgattgctgtggtatgtggtatctgcctgtctactgatggaaagtggtaagatactgtcttacatgcaatctggaaaatcaagtgccctgactttacagtgtgttacatatgattgtatttactttagaatttttagaaagcataccattttcaggtttaaaacaagcacttaggttaggagcttttctattattcacagctaataagagttaaggaggattaagacatttgaactattgttaatactcattgcaacaaatatgacagctaaataatgatatatttgtaggaagctatagttttatgtgttaaaaaatagaacacacattttcaaaataaaaatatggtttttgaaagttgactgttaaaagattttttgaaaatttatgccaattttgttacattcgatttgtgttctacagtaatggaaattaagggaaattgtgtatcagagaagtgtctttaatatctatagtgctcttctttaaaattaatgaaaaactccaagcagaattgattagcatttatatgttataatggaaaataggagttggaaactggaatttccaaatcaccccagaactttgcagtattttgaagctccttagtgcatctagagagaggggagccagtcatgcttggcataacccattgcttgccccagcagagtgaagcccacccggtacacaggccctcactcaatcgtttttttgtttaatttatatatttacagtaatacaataaagggtttgttgctggaatatacacatatttatttatatgtataatatttatcaatatatttacaaatatatgtatacatgtacacacacacacacacacacacacacacacacatccttcatgaaaactctttcagctgggaaactgagcatccttgaatgtccctgaggtgactactaggatataaacatcccccaagagaagtgctttgagttacatacgaaaggacctgcagaaagattggagtcacctttatctgggtagagtggattgtggaccataacctaacagacacccaagaaatctcatagctgagaccttgagcaacatacctttactatatatatgctgattgacagataaatggaaaattggagggaatgaggggaattcagtaaaacctcgtataagtagtatgtgattgaggaaagagcttattgtgttatttttaagagttagcacactaaaagttacaatttaattcaacgaatatttacatgctgtagtgggaaaaagatcctggacttgatcattaaaagatcggggctccactttcagcctgccaccagctagccacgtgaccgtaggcaagtcaagtctctgaacaccctgtctcttttaaaacagagactgtgccttcctttacctcatgctgtcagggtcacaggaaataacactagtaaaaaggtttctacttagaggctgcccactaatatcagtaagtgtatcaatgattgcattggacataactttgtgatgagtaccaaagaaaagtcaaaggatgaagggagctctgagaaggaaggggcattatttcatggcaggattcgaggaggcagaggtggctcaggacagcacttcaaaaagagtgagtggcataggtgttcagtagagaaaagccatggccttggccaggaatagcaagtcagctgccacactcaaggaagacctacttggagacccttgcgatgtacctgggcggggaggtgcttgttcaggaggtttctttggctttctcctgaatgacatttcctgagatatatctactatcaagttaatcacattcactcaccaaataagttcttttctgctttcttcttacaaagtagcatttgagaatgtttttatgtggcacttctttcattactgtagttctctgataagtaactgcctagagcagtagtagggctgttaagtgttagaggctgtctttgcaaaaactgaaataatgacacagagaagcttgtccataaaaatgaatgattcagtgacatctgttgttattagccaaaccctggataggaactttcttagagggaggtgaggtgccctctctggctgaactacctgctcattcttaccttacatttcaaccatatataatagcaggtgagattcacatttacatcttttcctaagttctttttagaatggttatgtactgtaattccatcttatttcctttgtggccttacgagctacccctctttatttcatttctgatgattgctgtagggtttcaccacgggcaactctaacttgtcacagtcaatccacaccttgtcagcatttaaccgcctcacacagaatgcaggtatctggcccgaggccacagctgttcctgccctctgtgttctttgtgctgttattctcatatactttcacagaaaccacacaatggactgttgtgattttggctttaaacagtaagttatcttttaaagagattgaaacaattttttagtcttttagtcttttatccttccctctaccatttctgatgtgcttcattcctttgtgtggacctgagtttccacccggcatcatctttctcctgtgtgaataacttcctttagcagttgttatagaacagatctgggagcagtgaattctattagctgttgcttttctgaaaatatatagttcaacttcattttgttgagtattttcttttgatatagaattctaggttgacagtttttttttcccctccaacacataaaagatattccattgcctcttggcttgcatagtttctaatgagaagactgcagttcttcctagctttggttcttgtccctgatgaaccttttttccctttggttgtttgtaagattttctcgtgatctttttcttactagtttttcataatttaattatggcatgcatctgcgtggttttcttggtatttatcctgcctggggtttattgagtttcttgggtggcaggattatcattttcagaacacatggaaagtgtttggttatcatttcttcagatttttttctatcctcccccttttggggactcttatgtatccatgcattaggtgacttgctattttccacaggtccctgtgactctgtccatttgtttttggcctttttctttctgtgcctaattttggatagtttctgctgctctgccttcaagctcacttatcttctgtgggtgtatgatatgctgttaattgcattgtgttggtttaggtcttccaagaatcagaagccaagagattagatgtcgaagaggtctgttggaagaaaacacctttgaaggatcggggagaggaagtctgagatggcaggagagcctttgctcttccttgcgggactgtgacaagagacaggaagaaagaatccaggaaagatttggccaggctgatgagtgtcctagagccaaagatgcctgtcagggagtcccatgtccacaggaacagctggcaccagaagctcttctgtgctccatcactgaccaggcacattctgtaacgtgcgtggccgtggcatgaacaggcagcagatcctgagggtcaggagcagcaggagcgttgcagaggagcacactttcctccctgcagtaggagctcggcagagcacattttcatggccaccacacttatccaatagaattgtgttttaggaatcctgttttttagctctagaaattctgtttggtgctttttatgttttccagttctctccttatgtttttcatttaattcttagagcatactgaacatttttataacagctgttgtaatgtctttgtttcctaattcatcgtctttgtcagttctgagttggcttgatattttccccttgttatgggttacattttcctgtttcatacgccgagagatgtctcattgctttgccatacgttgcaaattttacgtttttgagtgctagatcttgttctattcctttgaactgtgttagaactttttttctgacagcagttaaggtacttgcaagtcagtgtaaaccttttgaggcttgatgtttcagctttctggtgagcctgcaatgggctttcttcaggaagggcttagcccagtatcaaggcatggccatggggtccctgttgaatgctgcatgcgtgcagcgagaggcccctctgctctggccagtgggagctcgccgactctcagccctaagtgaactctgggagtcatctgcttgcaactccctggaaactgttctttcccagaagtcgactttgtccagcttcatggagttttaccccctgcacacactgatggctactcagccagagaccgagtgggtcccctgtgcagatttctggagctctttttctgcctaggccccacccctttagtgctctactccgtaaaatctagtcactgtgtcctgcccagagtcagatgcaaccaccagactcagtttctccagtttctaaatgtatctggctgggaggcaagtacagaccctgttactgcctcatgaaaggaaactgttgactactacttggcctggtgcctctcacttaggccctaacagtataactgattgcccaggagctgcatagttcacgttaactgaagtctgaagtgtatttcgggagggggcatttttccatgtcagggcttctttaagaccacaaagctgaagtctgtgctcgctgctcagcggaggccgtgctctgcgcattgcgtgcatttgctgcctcctccctcctcctgaatggccacctcttccctgctgatccgcatgctgtctgcacctgaagcctctctccgtgttggtcaggtaggatttctccacccttttcgccctccatcaccttccatcttctactttgggcttctcccacattccaactcatttctaggtttttctagccagagaagagaggactggcttcgttcatctctctcaaagtagttaggacacagcgtttcaccagtagaaggagtttcctccattagaatgagtgactgtgtgtgtgtgtgtgtgtgtgtgtgtgtgtatatttttttccttgactgatttctgtgcgaacagctggcatttgaagcactatatagggcatgtctaaattgtgcacccaagagaagagcctgggagaaacctcattgtgcggccttggccctcatggcacagatcccaggttggctgtagcatttagaagtggacacttttctaacatcagaactcatccagtccttacgttgaatcacacaaactcagtggcgtcactttggatcaaagaacagcacgtttcagctgcctctgcgacctcacctggagctggagaatcaccctgttccccgctgttgccaggcgcaggacctggcacctgtaggcacttagccggcacaggacctcgtacctgtgggcacttaggaagtaattgtgggctaagtgaacttaaaccacgtcgtggactcagctttactgtcttgttgttaccttcctgtactttcttaggccagtgatcagcaaaggtttcctttaaagagccagagagtaaaggttcccagctctgcgggccacacagcctctcacagccgctcagctctgtgctgtgtgaaagcaccaccagccagtgtgtaaatgcatgggccaggttgtgccagtgaggcctcatttacagaagcagtcagcggcgagatttgatctgtgggctacagtttgccgacccatgcatgaggcagtaaaaggccaagagcctggtataaattcataacgagaaaccaaggctctgaatcagccccgaagtgtaagcagcagcataatgatctggagcagcatcttggcgttattaaattcaacccattccgatggctgcgtcagcatctattgctctgtttattgtttttccttaagcaagcagttccatttctagaaatttatctcaagcacataaatctagagggggcacatcggtgttatttatgacgggaaaactgggaacagacacagccctaggctggaagaggcacagagtgatgtacagcatgggccagtggttaggagcagactcaggagccaggggacacggctccaattctagctctgtgaacacactggccgtgtgccaccctcagcaagttacttaatctctctctcttagggaaaaaaaaaaaaaaaaaaaaaagaaatccttgcacatgctgtaaaattcaaaagatgagagatgttccttctttgttccccagccgcccagggcccctccctcaggcagcctggttcaggtttctttgtagccttccggttggtgggggagagggtagcacctgtgtgtgtgtgccattcaccctcttaactgtgagggtcaggaaaatcatcatgttagtttacattaagcatggacttctgacacacagatttgcacacagatatttgggggaaatcacgagtgggtttgatgagcgtgtccaatactgtctcttctccagtctttcctgtatatgaatcaggatgcacgggtgggaacaagtccggtcctgtggggttttccgggagaagaaagtacagatccacattcccaaacaggctgggccacatccccaagcaggctgggctgcagtgtgcacaccctcatgtgtcattttgtatctgctagtacaaatgtgcacaccctctgcagcctggaatggaagcccaccctgctcatcctccatgtctgggctccatcgggggccagggggagttgtcatttccagcccagccccctgtgaccagcagcccttagggaaaggaacttggtttgtacactgagtcagcccaggttgtcggtgactgggcagggtgcctcccagtgcactgtctaaaatcccttcccagctccaggcctcgccctggaacactcccggtgggccaccagggactgacacacgccagggtcatgggtggagggcagcttagctgcttggctctggaagaggacttggaatgtttggctttgtaatttattgaggttttttttcccttcagtaaacttcctttttgatttctaatggaaaatggaatacagggaaagagcctcctgaaagtgttaaacttatcagagccctgtgaatgtaatgagtccaaaatgccttgaatttagagatccagcgagggaaactccgttcgcattgtacagtagaggggattgcagaggatgagcattggaggggtttgttcctttttctgttaggcgctctttcttcttttgctccttaaggattcttggtttgctcacccggtgtatactcggcagaagccctgacttctgacaggaggaaaatgattttcttttcattttaaagtgggtgtacggccttgatagttcacctgagatagttcaccgcatgccctttgcatctcaacctttggacgcacagccacacacatgggtgtcacgcacccgggcaccgtgaacgagcagatccgggaaagcgtggctcgggaggaaggtctgacgaggcccgttgcggctcccggagtgaggctgccctgcgagggaacgggctttgctgctttcctccctgaggcgttatcatgcgcgttttctcatgtgatgaatgagcactgggttttgggggtggaaggcttattttaaattagcagatacagacgtgaagtagacatgtaaacaaagtggatgattttgcattttcctggtgtgagatgctgcaaatgaacccctccccccccgcatggttctctgttggcctaaaacactgaaaagagaccccaggatctgagaaccctcctgggtatcaaaggccagttaactgctgcctgagaagtccagacacaaactttccgagacaattaatggccactggctggacttagcaggtttggtattctgctagtttctattatctgctctgatttaaaattctatttgcaaagatgaaaatggagccagactgtcccaaacccagcccttcctctgtcagtactgctgtgaacagacctgcgtggctggtcctgtgtttgggtaaaacattaaatgacaactttaattgaaaaaccctggggaagctgacccagggcgtcttaagagaggcgcctgctggccgtcgtgtgggtttgcagcaggttggttaaacgggaaaacctttcggtgatcttttgttcaggtgtcaactttctgttctttgggcttaattctgcagttggtcctttagggaaaaagaaatgaatttctggcaggaccacctctcagatgtggaaccaactacagcgttaccgtttcctggctgcggcagtcgtgtttgagtgtggttctgctggaggtgtcctcgccggcagtgttcctggagggccttgctgctttcacagctctctggcctgcccctccctccgggtttgtgttcttggggttgacccacactctcctgcatcctcgacctgttcccctgcacagtttttttcttcctggtgtacagatgtgacccggtatctcccatcataaaaagcagacacccggcaggagtcgtctgctgctgctgctgccagctaccactctctagcagcttaaaacaatacacatgcatcctcctaaagttctggaggcagaggttctaaaatcacggtgcaggcggggctggctccttccgggggctcaaggggagattggtgtcctttccctttccagcttctagaggccgcccacattcctcagcacctggccccacattactgtggctgttgcttccattgtcacatctccttctctgatttctgaggaccctagtgatggcctggggcccacccagataacccagatgatctcccagtctcctgctgcagaggcccttttgccaggtgagctcatgtgttcacaggttctggaggctgggcatcttgagatagagatctccaccacttcttgatgcagagaccccgcctaccagccccctgcacatgcatgggcgtgcaggcatagacatacgtgccattacctggcgtgtgaaaggtggcccaggtgttgtgtccccttcctcagctgctgactgcttccccgctagtgtggtcttttcccaccccgctcctcctgtcttcgtgcagagctagtggccatctggtgaccgtgacgcgaggccccgtatgtcacgcgtggtcacacccagctcctccggtggcctgtgtgcctcactcctcagtccctctgcagcctcaggcctcagccatgcagtgctgctctttggcctcttctcttgtccagcaccctggatggtcggctcacatggcgctgcctccctcagttactgggaggtggctgcacagccctgtcttctaagccacagacgcaggtttccaactgcccacgggtcatctctatggggcaacccgccatgtagcccccacaccctgcacatattctataagcagaccggacacttaccttccctggggctgaccagctctttctctctctcacccaggccttcctgaccccgtcaggccctttgaggccagccccaggtgcccgtcactgctccccggtctagaaatagcacctacagcccgtctgacacaggtcacaacttaggccaaaggtcttgtcagactgtgaagccagaaagtcacgtccctctcttgcggtcttcctgccacttgtagacacctgtagttcgagcagcagtgttgggggatccccctggccctggagggtccctcactctcctgacgcctccctggactctgccagactagctgcctgcgccccctcctgggatcccacaataccaaaccccctgggctgtcttggcatcactggctgaatgacctgggctttcatctcagtctctcttcagatttcaaactcctgaaggagctgggtttttctttttttgtgtgtgtcccagaattctcctggcacccaaacaaaaccgtctgtatccacactgtatcctgggccagaaagctggaggctggctgtgccaccctcccccccgcctttagatgggcattgatgtagttaggatgtctgtccctccagatctcatgtagaaatctgatcccctgttggaggtggggtctggtgggtggtgtttaggtcatgggagtagatccttcatgaatggcttggtgccctcctggaggtaattagtatgttctcacagagtgcgcgtcgacctctcattttaaagtatatggcagctcccaccccctacccgcctcatgctcttgctcttgctcctactcccactatgtggcgtacctgcccctgctttgctttccactatgattggaagcttcctgaggccttcccagaagcagatgctggcaccatgcttcccacacagcctgcagaaccatgagccaattagacctcttttctctctgcatttctcagccccgggtatgtctttatagcagtgcaagaatgaactaacagagcaccggcccctccacttccaggtcccacttcacagctgtgcacctaggagaggagaggctttctggggaggaggaagggtggctcctgggccttgaagatcctagagctttgcctgtcctgtgtgtgagatggctggtcttggggcgacctgtctgctgcttcataggatgcattgtgtgttcgtctgtcactgcgtggccactgtggcagaggccaggcaaggcacatttcagtgatttgtgatccaggcagccatggctgtgtggatggctgtgaatgcctgctgctgattaggataaaggaaaagctgattcttttaaaaatggttttagtacctgttcttaagggcagaatttggaaggggtgtgtgtgtgtgtgtgtgtgtgtgtgtgtacacaaattgactgtgtgcccatgctgatttgaaaatatgaaaaaactcatcattttcccacctgccatcgctgggcgacacacaccgtgctgagcgctttctcctggctccgcaacgaggtggtcctgcggagcaacactcctctttccgtctcagccagccctgtgctggccgcctaccctcatgaacaggcgtctttgtgctggcaggggctcttgttgccccccagatctccctgtgccctgtgaggttggcctctgtggaccgccacctgagcccctgatctctcccagatggtgggagaagtggggcctgtaacatcctttctgcagctccatcactgccaagctcagccccccactggcctctctggcagcatccgctcctcctgggctctgtcgtcctgtcgctcctggatgttcagtggctcccgctagggtcagtcctgcagtgcttccccctcctttgctggttttcctgaaccctgcccatgtctacttaaaaggcctggatgaaactcactttcctactccgccaagggccccttacagccagcggcccggcctctgcaggccctcttcagagggaatttcacgcggggctttttcagagagaactcggtgtttcagttggtgaactgtggttcctgggtcccagccccacccctgtgtctgcgtggctgtccctgctcagggcctcccctaagtgccacccattgctctctgtccccctcctgtggctcttgtcaccctcctgacattaatgagaacactcagtagttcgtttccatttgtggctcccagccctaggacagaagcttctggcaggcagggctgggttgtggtttgtgtacctgtggcatccttgcactcacaggagacacctgccacagatcatgtgctcaccagcattgctgaaggaactcatgaagtacaggcatctgccgggtagacattgaactatgagctggggaaacattcattcacgttaaacagaatgcaccaatgcctttttcccccacagctgccgggccgcaagtacagccctgggtacaacaccgaggtgggagacaagtggatctggctgaagtgaacgggccgccttctgctccagctgcatcacagtgatggccaagctgcatcagccgcactctcctggacgccatatagctttaagatcgggggagggtaaataatgcaaaaattgcacagtggaagaaggggtctcacaaaaagcaatccatcctgtagtataggtaatggagttgggggaagcagcttccattctggatgtttggaaccctttagctttgttttggaatggcccaccattctcactggaaaacagtggtctgctgtgaaaggccagctctcggcagcccctgtggtttcagcgctgccgctctgtgtcattcaggttgtgcacattgtttttcttctgacttccagaaataaaagtgtttccatgggaatttccccatcgtacgtctatgtgcgtgcgggcacgtcgaaactgcacacgtgcacacacgctgctctgggccctgtttggtgtggtgtggtttaattgaggcttacattatgctgaagagtttttctaaaggcctactgtatttattttagtaatgtgctacattagagtagaaaaaataagaacgtgaagaagaaatagcaaaaggagaaaattaccacagatttacagaacaatatgttttaagagagacgttgagaaagattcacgtggccgtcctcagcgtctcaaactcctttgaagggagatttgagcttaggctgttgatgacataagatgcaaaagcaaaataatatactctctttattacccagaaaatcaagttgccagtcaaaactgagaaatgagaaagaaaatcagatttctttattcatctctgttgaagcctagaaaaccaaaacaagctggttgtggttcagcatcatggtttaggaatcaagctgtcagttgtgagtcctactgaactgtgggttttccactgtaaagctccactgtgtccattaggaatcaggctgccagttgtgagtcctactgaactgtgggttttccactgtaaagctccactgtgtccaatatggtagctcctagccacatgtgggtattgaaatttaaatgagctaaaatgtaatagagtttaaaattgggttccttggttgcactggccatagttcaggcactccacagccgcctgtgggcagtagttccagtgctggtgcagaggacgatgctctgctccccgcggaagctctaccaggcctcgctgctgcggagcatgcgaagaagatgcacactccttccctccttgcgtccgcctgcctttttccctctccccttccttccctccttctttcctcctccttccctcccttcctttcttccttccatctgtccttgttttcctcccttcccttcctccctgcctctttccttccctccttctcttccttccttccgtctgtccttgttttcctccctgcctctttccttccctccttctcttccttccttccttccgtctgtccttgttttcctcccttcccttcctccctgcctccttccttgttttaagaatttgaaaataaagtttcccaggagttttgaattggagtcgagatttaagtggctgaagttttgcatttcactaggaaaccaacagctttaatcatgaaatgaaagcacagctgggcattgggccagtcacagagtgtcttttgctctgagcacttcacaaacccattgtggaggggaggaaagaaaaagaaagccatctttaattatcttagctgttcctaatgtctttggctgcaaagagctagctgtttccttcaaccttggtggttgcacgggtagtgtcctcagcagtgagagggcaggtctgccctgtggtcaggattgcccttgtgaggggcagagctctccaaccatgcagggctccgtgtcggcatggtgtggactcgggtgctctgatcatcccctgtgtttgcgtctgaccctgtgtggttgcattcccttgatggagtgggaagtatgtaatttgtagtgctgaggacattcgtctgtttgattttctggtgttttcaatgacatgcatgttcagcagagaaagatgaataaacactgtccaattcttctctccacatagaagcctcaagaagaggtgaggagatgccccgatttccttatttcagagcagtacatgcgttcgtctcacgaaagctcttacaactaaaacaacagcaccaacaaaccaggatcaaaataatcgtgcattttccaggattccatgttggacttctcagtgctttggagatcaggaaataatcatgctgttgcagcagtatggttttgtgtctggattttattcatacaggcatgtgtttacaggcatgagaattctgtattgaaaagaaagtccttgtttttttctaacgtatctttctgttccatcaactgttaaaaccaaattgttaagaacattgagcttcttaggagagattacatgcagctacttaggaccacctcagcaaaatggagttgcctgggtagatagcagcagcagctcaccagccccacgctgccaggctgctggctgctgtccaccaggcagctgtggaacctccatgttctgcctaggtgttgtggcaagaacagcagggaaacaggcggccgcctccaggccacaggtggacccagggaccttcagttacgccgcttcaattgaattcgtggtggtttctctgctacagcagaagtggaagaagctcttgtcttgtttggcatttgtcccattttttggctaataattggctttgaatttctctgtgccctgcttaccaattatagctttctggattggctgttcttagcagtgcaaatgtcaatgcaaagaagcaagcaggcggctactttctgggaagaagcatagtccgtgctcacactggatataaatctgcaagatttgggggtttggcaaaataggggtggagggaaagctgccatggctgtcagaaattggggctttttgaagaaaagcttgtgtaggcatcagccactggctggccagaattccatgaatggaagcaggtgcccgagtgatctggggctttacatgtggatataaatagaagccgggagcctgaggctttgctttaggaaaatcatgagccagaaaacagaggaggtgattgtcagtagtcacctcacgccgctagtgttttctaatactctctcgaattgtcaaagcaaaggaccttataacagcaacacgtgtgtgactcgaagcagcgagcttcccttgggaaaaggagcctcttctcagcagagggtcccagcctttctgtccttccccatcggaatgccaggctctgtgagtttggatgttggacattgccacctgaattccaggaggccggggagctccagtgatggacttgtccccaaaagagtggtgctgttctcagagccataaatgttccactgaaagtgtctgtcccctggctcacgctggctgcgcttgcttgaaggaggctgatttaagggttctaataggaagacaaatgaaactgtcaaattttatctttaagcatgtgagtaagtttgctcattcgcttttactattgatgtatagttttaaaattcttaatttaaaaattattttaatagtaaatttttcacaagtgaacactttttatctttaaattaaaattctgaagctccctagttagttagatccaattgctggttacattttgggaagctctcattttagtgctatgtagtttcattgaataaacatgtttttaatgaga

SEQ ID NO: 13 - DNA, 121769 bp, Homo sapiens
tcccgcggcggctggcgtcgggaaagtacagtaaaaagtccgagtgcagccgccgggcgcaggatgggatccggctcctccagctaccggcccaaggccatctacctggacatcgatggacgcattcagaaggtagcccctcccccacccagacaccccctcctccccccgggtgacagcgccggggccgggcgcggcggggcgggactgtccgtgcgtctgccggtccaggctgcggcctccgtgcgctccgccagctctggtcgggggcgggggtccccacgcgccggctccccggggaaaggggcgactcgccctggggggtggggggtgggggggcgggctagtgtttccgtttcacaggcagagcttttctttttgaaaatctgattaggctgagtttttacattcaagggctggcacatgaagcctttaatttccggtggatcggcccgccgggcagccccggggtcgtggtccgcggagggggcgagcagccgccgcttcctgtcgcgcgggggcaggtgcggggggcgccggcggggacactgctcccccgcaggtgagtagctccgactgcagagggggactcgggccgctgcacctccggggccccgcggagagcctggggggcagcgggtccggctctcccctgctgtgcggagataggaagtccctcgaatgtccagcgttcctagcggacttgagttacacgggagaggggttcagaatagaccccctttgttcgtggccccctctgacgggcagggagggacaatgagcgcgccggcttggaaggggctctcatgagctccccctaaagtccccagggaaaagccattgtgaggaaatccctcaaacctcagctgggcgtttcaggaagcccttgcagctgcttctcacctttctgcccacggagtactccactgaaggaggccagggagagatgccccagccaggcacagagcaggtgccggccaggcttgagtctttcctgttcccagaggtgcatttggccagtttaatcagtagatttaagccaacaagcctccctcaccctgtgcccggcttgatccccgtgaaatggaaagtacagccctctcccaccgtagcccgctttgagagactcagataaccgggaggaggaagcatcttcaaggacaggtggtcacccccttatttaatcagtgctgggcagctgggcagctgggcagcggcagacgcacaactagacccaggtccctgactccaggactaggcgtctgcaattgcatgggactgtaacagcctcctttctccccaaaggaaggagtggccctcccttgaatatgtcactgcaccagcatgcacactcacacacacacacacatgctccaatgctcacacatccactcacaaacacacacacgcacacacgtgcatacacacacgtgcacatgagcacacagacatgcacaccacataggcacatgcacacacactttttctgcccgatagatgagaatgtatcaaagacctgcctttaaaagcaaaagtctttttaaagtgagttgtcaccagatcaacagtagcaggtccgtcctaagaacttcctaaagatgtcccgggagcagctctcttggaagcaggtgaaaagtggaggagagcttcaggaggggtgggaggaggacgctgggcatggcaggccaggctgttattgtgggcagggtagcttttcacagtggacacgctgaggttggggtgatctccagaaaagcagcctgcaggtgggccctggggaagacatggcatgtggcacctttgcgggggagaggcggattgactgccagctctaccacttcctgtaccacgagcaagcccctgggctccccaagctggcatccccgtccataaagaagggataataaaatctgctttatagactggaatgagaagggaatgagtgaatgtaaacactgcctggaacactgcagaacacgatgagcattattcttccctcagttccttccataaacgtccttttgtggtgcaaacagggaggcgccagacgggtctccaacccccaccccgccccccatctccacgaggtctgttgcttgctcctgagctgcccccgccctctgccccttgctgtgaaccccgttggaagctcctagctggactgtgagtcctggttgaagctgaatcgtttgcccaagccatgtgccgggcaaagcatgataacttctcgctcacctcccaggctgcacacccagcagtgctgtcacggatgggttgcaccgggctcagctgagagcactttcagtgccgctgccatcagccgccattccttctcttaaagtaccaggcactgggtaaatcctggaatttccagcgtgaatctgtctccctgccatccgccccatctcctctccatcaaaggtcatggaaacaaacccatgttgcttcctaggagggagccctgggggtcactgggtgcaggagataagggatgtgttgctttccgtcactgtgttcgtcggcaccacctggccatgagtcctggcgatgggcacacccgccccttcgttatctctgctctttgtccctctggttacctgacccctggccatctcagtttccccctgagaccgcagagacggggaggaaggagggaacattagaaactgggggttctgccgagttctgtgctccggcaaagctccaggttgacaatctgaagttgtctgagggaggccccgggcagcaagtgccggtgtctcctggcttggccttacctgtgcaggtaaccctgcagacatgcccagtgattcagaggagccgctgcagccacttggcgccaggccaatgctttatttatatgaagaaaactccagacacgcacaggtgtcacatcaccagagtgacacagtgggagtcagcaacaggaatttgggggattgtcttccctcctcaggagcttttccttcagaggttgtgcagaggaagctgggcgtgtgaagtgagtcggaggttgcctcctgagccctacacgaaggcaggactctgtgccctggagtccaactgaggctccgttttcagtgctcccctctcatctcgagaaccttgggtcagttacttcactctgtgcccctgtgctgctgtgctaataattaaatgggataaggcagattgcctggtcaatgagcccgccgtgtttattgagcatctactatgtgctgagtgctggggtccatgggaagctgagtgctggcggaatgggaaggcaactacaaatgataaacagcagcagacgttgcaggctgggtgggccagccccgtgtggggcctgatgaacaggtttttttccctgacgatcggctttgcaggctttgtgggctttgtggggaaggagccctttgtgcagaactggtagccatgaggatggcctggtgagaagctgctgaagggctggggacagcctccacccagccagcagcatctgcaccggcctgttcccgtcatctgttccttggcttgccagggtgcacagatcaggacttggcacttccccagcaccaggtgaagccctcctgtcacccccaaccccgtgtctagaccctcaggtgggctgttaaagaaggggagaggtggaagccaggtccccaaacctagggtgctgaggtccttgcttcagagagactgtgtcctctaggagctgaagcgcttcgtctttccccagaggattcgttttttcctttcctcagctgcccctaccctggggggccctggctgcagcacctgctcctttctcttgcctatggagaaagggtttgctcagctgagctgcccatggagtgacagggacgacgcactcagcactggggagctggagggggtcccacctggtggcacatccaggcttgggtttgccaatcttccgaatcggggaagagagaggcctttgggacccctgggccaggctgtgggctcgggtgtggtgaggagccacatctgggcaagactgaatgctccggggcctctgtggtgccactgccctgacctggcggccccctcgggacactcgcactgtgcgcggcctccctggcgcctctgggctgtggtgttctggtcttggccttgctctgcagctggaacccaggtctgaacacatcggtggccgcttgagtttgcggggctgtttctactgtaaaccagagcagtgaatgcgcacagcccaaagggaggagccgcgctagaaagtgttcaagcgtccgcagaagtcggctcccagttcttaatagtttgccacccaccgtggctacgccacacctacgcttgcctccacccgacctatgcctgcccccttcacatgcgggagcccagggctccgtgccctgggcagctggtggggtctgcccaggccttctcgtgatgcttccacccagcctggtcctggcacccaaggccaacctctgcgggccccagagctgtgcctttttggctcaggtcctccccgcagtgcttggagtccaggcctctgcaccctgctggggtggtctgtggtcctggcccaagggaatgtcgctccctgctgcctggttctactgatctgtcctgttcaggcccctctgccttcatttcttgctttggcacaagcatgagctgctgtttcccccagctcctcaggggagaggagtgcactgccccaaccttgtctggtgtggttagcatggtggggccttaagccctacccggctcctgcgtgcctttcccctctcctgcccacgacatggtcaaatgcaaacctcctttcattttagaaggcatgggctgctcagcccacacgcgcagtgccctttcctgtggctgcaggcatctctgctcaattgtgcagggctgcgtcccccggccacactgactcctctccaggtttctcggctccagcaccactgtctgcgccctccttcccaggtggacggcggctctcctcgccatcctctccacttccagcctatcatctgtctgcctgttacatgtttgtaacttttgacctttaaattggtataaaaatggtactgtaagttcactgaaccaagaaaatctgctgaaggaagggggtcagtcacacccttttggggtttccagtgtatgaatggagggggtggcggtggtggagggacagggagcaatgagagttgccagccttattgctgtcctgacccctggctggggacgactcccctgtctccacctgaattgaagctgggctgtgaaaagtagtaagaaccctcggtttttggttcctttttcaaccagcaatcagccatgaagtgcctgaccacttgagagctacagcaggtgctgtctcggagagggcacaggaaactgggcccttcccaattttagcccaagggtgccgaaaagtcagggagctgctggcctccacactccttcccattggtgtggtccgaattcccctttagccagacatttccaatgtccagaggcccaggaggggacagctggaagccagaagcccacctgacgccatcaggaatttccatgaatgacctggaaacctctcagactaaaccaatgccgcccaatctgggaatccaggagggctggtcccatagagtggtggggacatggtgctgagacggacagcctcgcctcatccgcctttcccacttgccagccgggaggcctgggcaaaatcactttctccccagggaagtggaggctcactgtgcagtccacgcggagcaatggggtgaagtttccagagcagggcagggcatgtggggaggctcaggaatgccacccttgccctcaggcctgggcacagcatagcccccatgacgcttctctcatcctggacccatcagcccggaagactctggaagcagcagtggcagcaccttcctgtcacttgtcttgtcactccccgagtccactgtgagctagaaccacaggctcccatgaagaaggagccagaaccacaggccccatgagcccaggtcccacagcccgcaccttcgtcttccagccagcctctccggagctcagtgtgggtggaggggctgtctggcctcagaaatgggcaaaagacagctctcgttgtcagcgaggtaaatctagcgcagaggaagggcacactgtccccgtcagacgcctcagatgaactgacatgcaaatgagagatgaaacggggacgagccgggcagctgatctcagtgcagcaactgggacacctcggggcataagccgggcagggaggcggcaggaactgggccccagggggccaagacttcctgagaggctgggcccggtagcccagtcctgggcttgcttcccagggggtggtgggcaaccctgaaccctctctcacccaatcacctgctcccctgggtgcaggtgacccagcaagccgcactcctgggaaatttcagaaggttttgggcaagaagggcccagagagcccccagagaccagacggcacagcccgatagctgggcctgccccagacaaagcgtgtctgcactccttggctttctccccagacaaacccaccctgagctcaggatccctccagcttccaggagcaggtgcggggcctgcagggacggctcgcagagaaggcagtttgcgagtcagtgcctggcttgtggaggttgagaccaaggccagttgggtgcttgcatttccaggggtccaaatatttttgagaagaaaatgttctaagaaagtgcacagggtggtggatgaaagaccacgctctgggtaccgtgtacaccgctcgggtgacagtgcaccagaatctcagaaatcaccactaaagaacttacccatgtaaccaaacaccaccccttccccaaacactattggaattaaaaaaaaaaaaaaagattaaaatggttaaaaatagaaagtgcacaagcaagggtccatctgcaggagttggaggagcgcatgcctgtattcctggcactgcgggcacagtcatgccatgggcaccagggacgcccagtgcactcagccacccaggggtggctcccaacattttcaagctcaaaaagaaatattttcacttgagggtgcaacttatttgtcttgaacccatccctgactgcctgtctcccccctcaccctgaccacatctccccaaatcccgaagctggtcacgcaacgggagcattggccctgaacagaaacccgcagtacccctgaaaactcggtctagaaacaactaaaagaagaaccacagcattttattccgtttgctttagattctctgccaatttttttttttttttgagatggagtctcgctctgtcgcccaggctagagtgcagtggcgtgatctcggctcactgcaacctccgcctcccaggttcaaggaattctcctgcctcagcctccggagtagctgggactacaggcgcctgccaccaggcccggctaattttttatttttagtagagacggggtttcagcaccttgaccaggctggtctcgaactcctgaccatgtgatccgcccgcctcagcctcccaaagtgctgggattataggcgtgagccaccacgcccagccttttttttttttttaattttaaattgtggtaaaatatatgaacaataaaccctccctccccatccccctcccccagcccctgacccccactgtacattccgctttctatctccatgaaactgctgagtgcggggacctcacagaagtggaatcacacaggatcgccctgctgtgcctggcctccttcactcggatcatgccctcaggtgcatccatgttgtagcacgtgtccgaatttcctgcctttttaaggccgagcggtattccattgtgtgcgtggaccacattttgtgtttccattcaaaacggatgaatcgatgaaactgcctgatatttttaaagcctcagtcattttcattcttagttcttcagtttgcaaagggccggcctgttgtgatgggtttattgttgcatcttctgaaaaactttgtgagttcccgaaggcctctccacgtcttgagtcatggctgtgctgctttgcgaagctgtgtgcatgtctgtggtgtagcctgtgtacagcctgtgatgcgtcgcagcggaagggtagggggctgcccagggaagacagatgcgccaggttccgctccacggagctcagctaccagccctggtggagagcgcagatggggccgatttgtcatttgtctgcgcttgagcccagcagctgtgtggcctccctggggcaagtcattcaccctctctgtgcctcagtgtctctgtgaagtggggggaagtttttggaagattaagtgggctaatacgcgtcaaatgctagaacacactggcacttggtaaatgctatataagtgttatcatttttgtttgtttattatttatttatccatgtcatggatttaaggcagtctaatctcagtgcctggtggagacccgggcgccacccccccaggttgtcaagtggtccctgtgcctcccactatcgtccccagcacggtgccgtgtccgggcgtgcgtgaagggccagctcacctcacagctctgcttcccaggttagctcccatccaccctccccctacctgtttcctcaccgaaggaaggggcagaaagatgccctccatgccccttccgactgttgcagagggatggaggactatggtacatacacacatatacacgcacacacccaccacacacacacaccatgcacatgcacatcacacacacgcacacaccatgcacacacaccacacacgtacacaccatgcacatcacacacaagcacaccacacacaccaagcacacgcacatcatacacatgcacacacaccacacacaccacacaccacacacacgcacatcccacaccatgcacacacacaccacgcacacgcactgcacacacatgcacacaccatgcacacgcacatcacacacttgtacacaccaggcacatcacacacaagaacgcacaccacacacaaggacacacaccacacacacacaccaagcacacacacaccacacacacgcacacacacgcacacacccaccacacaccacacacatgcacatcacacacgtacacaccacacacagcacacacaaaaacacaccacacacaccatgcacatgcacatcacacacatgcacaccacgcacacgcacatcacatgcacacgccacgcgcctcacacacaagaacacacaccacacacacgcacaccacacacacgcacatatcacacacatgcacatcacatacatgcacacaccacacttacacacatgcacatcacacacaagaatgcacaccacatacacgcacatcacacacatgcacacaccacacatgcacatcacacacctgcatatacatcacacacacatcacacacatccacatgcaccacacccaccacacacatgcacgcacctaccacacatgcatatcacacacatgcacacacaccacacacaagcacatcacaaacaccacacaggcacatcacacacatacatacacaccgcgcacacatcacacacatgcacacacaccacacacgcacagtatgaagatgacagagaagtcagcagagcccctgggggtttcaggagttgagtggggacgaggcaggtggccacacagctcggagggagggcagaaggcacccgtcttcgcagagtcacagtggggcttgcctcctatacgtgccggaagggtgaagccccttatctcattgcccgatgtgatgaggtttgaagtggttgagcttggagggtatgggctgagcccacagcagacaggcctggcagtgccccccgtcttcccaccctgcggtcatgcagcccgactcttgggggcggggtgccaccgtgatgtgccgtcacttgcagcagtatgtcctcatgccaggctgagaccagcactgtgtgaccagcctgccccatgtccctcagcgctgtgtcacactccacactgaggccccactgaagcatgccaggccccatcctatttcttccaggtagtcgtctgcccagcacctcccctcccaggccttgccctaaagcccaggcctctcagcatccaggactctggaatctcccaggtgttgatggctgaggtcatcagctggatgccaggacacccaggatgctccaggtccttgctggggtctggagtttgtgattcagcctcagtccctgtggtgagtccaccatgtgtcctcagacaatggatcagagagcccccagaggacggcccggggccgagtcgggtccagatgccaaaggggcttctcgaggcatctccagctcccacctgcccctcggagtgccaggcttggcttctggaagagaaagctgggggtttagtgactccagccaactgctgtgagcccaaggcatcaaactaaaaatagcgaggccaagagggagtctttgtgttcggctcagtgggcaatggtgcctcacctcgcagcatgacacagggctgatgacacggggcacgttggtcacaaagtgccagtctcagcctggcacagggacgtgccacctgcaggtgatgacacatcacagtggcagccgctcctgatggtgctgctgcattgagtaggagcccagatccagggagacagttgcagcagatgaggcaggaggccagcgaggggttctacctgctttccgggctggcctctgcatggacacaaagcagaaagggcataaaggtgaccctggccaccaaagcagacctggagcaaactggaccagcgcaaggccccggtgccagcactcagagacatttcttttctggcaggaaatttgtgcttcattttctaatgaaattccaaggcaatcaaaaggcaaggaaagaggagggaaaggaagggagggagggagggggttccattcccatccgaatggaagcccccaaggcttctgtagctccccccatcaccaacttcactcaccactcttatctgatgcctcctatttgggtacacacggccgggtcggccttgcgagagactcagtttcctctcgacttccgcccgcctgcactgtcaccacgtcctgccattgacctctgttcatccactcatggtcactgctgtgagttgaattgtgtctcccaaaaaagtggatttctgtgctaacctgtgaatgtcccgttagttggaaatagggtatttgcagacataatcacatcaagatgaggtcatactgcattgggatgggcctcaagcccatatgcccgccatccttctaaggagagggaaaggcagacacacatttgtccatggaaatgagaacggaagacgtagagacagaatcaggccatgtaaagacagactcagagaccagagtgatgcatgtacaagccaggctctgcgggcagcccctagaagctggaagaggcaagcctcctccctggagtcctgggaaggagccagccccgcccatgcctcgagctcaggcttcaggcctccggagccaagagagataaacctctgtggtttcatgtcacccagtttgtggtctttgttatagcagccccaggacactcagggggttgccttgtccacccccatcctggccctctgagggactggttggctcttagaagaccgttcaacctgccctctggtcctcctcccccacccagagacccctggctacaccctgcccaagggagctcaccaaagcccacagggtccctgtgatcttgtcacctgggctcccacaggccagcagtgttggaacctggacatctggctccagccttggtggccacccccgaccttgctctgctcctacagctcccggccttccctgccctggccggcccttgctgaatgtccccgctcctaggaagccggatgtgtcgcgtgcaggtgcctctctgcactgtaataactcctcaccaggcacccttggagcccaggatcaagtcactcaccttccaaccctgcccctgcccagagactggcacgagaaccagtaacagttgttgaataatgaacaatggatgcatgcagctcacccgtgagagggcgttgctcggctgggccagggatgaagcttctcccgcgtggctccaccgtctatccctcaagctcctgatgctcccctgggcacctctgcgccatgaggccccgttgaagtcagttggggaggcagtgtggaccgtgagaagggagtcctaagcacaggaaacgctgccttcctggggccctaaagaacaggctcaccttccccaagggccttcaggccctgacatctaaaaagatgttctttatcaaaggggaaagcagccctggggtgggggcgtggccaccagtgcagtgggcgtggccacaaccgagagggcgtggtcattcgtgcagtgggcgtggtcatcaagaaagggcgtggctgcagccggaagggcgtggctatcagctccagaaggcccttcttgctgtccttggacttgggttctccttgtcgacgaggatctcagctggagctgccaggggcagggctggcaccaaagcacttctgaagtctccccgcctcccaagtgtgaggctgtggggaaggagggagggcagctggcttgtttctggatgagcccatctgactcagcagctgggacccagcaggagcgcagagcaggtcctgaaggtgccgaggccccacccgcagctccgtctcagctttgtgagggctgcactcccccgtgtgcatccggcgtcacaaaggaccacaggcccggcggcctccacagcagacaccaaggccctcgcggtctgaaggccgaattcccaggtcaggctgcagcagggctggttcctgaggcctctcctgggctggcacctcctccccgtgtccatgcagggccgagcctctgcatgtctgtgtcctcggcgcctcgttttacaaggacatctcattttaaaggcccggtctccaaataaggtcatatcgtgaagtgctggggtcagaactacagcatgaattttgacgggacacagttcagtccatagcacccgctttgggaagtgggaatgacctctcccttccccatcttctggcctttgtaaccctaatgtgggaaagcaggagggatccagaacgacattgggtcaccaaagagagcatcgcagcccaaaaggttgaaaggcggcaccaaggtcccgcgcctggtgaccgccgactcgccctcccgggctccaggctgtccccactcccccccgccccaaccccagcatgttgaggcgcctggtcccaactgcccattcactccctgtacacagactgcttctttgtcctccagccaggggtgaagggccatgctggcgaaacagcaaacaaccccaacatgctttgcagcctggccaaccacatgaccagtttgaggaggttggctggagatcacaatgaggaagttggatgagggggtccaacttctagcagcccataagcctatccattcagacaccaaatccatggaaaacagagagacaatatactgattttcaaaagggagacataccccagcaagtacagaccagggaacagggtgctgacgtggccacagttcttaaactactcgacttcatggatggggcacagttttttttaaaggaggatttagaattctatttggcaggtggcatgaaaaagagttttgaatagaaacacacccctccctcccagttgcctgcccagtatgtttgttttgttctcttgaaacaaaggaagagagtggtgaggagggagggaagatgaaccaggaagaatgaaagcacttggcctgcttctcagatggtcttggactgtctccgctcacaggagttgcaggtttttgggttttatgcaagttcggatcacaacaggcctcttgcaagaaccaggcattacctttattccaaaagccttgctgggccttcttgaaaggactggcagccaccacttccctagaaacccgtggcaagttccctcctcccgaccccctgctgtttggtccaggaccccctgcagtcctgactgggacccacttggcccttctcaagggacccagcacaggacgtgtgtttctgctttgatgaaccgccctttcccccctgcagttctagtggaatctcccctcccttatcccattcccacttggaaatgatgatgatggaatgggcgatgccggcttaccaagacatccaagctctctgggtcgaagttggagagaggggtgcacaaaaaggattccactcctgtctgccttcccctgcctccccgctggggtgtccctttcccatggtttcctctaaatcttttcacccatgtccagccacaccattctcacatactgccttgaaactgggctcgaaggggctgcgtgctgagagaaggtcctctcccccagtgatcctccagaggggctgccgcctgggtcccccgagcacctcctaccccaccctccccattcctgccatccccagggtccagggagcccagattccagggaagggttgcattagctcccactcggagtcctgatgcagcagagacagacagaggccctgggagaagtgagcatgaattattaagacaagacaagggtgaggccccagagagggggtggcggaagggtcatgttcatgcagcgagagttgcttcgagcttgaaccgcgtatccaggagtcaagcagattgcaactggcgagaggccttcagaaatgccccgtgagagtcctgtgtgcagagctccatctcagcacacttcctgttcttttggttcgtcgatttttgcattttcagtcccctgtgatccattatttataacagtggagattggcctcagacactagcagtgaggaaaacaaaagcgaagctacgcagaaaaatgacaagagtgatgagcacagcagtcatgacaaatgagccctgtgcggaggcccgggatccgcgcagatgccggcgcgggggaaatgggccctgaaatcccaccgtcaggccaggcagctctgagcgtgacctggagggctgttcagacggtctgggtagccgtgtcctgcgcatgaacatcctccgtcgggagaggaattccccacggattatcagagctgctccctccaccccccgccacgtcccacgcgggccacatcaactccctctgcagcctctggccagcggctgagccctccgtgtctcccctcgttaatgcctccttcaccatcccctcctgaagtttcccccattgcatacacgcgctgaggcccacccggtatcaaggactcccattgcttgcgaaaaagattccacccctcttagaacagagaccagggccgctgtagcaaatggccataaatgccacagcttaaaacaacagaaacggattatctcgcagctctggaggatggagtccaaaatctgaatcgctgggctgaaatccaggtgtgggcagggccgcgctccctctagaggctcccccggagattcccttccttgcctcttccagctgctggtggctgccagcagtttgggaattgcggccgcatcacaccacctttctgtttgttgttgacatccccgcctcccctgcctgcggggtcttagatgtctctctccttcccactgagtttcactccacatttgaattggattaactcatgccatgttaggcaaacgtgcccctcaaatccttccacttaacagacatttattgaaggttcctgtgtgcggggcccaagagaagggacattaaattaggagatgaaccttgggaggccatggcatgcttcggagcctcggcgtcaaaatgacaacccacaccccacttggcggttcatctggggccctggaatcagcagactgaggctggaacccagcaatggcacatgctggctgtatgttctcgggcctcagtttcaacatcagtgacatggggatagaatctgcccagcggagttaagtcaccgcatcccggagagccgagtgtctcatagaggctcctggtgtggtctccatgctgctgctcagcacggaatgaagaggttcaggaacttgcccacagccacggataatgagggacagagctggaattgagcccgggaacctgcacacacagcccagtgtgaccgtgccttctagagagaggccagccctggcaccaggtgggcatgccagcatcaccttcaaggtgtgctttaaggatccaagataatgtgggtgcttcaacagatgcatggcaataaaaggaaagcaccatgtttcaccttcacacacacacacttacacattcacacactcacatacttacacacattctcatacactcacacatatgcttacacacattcacaggctcacacatgcttacacacacattcacacgcacacacattcacacgcacacatacacttacacacattcacacacatacacttacattcacacacatacacttacattcacactcatacacatacatacattcacacacatattcacacattcacacatacacattcacacacatacacttagacaccacactcacattcacacacattcacatacatttacacacacatccacacacacattcacacacattcacatttacattcacaaacattcacacatacattcacacgcacttacagtcacacatacacttatacacagtcacacagacttgcacatagacttacacacatacacttacacacgcactcacaccttcacacacacaggcaatcacacattcacactcacgtacacttacccacacattcacacatacacacaccacatacacgcatacacttacacatgcactcacacactatcacattcacacacacatacacttacaaactatcattcacacacatacacacatacacatgcattcacacacatgctcacacactcacacatacacttacactcacagtcacatacacccacattcacacacatacactcacattcacacgcacatacactctgacacacatatacatacattcactcacacatacattcacacacacacggatgcattagttttcaagtcaggatcctagcacagcccacaccctgcatttgcttggtgtctcctgaggtctctagttatacttcccatcccttttcttgccatgtatttcctgaacacatgttatctttgatccttaaaccatgacttagagatacagatgtatgacaagctgagagatgatgtgagactgttgttaattttttctccatgtactaattacattgtggttatcttaaccacaaaggaagcgttctactccagagaaccgcgtggaaacagtgcagatggactagcacgatacctgagaggagctttaggataactccggtgctggggaggttggggcccagttcaagcaggaggggaggcgtggggacaggtgttgaagctgtgggtgtgcagcggaggcttcatgacgctttcctcctgctcttgtgtacgtctgagcatttccataacagggaagtgttttgttttgttttttaaataacattttaaatgcctctggcacatgggaatccatggtaatttctgtcgttgttgtatattctttttcaaatgcaaggacctgaaaaatatctcctaaactggaaaaggaaatgaggctgaatacagattttattttagcaaatagagaagcagtgattgtctggcggttaactgtaatccattctgagtgtgactttactgttaagtattctaaaaacaagagaccaaacaaaatgaacaatatgtccaaatgtgtatatatataatttgtaactagaggtaaattgcagatgaattgcagatgtacacagacagatggatggacagatgattgatatagattgattgacagatgattcatagataacttgcaatgtttcttcagtgaacgcatatttatttcttgggtaataagaaaaaacaatagaatgtggaatttggggcttggcctcttttagctcatttaaaaaaatattaaacacttggaattatcgagcgctgaaaaaggcaatagaaaattcaccttttaactccctcaaagatagaaatgtgtgaatctgctagtgggttgcgtttggctggtcctgcaggctgatttggtctgttctctctcccagagagatccccaagcccggctgagatgtgcctgtttgtcttgagggcagacaaagcctagcaaaatcttatggaagctgatataaaagcttaatagcttataaaagctctaaaaatgattcacagtctaggatagagaaaataaaaggaatttgaattggtttattttcctttagaggagcctaaatcaatatttattctgagtatgcaatcagaaatatcagtaatttgagaacaaggcaaacagagctgcacatcccgttatggccacgagcccacctcgccttcgttcagaccacagctgaaggtctgacttaggtgcagcacgcacccctggagctgagggcctggagcagggccaggccgggctcttctctctcttgtctgtcctcgtctgtgggggaatgaagatgacacagcactcaggaggtccttttcaggacccagagtcactgggcttttagggcgtttggctctggttctagcccgagtgtggtctcagtccccattggtggttgtggttgtggcatgggcatcattagtcacacaacataaaaccacagaacgcagaatttgctcaccctggttcacacaggagcaagcttgggcaccagcaccccctgaacgcatgccaaagggcaggtccagctcagtgctggggtgtggaggaacccacctggggcctgcctgcaaagacagatgccctgccgtgtttagaaaaagagaaaactggcctaaaccacagtgaggtcaaatggatcatttaacccgtcgagtttggtttcttgttcatccgacgcggttgatcttattaacgcatatgtgtttgtgttgatgtggcctccagcttctgtcgcactgtggacacagttggatgtggctgctaatcaatgcggggctccgtaggtcagtgagagcaatcagagcctgctgtgcggtggcatccccgagttaagacaggcttttgtcccatactctattgaaacacccagaaatgctgacatgttgaagttaaggccatgtgccttggtgctacttgcttgcgaaacagcctttgaaggaaaaaggaggaggaggatccatgagtttcaagggtcccctcctgtaatcacggctgccactcaacggagtaagtaatgtgtagcgggccctctatctgcatgacgaatcctcctaacattcctgtgggcgaggtaggatttgtctcgctttgcagccgaagaatcagagcctcagaaaagttaagaaatcttccctgggtcaagctggtaggaggagggactggaactgaactcacatctccacctcctctcttcctactcctctgcctttcttgcacctagagcagtgtacaacatcaacaactgaccagggcgatcctagaggtaagagacagccgaatggcacggacccagccaagcccaggcctgcccaggtggaacagagccagctaggagcattcggtagcagaggtcagtccgctgattgactgttctcacttccaggcccacagcctcctccaccctgatggtctatgagtctagtgcggccctttgcacaattttagcaactgaacccttttcctcacagaattgtgataccgtcctaacatatgaagcatatataaacagttgggcaaatcataatagtttccattatttcataaatttgcatttgtggcaccaaggagagaattaatgggaacaagagggttcttgtgtgagttccgcatttggatttgggggttcgaggtggcagctataggctcacattagtgtctgcatcactttgcttcagtttgtcacggtggccccccaaatccagaaccgccctcctcgctgtgtgaggagggtcctgcctgcaccgctttgcagacatgggccagcctggatgcctgggcgacgctgccctgcgactcgctggcctgcaggacatctgcaaaacattcaggtctcacggcagtggccatgaacggcctcacagacactgagtggacctgaccccaaagagaatgcgtcgtccttgaacgtgtcgatatttaggttattacacaatgagtgtgttgctttgcaattagtgtctgaaagagttagagcagatgtacatatagaaacgaagaaacgaaatctgaatccatgctgacagattccccctccccaaaccttgctcaaggtaacacaggcgaccaggagcaagtcccggccggccccctgctagcgtggtctgagtggcccaagcaggacccctgcccaggctcactggactctcctggagcccccagacacgacacccttcctcatcactgaaaatccacttccacagtgtaggagatgcatggatctgagggccagtaggaagtgctggagctttaggctttagacattctttttttttttttttttgagacagggtctccatttgtggcccaggctggggtacagtggcgtgagaaattctttaacactctgccgagtcctggcccttggggagtgaggcctggctatgaggcttcttgtcagaactccgtgtgactctcaggatggaagaacagggtgggggctgctcctcccctccctccctccagcccctggcctttgtaaaacggctccgcctacgcgcctgtagccagtgcagaaccagggaggcctctccccttcccttcccaggaggggccccgccttgtcctccatgccggattctgttcgtcctcccccaggtcctctctgctgcctcccactgccccatttcctccaggaaccttcctctctcctaccaccagcctctctcctacccccagacacacactctttacatgccgatttctgtcctctggttaactggcgtttaattttctcagctgcttggcttaatgccaaagagtgttcttccaaataaaaatggtaaagaccttttttctcccatgagaattttatgtaaacgcagtgcagcatgctcgtaggctggttctgttatcaatttctaagctcagcttccagagctagagaacttttttattggttataaaaaccctacatattcagtgcagaaattctgaaaaatgcagaacagtatcagggagaaaataactcatcccccactacccagagaaaaccgctgttaacaccgaagtgccacagttgctggcgttctcacacaggtgtgcgtttaggagtgtgtaagtgcgtgtaagtgtgtgtctggctttctttcacataattttgtgtcctgatcattttcactcagcattacatcagcagcggtttccaatatagcattaaattgtcttcaaaaacatgattttaatgcctctataaagttccatcatggaggctcactaaaatgtaatcacttcattgtttatgagatactcagcttaattccatttctctgcagtgaataatccagaggaacacgctcagtgtgcatctttgcttgcagcagggcagcgcagggcattggttggggtataaatccgggggtgcagtggagattagattagatcgtccgtggaaagcaccagaatggtgcctggcacttaataaatgctcttattagtatgtttatcttcattatgtccctaagagccattcctggaaatgagactgtgagtcaaagggcacaaataccgccaacctgctttccgacagcgctgtgtggatacacgggcccgaacggcgccagcctcactgcctctgcgttagtgccgccacttcatctcagatactctcctgaagataagaggagagtcccatgcagccataagaaagacaacggagagatctgtgtaccctccacccagtctcccctactgggactgtcgtgcaaaattatggcccagtcttacaaccagggtattgacagcgagacaagcccccatctgatccagattctccagttgtacttgctgatgtcgtttagatatttgtccccgccaaatctcatgttgaattggtatcctcagtgttggagtggggcctggtgggaggtgactggatcgtggggtgggtttctcacaaatggtttagtgccatccccttggtgctatccttgagatagtgaattcttgcaagatctggttgtttatgtgtgaaggtagaaggcatctcctctctctccctcacgggtgtgcacgcctcccttcatcatgtgatatgcctgctcctgtttcaccttccatcctgagtgaaagctccctgaggcctccccagaagcccagtgatgtcggtgccatgcttatacagcctgcagaactgtgagccaattagaaattggctttataaatgacccagtctcagatatttctttatagcaatgcaagaacagcctcatgcacttgtactcacttgagcatgtgcacttacttctgcacgatgttcttgcctgtgtagactcttacatccacaaccacagtcacagtctagaacattccatcgccgcaaggctgcctcttataaccaaccacatcccctacctgcacccatttccaacaccccatgcctaactcgatttccagcaccccgtcctggtgaacatgaatctgttctctatctcttcaattccgtcatttcaagaatattatataaatgggattacacagtatgtaacctcttgagactggctttttccaactggcatcattcccttgagatccatccaagtggttgtgtgcaccttttccttgctgagccgtgttccatgttgtgggccgaccccagtttagcactcgcccattggagggttggagggcatccgactcatctctagtgtggggcagtgcgtcaccttctcacaattgtcaacgggattgtcactagtatttgccttccatgtcttggaggccaatgtggctgctcttagaaatcagtcctccttattttggttggggagatttctgatgtcagtttgacgtttataattaataagcatcatcatcaagttacaagagtaaataaaaatatgaggcagggtgaaatgtaagatgctcgagaggctgagatcagtagctgtgtgaatacagcagggcgggcaccagcagtgagctccacggggcccagcgtccggcctcattaaccagctgcccttggggaggagcagagcccgctcttccctcctggggaagggtagtgtgatggaaagacaggctgcccttctctcctgcaggagctcagcatcatgctgtgtacatgcctgggctctcttcttcagccctagccacttaaaaccacttggagggaaagattgtagaataattataatgaggaaaatttcgctccagattcgttactccaagttcagagaagctctgtaaaaattgttgctaaggcaattgaataaagaatgtcagccgatgtaagcgataacagcaagacaatgaacataattgcatgttttacaacaaccaacctcaaagcatgacttccctgacatagatatgttttttaatgattttgaaaggtaacacagacattttcagggatttggagaggaaactaatgccatcctggtttaccagctttatggggtcatctctccggtgaaaaagactgcagccagccttgcagagagggcgctgtcttagggaggcacctccaactgtccccgcgacccagcccctaagtgcttcacatcaacactgttcttttgtgacggtgctgctgtctttcattcgccagcctgtcatgctcaactcaaacctcagttgccatccagttatcttttttttttttcttgagatggagtcttgctctgttgcccaggctggaatgcagtggcacaatcttggctcaccgcagtctccacatcccgggttcaagtgattctcctgcctcggcctcctgaggagctgggactacaggcacatgcccccacgcccagctaatttttgtatttttagtagagatgggatttcgccacactggccaggctgggctcaaactcctaaccttgggtgatccacccacctcagtctcccaaagagctaggatcacaggcgtgagccactgagcccagcctagttatcttgtttgtccaggaattggagcatttctaggtagcaccacaaatgtctgtgcaagaaacccacaatttccagtggtcattggctttgtgccaatccaaactagagtctgacaaacccagcaagaaatattcgcggcagctgcaaggaagctcctcaaatagaaatagaaaaatgaaccagggtctgctcttcccttccgggtgtggaatcaacggaagccgactcaacacagagccctgggggcgtgaggggtttggcgggatctctgccggctgcagatctctgctctgttattaccagcccttctgcccagctcctaattgctctgaagagggaataattttctcagcagccattgccagccacatttggactgaatagatgctgaaatggcaagggtaaatggggcagagacagtgaaaagccattttctatctggagcccaaataaaatcttcctcccacactcctgcctggctcctccgcagcctcaatgcccttctgagagctgcctgccccagtaggaggccaggctgggaccaaggacacccagttctgggtaaccatcttcccatggctccttggacaaccaccttaaagaagggaaaggcaagaagcagaaggaaagcagaggctggacattggaatcagcctttctttaaactaaaaaaaagttttcacatatgtgaatgcgtgtgtgaatttgaagtcgtatgtggaaggggccatatatccgtcaatgcatgctccaaaaatcagaactgatggacggcaaacagcatcggatgtgcagccagcattcttccggcggccacctcccgggggaaataggtgcagcagacaggaccgtctgtgggacggggacaggcaagcatgacagcaggtaccacagatcagggtgcacagacagggctgggggaggcagcgtggcacggcacccacttcccctcggcgtgtctgggctgaagcccagtggactcccgctgatcagaaggatcctccactagaaggatctcactggacgagtcccctccaaactggaacatgcaggtgccttgggcttcatgctgcacctttcagataaaaacacacaggtgagctgggagagctggagtcccatggaccccagagatccaggtcacgaggaggggatcgcgctgcaccaggacacattcaccaaggtgagccctggttcctccccacaggctgtgggcaaggaagtgtcgatgccaggctggctcagtaggtggaagaaccttccggaatgcctgcccgcaggctgctgctggcatcgagtctgtgtcctattttccattcactgcatgcatcctccaagtatgatttccactcggaaccctgagctgcctcatccctcgctccgtctcccctccctcccgcccagctcacactgaaatcacgcctcgcgttcagcggctggagtcctggtggattgctgcttcggggctctcagaaatccctttacttgagtcttggttttacaggaagaccatgaagcaccccccaggagctggagctcctccttctggacccagtgtctcttctcagcctcacgacgaggagacctgctcatggagctgctgcgccggcctgagctctgatccctcctccgacccagcctcaccctgcaagcagcaccatgtggggctcagaatggggatcttaagggacccttcccacaacctcccgataagcctttccacggagggcccaagcggagacaggagaacactgtatttgataaaatagagtcaaatccaggaaaatgcctctggacccggaaaggaaacgactcaccccccacccatgagagacccttctgtcctgtcccttaacccagaggccctgggcatgggtttcgcagccccctggaggccagaccctcaaactccagccttgtttcttctaagtgtgccagtcaagatgcttctcactgcaagaaacagactctttctcaagccagttcaagaagatctgcgttgctgcagaggccgatgggtgtggggagcaggctcagtgagagactgtcgtaaggaggctgagaggtcttcagaaaaatccccaggacctggggtgccaggagcctgggcgggcctgggctctcgcagcctgcagcccctcccctccctctcacagcctccgctgcccccgggctcagggcccctgcctgtgccttctcctgaggcttctcctttttacctctcagggtcccagtgtggccagcccggcactaaacccatgcgaccctggctcactgacagtcgccaccagctccacatctctcagtaaaagttcccccaaaagagtgtgattgggagctagccagcggggcttaaggcagccccctgctccagtccccttggccatggagacagggcagggttagcaggaggcaaggcatgcgcaggacagctggccggcagaggtcccgtgtgctgtcatgggtgcagggtggacactgtgaccctgggtcccccacttggaaggggtgatctagagggacttttgtcagaaagacccccacccagccaatctgactgatggggccatcaccttgacaacaggcttggtggcaaagcaagagggtacaaccgaccagagccccgggtcccctgtgccctcctgcactgcctgacagggctgggccatggcccgtaccaaccgtgagctgagccaggaatccagtcaaaccgtgtgcctgagtgacacgtagctctcttccttctctggattcactgctgatcaaccccaacaagcagcaggactgtcttgctgtgaacccaccgcttgcggacccctccccaggcctccattcccgcctttctgaaggtcaaggcagcgccctccccaagaaacggtgggaacagaggagccaggtgttcgttcttcccagctccggaaacgctgcagattgcgcactcgagttcctgctgacataacagtggctgccagacaaaatgtggcgaaaagtttttctaggtgcctttgttcactcagagacttcctagagacttgtgtgaaaatcacaggatttgcaaccagtggggacgttgagattcgtggcaactgaaatgatacaaacttgaactttgtgtcaaaccagtagtgttttgtgtaattcttttcaaacctgtcatttcacttactgcttctcacagccccaaggggcaggtggagttgatgccatcaaccctatttacagaatggtaaactgaggctcccactggttatgcgcttgcccacagggttgaaagagaagccatggacaaaaggagtcactggttacccaaagggcttcctgttctcaaatccactgctccttccattacgtggtgtctagaaggaggctcttttggatatagacattaaataatctgggagtcagtgtatgctgtgatcaagcatgtgcggtccgcagccgatggcccaggatgcagtcctgatgtacacttctggctgggtgcgtgggagccacacacatctctgtgtgccttggtttccgtgtgtaaacatcttagactagtgcttgcctgtggttggcacctggtaagtgtcagccttctctaatgtaggcagcttgagggctcccagacagtgatgttcccgctgacattcccaggtctcagctgattatgaagaggcatcaatttccagtgggggagccgccctctgtctcatcatttgtttctctcatcttgctttaatatcacagcactgccagtcaaaccacacaaaagggtttgtgatgacctgccgtgcattctcgtaagctccagccctgactcgcctgcaagccagaagccaacataaaactttcgtttttcccttaatcttgctgcctctgcatctcattttcaaatttcattttatcaactttttttgcactatttgtttctggataaaggatttgcaaaattcttcagcatgtggtcaggaagccctatggcctcctgacgaggcagcctaggggtcctcccgtggtctgaagctgcagccgggctggcctcccacagtcaggagcagcatcaggctgggtgcttctgacaccagcgaagagcgcggctgtccaagcccccatccctagggctcacgcctcatgcccaaactcgcacccactttggcgccgctggagactaatgaacagcaaaagctgaagtcatgactctcatccagatctaaaatgaccgtgtgtcaaacatttttactgaactgatgaatcgaatgggaactggtaagaaggtacgaccagttcaaaagagaaatccaagaaccctaaatgtataaggagtgaagcaatgttgaaatggacttacaaacggatgcagctatattctccagtggagacagccagtgccaacttttgtgcttattccaaatttcctgacagcctccccaccttttttccaacataatctcaaagagagattattctggatggcagaataaggctggtccccctaggtgtggcatccttgcttgcatagaggtggcaagagtgccaccataccaaacaggcctttttcagtttgttttgctggaagacctcagaagatatcagaagcaaaagcctctgttgtttgctatcctaaggttaggaagccaagcataaaaagctctcctccagatttcaccggcagtacttataaatttgatgaacccctctcttctcaaggcccccacgatattccaaaaccctggcctgccagagtagagccttttttcccatcttggaggctgtgaccctgagagcccctaccctcccccaggggactttgtgggcatggacgttgcacagtcaccctcggcccctcaagagcggtcacagcccagcaaatgagcgtcgttctcacgcacgtctctcaggcttaggctcggttgcataaaccttccccaattttatcctggcaaggaggaggacagatccttccggaacctttgcagatattgccaccaaaagtaaagccttcataaaagtttgcatttggggaggaaggagagcagatggtgaaaatcagatatcacttaagaattactcatttcagtttacaaaaaatctaggtcgttaaaggtgactgatagcttaagaagacagggaaagggcttcataacagagccggaaagtccaacagtacaacgacacgcatgatgccaaaaagtaaagcgttcctcactcattccactcagtgctccgtaactgattctccactggctcctgggctgcagcctcatgaagccagctgttcctcaactgaaaagagccctggaagccctgggcagcccactggcagggtctgaatatcatctgagcgaggccatcagaagctgtccccaggagtctgtgcttgggggtcagtcatcggaggtgcttactgcggtccttttccatggggctcgaagcttctgcattgaatcacgagctctggcctccagcctggtgcagaaccttccagggggcattggagtaaaagcttctgtagatgacagctaccccttttttggtccattttatagcagaggaaatttaggttcaaagaagttgagttgagagtcccaggagtaagaagcagtcaaggatccccccaggcctccggggccgcctgggctgcctggcctcacgacctggccccatgctcctgagatggagaagccccaggcccatgagcctgttgcccttggcaaagccacttcccttctgagtaaagtcagacgagcctgcccagtcccaagagactgcgattccgtaatcgccctcccctcgccttttgaggtcttgctggtaggtgcacccccttcaagccagcccaaggagccatgatttgagtcggtcttgccagatgtgtctggagagaatttaactccaagatcatcccccgtgcactctgaggggctgggacaggatgtggtgccctttgtgcccaggaggagaagcacccagtggggcggggtggggcgaggactttataaaggcgtcatttgctgcggccacccaggttggaacacagggaccacagggccccccgccttctgcaggaccaccccgctcatctgagggagacactgtagaaacacatctttgagcagtggcttctaatccaagaaacccaatagaagtcaaacgcagattcctagggcccaacccggacccactgcgtgggaatccctcagccggggccagaagcacgctttgaagacaccaacctcctcagcaagcctcttgcaaaccacatcctgcttctccagaagctgcagatccagaatgttcaaagaaagagccctccttgccttcctcttcttccacccctgccctctgcagactggggttctgtagacccccaaagtaagtccgccacaccggaaggaagtgagttacacaggggcccacatgggaaccgctttttgtcctgtcttggtgggaaaatggccacgaccccagcccaggctctgccacgccacaactccacgggcatagcctgggaggccgcagcgtgaactgtgactagggctgaggatggtgccatggtagaagtgagggcctggcacccggccaagtgcaggactcctcggcagtggggttgggagaagcagcctctgcaggcgaggccaggaaccaggacacaggaggagaagcacatctcagaggagggagctctgggaggagccagcagagtcctgcaaaggaggatgtgggggaaatggggtgaggccaaagtgggggctgctgaaggggctactgcacccgtgcgagcagggccaggaccaagctgcataggcagccagggacacagccgatgccacagacgtcaggaaccacgcaatgacacaggccacctttgaccgaccgttacccctggggcaaataccagtggggataacgggcaaggagaggtgctgtttactgtcttattgttgccagttcagcagcccacaggaaatggtgttagtcacagaaaaaaaaaatctgttttctatatttcactgtttccaagtaaagaaaaaagaaaactaatcttagcttaaaaaaaaaaaaaatggtgcgctgggcaccgaaaaataaccatcttcctaggcctgcgtttcccccacaccggggacttgtgctggaaagaaaagctgcgttggcagccaggagccggggaaactgtccagggaggcatcctctgcgatgaaggcggggcctcggcgtggcccgttccgcgctctgtccagccctggagaagccccaccctcaccgagctcgaaataccccctccctgagagccgagactcatggccgggaccccttggacagaagatgcggatgctaacccggcgcttccaccacagccccggcggcactggggagcgagcgcggccatcccgcgcgtaggtggtgtttctctgcaggcgccagtttcaccgcgggcgcccaggatcctcaacggttctgttgtgatgtgattcccctcttcgacttcgtcattcagcctcagtccctcagtccccaaataccgaaaggcagtcttttttttttttttttgagacggagtttcactcttgttgcccaggctggagtgcaatggtgcgatctcggttcactgcaacctccgtctccctggctcaagcgattctcccggctcagcctcccgagtagctgggattacaggcacctgccaccacgcccggctaattttttgtatttttagtagagacggggtttcaccatgttggccaggatggtctggaactcctgatctcaggtgatccacccgcctctgcctcccaaagtgctgggattacaggcgtgagccaccgcgcccggcctttttttcttttttcttttgaagttaatgaacttgaattttattttatttacagaatagcccccatgagatacttgaagacccggtgccaagcgacagtgttgaccccaggtggtcagtcctgcctggccccttccgagggatgcgccttcaccataaccatgtcacggacaggcgtgtgggcaagggggcatcgctgtatttttcacaactctttccactgaacacgacaatgacatttttcaccacccgtatgcatcaaccaaatgaaaagatgagcctgtgacattcccgtgcgtagagttacagcttttcttttcaaaacgaaccttcagtttggagccgaagcggaagcacgtggcgtctgacgtctccagggagacccgccgccctcgctgccgcctcaccgcgcttctgttttgcaggtaatcttcagcaagtactgcaactccagcgacatcatggacctgttctgcatcgccaccggcctgcctcggtgagtgcgcgctgcgggctctgcccggtgacgccacgcggcctcctcgccttttcgggatggctgggaggggcgggaagaggcgctgaagggcccgaggcaccggccttctacaaggggctcttcgaaatcaatcaatgcgcagaatcccgagggaggctcagccgccctccgggcctctctgcctccacaggtgatggctgtgtccacaaggaggaaaccgtcgggctgaattaaacagaaccgccctcctaagagtgtgggtttttctgccgggcgtggtgtctcacacctgtaatcccaacactttgagaggccgaggtgggcagatcacctgaggtcaggagttcgagaccagcctggccaacatggtgaaatcttgtctctactaaaaatacaaaaattagccgggcgtggtggcgagcacctgtcatcccagctgcttgggaggctgaggcaggagaatggcttgaaccctggaggcagaggttgtagtgagctgagatcatgccattgcactccagcctgggcaacagagcgagactccgcctcaaaataaataaataaataaaaaagagtgtgggttttttcctctcacttcttcattcacttttggagaaagcggggtggttgtgtgtgtttggtccccagccccacatcaccccataggtgccttttctacccagggggcttgacccagatcaacactgggtgaaaggctgacttcagaaatgggttgaaaagaccagtgatctgccttatcgagtcctcagagtcccacaggagttaatgtcctaaatcaacagtgtgttcgagccagtgaattttctaattatcagcaaactttccaaatgtaaagggtgagcaggagtagctttggctcaaggattaactttaaagttaggacggaggtggagaagggcaattgaagtttctcacagacaggtgagaaaagggagatgaaagtacacgtctgaaagtgcagcaaatggcagttttagccgcaaaaatagcccatggtctggggcatctttgggcaccatatatgaagcaatgtgccaataaataaatatatatacacagtattccgtatagcagccctgggatttgagtatcacctctatttcacagattttaacaatttacaactgaagatcagagattaacttggtcgaggtaacacatcttgcaagaggccccaaaacatgtgaggttggaggaagactcatcctaagcatttaaaactattttgtaggagagacttgcgcagttcagacggactcccaaaggcactggaagcggaaagacaaactatgagttcgtcatctgctgatataaatgttagttcctattttaccacagttttttaaaaaaaatctcccaactcaataaagtagacttgctccaattcccattttaaagtatttcagcatctacacgcacttaggattatacgcagctgtttaatttcatttacaatcggagtctcaatgccctggggacggcctcccacccttcccatcccaccacaccttggtcaggctggtcctgggactgtcctggttgtctcagggctctggccccatgtgtacattcaagtgtacatcccagagcacactatgggcgaaaacacgggcttgggtgtgttttccaggaacacgaccatctccctgctgaccaccgacgacgccatggtctccatcgaccccaccatgcccgcgaattcagaacggtaagaggctccggccgcgctcctcggggtgtgcctggcacttctctccatgacatgggaggctttctgtgattttgtaaatgtgctactgcagaaaggtgtgaattgacagcagagatggagagcgagggtaggagccagtgtgaaggaagcttgactcgtcgtgttcccctgcagaggagctgggcacgttccaagataacaattgcagccgtggctctgcacctgcttctcaacgggaggaggcattgtacagaggggaaactgaggcccaggagggtgagccaagagctgcagagccaggccccgggatccccacattaaccccaggaaggacctcgggagattccctacagagcccctggggacatttcgtgtttacccacttagggccggtctctgtgttcataaagtgatgcctgtgggagattctaagcacagaagggccagggacaagggaggcccaggaagtcaagaggagaggccggtgaaagcctccgtgaatgtctgtgaactaggtcaagccagcggtgtatggcccaggaaggacgcggagcaggggccctcaggtcagtgacctgcccctgttcctggtgacctggggagaccccagcagcctccactgctctttgtggttgggcaaagtggaacttagatttcctcatgaggcgagggagcaggtgagctgggggcggggcgtgcgacctcaggacccctctctggcgtcctctgttcctcccagagtggggctcactgtgcctccaagggactcagtagatgcgatggtacacttgtcaatctggtcatcagggtgtcctgcccaactgacccatggccagctctgagcccacaggagaaagtgcatgtcaggcagacccttgtgtcagtgaggtcccagtgggcgtggccagcaccgtccccctcagtgaggccccccagtggacgtggccagtgctgcctccctcagtgaggtctcagtggacatggccagagccgtccccctcagtgagcgctcagtagacatggccagtgccgtcctcagcgaggtccccgtgggtgtggccagcgccatccccctcagcgaggtcctcgtgggtgtggccagcaccatcccactcagcgaggtcccagtggacatggccagcgccgcccccctcagtgaggcttcagtgggcatggccagtgccgtccccctcagcgaggtcccagtggacgtgtccagagctgtcctggtcagccgtcctccctgtcaccttgaggcctcagccgagctcctctcatctggctgtgcccgtcagtctcccctcctgccctagccaggatgcccgtctcctgccccacacagtctggctctgactcttggcttccagactccccggaaggtgcagtgctaattggctccccagagactccagtaagcatcttgtcagcctcagcaccagctccagcctggggggtctcgctcagaagcaaagtcactgagtgacctgtcctcctgacacccacaagactaaaatgatctctcagaggggacctcacagaaaccagcaccttgtccatgccagctgggtatctgagagaaactgctttgttttcctgaagtcatttgaaacagcgtgcagagacatttaaactcggcgggaaataggagaagcccaccttgacccttctaattctctggccccaggtgccttattaacaagagacagtatcagacacaccagacaaaagccctcctgagcccaaagagcccaaatgtctggaagctctctgctgagatgccaaaatgcatgcctttctgataaagagacagagacagatgaggtaccatgatatggacatggcagtggacgtggacaggggagcagtggagatggagaagatggagacacacgcagttgaggatacaggcgaagaagatggagacacacgcggatgaggatacaggcgaagaagatggagacacacgcggatgaggatacaggtgaagaagatggagacacacgcggatgaggatacaggtgaagaaggtggagacagacgcggatgaggatacagatggagaagatggaggtagacgcgggtgaggatacaggtggagaagatggaggtagacgcgggtgaggatacaggtggagaagatggaggtagacgcggatgaggatacaggtggagaagatggaggtagacgcggatgaggacacaggtggagaagatggaggtagacgcggatgaggatacaggtggagaagatggggttagacgcggatgaggacacaggtggagaagaggaagttagacgcggatgaggatatagatagatgcatagggtgtggatctaaccgggtacaggtgatgcggaaacggatctagacagcgatgtggaaatggatctagacagcgatgtggatgtgatctagataatgtggctctggacgtagaaagagcttcagatgctctatctatgatcgtgggtgtggatataggcatagacatggtgaagaggagagaatagactctcctctctcatgacaaactgatcgtggctgggggcggcacgtgctgagatgtggctgtatttgtcccccaggctggtgcctgcgcctcctgcacccccgtctcctttgtgccttcttccattccctctgccactgttaggtccaggcctcactgagctctgacctccctgcctccagcctgcctctcccacacggctgccaggttcaacctggtaagacaccttcttctccatggtggcctcccaatctgggccctgccaacttatgcctcaccaacttctccaacttacccctgtacccacgcccgcaccatgcccagcccacaggatcctgccttcccagctctgcagaaccagcttctgcttatccgctaggtgccagcccagccacctgccttaagcaccatccacagtcacccagcccatcaccatcactagcaaagtcacccagacccatcaccatcaccatccagagtcacccagcccttcactatcaccatccaaagtcaccagccccatcaccatcactatccagagtcaccagccccatcaccatcaccattcaaagtcacccaccccgataccatcaccatccaaagtcacccagacctatcaccatcatcatccagagtcaccagccccttcaccatcaccatccaaagtcaccagcccctttaccatcaccatccagagtcacccagtcccatcgccatcaccatccagattcacccagacccatcaccatctccatctaaagtcacccagacccatcaccatcactatccaaagtcacgcatcctgtcactatcaccatccaaagtcaccaagccccttcaccatcaccatccaaagtcacccagtcctatcaccatcaccatcctaagttaccagcctttcaccatcaccatcaaagtcaccagccccatcatcgtcaccatcctatccaaagtcatccagtaccaccaccatccaaaatcacccagacacatcaccatcaccatccaaagccacctagcccatcaccatcactatccaaagtcatctagcaccatcaccatccaaagtcacccagacacatcaccatcaccatccaaagttaccagccccatcaccatcatcatccagagtcacccagatccatcaccatcaccatccaaagtcactcagcccatcaccatcactatccaaagtcaccagcctcttcaccatcactatcaccaggcccttcaccatcatccgaagtcacccagacccatgaccatcaccatccaaagtcttccagacccatcatcatcaccatttgaggtcacccagacccatcaccatcaccatccaaagtcacccagcccatcaccatcactatccaaagtgaccagcccctttaccatcactatccaaagtcacccagacccatcaccatcaccacccaaagtcacccagccccttcaccatctccatccaaagtcacccaacctgtcaccatcagcacatcactggcttcctcccctcagtgtgcgcctcagtctgaagtgatctcacttacttgtttgaggttctcactgctgctggccccgctggacggtcttctctcataggaaggaaatttcaccttgctctctgctggatttccagcccctaaacgaggcggggcatgctgggtgcaggatggaatgagttggggacggagtgaaccagtccagctcgtgcgtgcctccccctctgcactgcccagagcagttttttcttctggggacgcagggcaacgtctggagacatttctggatgtcaccaggggtaagggcctgctacttgtatctgatgggtggagacccgggatgccaatggcatcctacagcgcacaggacaggcccacaacaatgacacacgtggccggagacatcagcggtgctgaggcggagcacctggtgtctgaggtctcccctgtgctctgtcgctgtcctctcaccctcccccaatcttccaacctagtagttctcagacaactgcgtcagaatccgcagggggcttggtggagcacagagctcccctcagtctctggtttgtgacggaggtgggccccgagaatctttctgcagcagaaagccaggctttctgcaggttcccagtgaggaggacgaggctggcccgggacacgccactgatgctcttctgacccaggggcttttctctcccgcttccgtccctcttccctcgccggcaggtgacgttactggccttttcttttttggccctgcctcccccttggcttctcccctcttcctctcctccactcggtgcctggtgacatgcggccatcctcagagatgtgcttcggggcccgcacgccttgctcctcgcactcttcctgcaccggagccgcggtgcgaggcctcgggaatgctcaccgtttctctcccgccccccggccgcatgctgcagccattccctcaccacatgtccaggagggagccggcatcctttgctgactttcttgctgtgactatggtgctgcgtggaaaaggggccgtgggaaggctgggcaggtggctgctcagagccccacctgacacggtgacccacggggcctggaaattcactgccccgatttccacacaggtgcctgagctcctgcagagaatgcctgagagcgagacgcatgcccgtcaatttgtgctttcaggcgtcctaagcacacacgcctgctcttatttgaaccactccctgtaagctagttccactaaagagtggctttccaccctggctgcagattgcaaccacccaggaatctttttttttttttttttgagacggagtctggctctgtcgcccaggctggagtgcagtggcgcgatctcggctcactgcaagctctgccttccgggttcacgccattctcctgcctcagcctcccgagtagctgggactacaggcgcccgccaccacgcccagctaattttttgtgtttttagtagagacgggatgttagccaggatgatcacgatctcctgacctcgtgatccacctgcctcggccccccagagtgctgcgattacaggcgtgagccaccgcgtcctactttttttttttttttttttttgagacagagtttcactcttattgcccaggctgcagtgcaatggtgtgatctcagctcactgcaacctctgcctcccaggttccagggattctcctgcctcagcctcccaagtagctgggatcacaggcatgcacgaccacacctggctaattttgtatttttagtaaagatggggtttctccatgttggtcaggctggtctcaaactcctgacctcaggtgatccgcccacctcagcctcccaaagtgctgagattacaggcgtgagccaccatgcccagcccacccaggaatcttttaaaaggtaccagttgatgcccagacccctcaattaagtccagatttttaagagattttttttttttaaagctctgcaagtgattccagcacacagtctggggactaaccgctgatataaggtctggaaaatctaagaaaccactctaccccaccctctggtgaccagaagcttatgtctaccagacccagggccttcccttgctgaaacatgctgggtaaactctttgtttcttcctagcagacagcagccctctccctctagctcagaagctacgtcagcagttggttggttggttggttggtgggttggttgggttgtgtctctctttaacttcctccacttctgaagtcacctgcagtgacttggtgtggacttggtcacctcactgtccccccagcctcaggcccaggaaccatgtctttggaggaggctctcctgctggcagctggttgcatctggcatgcttggattcctgcaggtggctggttgcacctagcttgcttggattcttcccagattcacagccatagggtgggcgtttcatgaaatctccaaattccaagggctcttgacagaccacctccatcctgatcagaaggggtgatgccggttgcacggtctcttagagcttaaaactctagcttcttctctgctcctcattccaaactaaacaaattgttgcattggattattctttcaaaatactccttgccttaatgccatcctttagattttggtggctggctcctgttgtggaccgcatctcacaggtggacttcctggtttctgcctcctgttacccctcacagttatctctcccttgagtcctgctaccttccagaaaaataggctccaaacacactttcatcccatcactcccagcatggagttctccagtggcctgttggctacaggacactctccagccccccgcattgggatgtctggccccaatccaccataatgtacttgtctccaatctgctgagctgcatgaatgcccaccccagcccagcgggcactccccttctgcaaacctccaagcacattccccctctgcacactgccaatcttcctgtccccgccccaaatccaaaggcccctcctatggctggggatccactggcagctgcctaacccttcctatgctcctggacgtttggtgcaatctggagcacgctcaagccggcatttgaaataacctggaacacgtttacatcatggaaaatatggaaaataggctgattggcttccactcccttttagagctggcaagaaaaataattgatgactaaacaacctaacgaccaacaaatataaaaagtcatagcccaaccatgatcaaataaggctccagcattcctccttggagggactctgagccatctggtgtcattttcctttccaatccgggaacattctggagatcctgacatccagctaacatgggcgttgcttcctgacaaccctaccccttccattccccagtcactactgcttcaagatgcagtggaaggagataaatcagacacctcagtagcgtgagtgaaagtggggtgtgtggtgagacacatacagaggggagagggccagaggacggcgccgtgcgacacacaccattgctccttttgttcccggtttcggccaagttgtgccgcaggtgactctccaccggctgagctctgtgcatgcagggccagtattctcggccattctggcttagagaaaagctttctatattccagaatggctccaggcctcctcctcctcctattaaatgtgttttaaaagaggtcttagagcccaggcagttagatcttagaaaaagacaaatacagtagaagctggaggcaagcttatcctttccaaagagggagtgcttcctgtgttaatttgttattgagcatgatgaagattcagctccattgagactgagccaagagttgactcattcatgggagcaacataacgggttgtgagaagccaaaggattaagcatctgggagccaagactgatcttgagtggcccagaaatgcaacccaaggatcttgggcccaagggccaggaaggtttctgcagcctcctggagcattcacagaggctccctgtccgtccacttttccctctgttgctgatgtgatggctcctgccctcagcttaccagactcctcggagaggctggcctctgaattggttgaatgggcttgaagggggctggactccatttgggtggatgagcaggcccagtgcccctgtatgaggggaagttgtcttggtaagcctgtttttgtgtcaggtccccaggacaccttcctctgagtctcttgcgtgggagaagttgctggacacgcctctctggctctgtccccgccggcactgtgtgggatccatgctgttctccctccagcccttgccccacctcctggagcccttctctgcgcctggtcactacccgccccccacctccagcattaattttctagggacaaggggcaggggaaggaggagaagaaagagtccttgctgctcctcagagaagacacaggagaagaaagtcggagaggagtggggagccagggtggcaaagccccttcctgctgcccacgcaggtcctggctttctctccacccactgcaccatttccagggctgctctcatggtgggagccggagagacactgagaagaggaaggaaggaggatccaagaggagcccagcacacccggcttctctgctgcccaccctccactctgtcctcccagcccaggcccttcctaggcaaccctggcacgggtcctcactggccacactgaggccatcagcaaagcacctggcctcttcacgccttgggctctgggtctgtaaggcagtgaggctgaggttcctgggacagctgggcactgtggacttgcccagctgagcacaggcatcaggggctagaggggccctagtcccgatgacgaccgagtgccctctccacctggggagcttggaggactttgctctgcacttagggccacgcttcaagcccagtgcctcttatgaccaagtctctggggagaaatgagccctccagtgccaaatgacccaccactaaaaggccttttgaggcagggcctctcctgagcccacgcaggcacgtggtgggagatgagagggtgtgggctcacttcttgacattctgtgtgagtgaggtcattcatagggtgaggggagaatcaaggggacagagggccctctagtccccagcacttgggctcagctggcaagtccacagtgcccggctctcccgagaacctcagcctcaccgccctacagacaaagggcccaaagtgcagggaggtcagtgccacacaggttttattttttcacattattggtgtttaaaattgtaaagattttccacgttacctgtaaccatcaaaccacatgtattgcccccagttaatcaccatgaacagcttggtgtgtatacccctccatattcactgtgtttcttcttccaggaatgagctcattctctatacatcactccgtaacttgttgtttttacctagtaaggagtcatgggcgtcccaccaggtgaatacttgcatgtttgtcttcatcttcttaacaactacctgacactgcagtgtctcagtctgtctgaacttaaacagctagacattgagttctcagagtctggaggctgaaatccaagatgagggtgtgggcaggttctgttcctggggaggcctctcttcctggcttgcatacagctgccttctggctgtgccctcatgaggcagagcaagagacagctctggtgtctttggcccttgtaaggacaccaaccccatcccatgggccccaccctcaggaactcctccaaacccaatcacctcccaaggccctacctcctaatcttacccactggggatgagggcttcattatatgaatttggggtgggggtgcctcaacattcagaccccagcaccatgggaccactaatgtggcatcctgcctgtggagagatgcacagactgacccatccagacagcacagtggagcacgctctttcaacccacctgcacctgaccacagtgggcactcaggaagaaatgggtagagcgagtgaatgaatgaatgagcaagtcaaagacatgaacacatgacatctgactgtctccctgtgtgcttgtgtttcattctgatacatccctccctaaattcatctgctgagacaaaggattttaactggtgtttctacactgctttccccaagatgtggcaacccacaccccaccagcaacacctgtgatgtctgccgccctgtgtccttgtagcacctctcttaccaggtttccaaatgttgctaaactgctgggtcaaggaatagcatctgcctggggttagcctcacttgtgtggattttttcttactcctcttggccactgactgctcctggtctatgcctgttccattggctgcactgtccttccctgcctcttggccagaggctgtcgtgtgtcagcgacagaaacgttttggctgtcgtctgcacagccagtattctctccccatcacgctgggcctcgtgatgatggggggaggggggttgacatcacagagatcccagtgcattttcgacttcatcactgtcaccatcctctcttgttcatttgggggatacagccgccatcagctcaacagagcaaaagagagggaggccacctgcatccgccaggtgctgaaatgggtccaggcagctgccagagtctgacatttccaacttgatacagcacctgtgatcggcagtagtacccatgacaacatttatttaattgaccaaacacgaacattatagaggaaggtgatcatttaaatgatatacttgaaattcatctgagtaaggaagctgagaacagtcaaagaagctaatttaaaaaataaaaataaataaaaagaaccacctaatccgctgatttctaatcatgccgagtgcttatctctcctgccaggcatacagcgagcgccttgcagagtctcacagcggcactgtcttctcttttgcagcactccgtacaaagtgagacctgtggccatcaagcaactctccggtaaggccctgctgtcgttttttaaactaaaagaaggaaaaagaaatcttgagcttgcccctgtgataaaatatatactagttaagcatttgaatctaagcatttgaaatatatatgagttacctttgaagcatttaactatatgttagttaagcatttgaatctgcatttgaagccgatacaactgcagaatctgaaaccttgtactactgtaagggctctgcctttctaaccccagggagaatagcatctgcctggggttagcctcccttgtgtggattttttcttactccttttggccactgcctgttcctggtctatggccgttccattggctgcactgtctgtccctgcccctcggccagaggccatcccaaggactttgcagttgcagggcggcatccactctggtcttcctggcccagcacctgtcctccccgctccactgtgagttgccaaggcaggcatttgtggcccctgggatgccttggggtgcctcatacagttacttgggccgctgtgttacaatcctttttctttttctttttttttttttaaaaaaaaacggagtctggtcctgtcacccagggctggaatgcagtggcacgatctcggctcactgcaacctctgcctcccaagttcaagtgattctcctgcctcaccctcccaggtagctgggattacaggcgtgcaccaccaagcctgggtaattttttttgtatttttggtagagacgggattttgccatgttagccaggctggtctcgaactcctgacctcaggtgatccacctgtcttagcctcccaaagtgctaggattacaggcgtgagccacagcacccagcctagaatgccttttccatttgatttttatcacttttatttatgtgtgatttatacatcataaaatgccatttaagtgcctattttgatgacttttgaaaaatgtgtacacccttgtaaccatcaccaaaatcaagacatttgcaccacctagaaaagctctctcttgccccctccagtgtgtctcagtccacaacggacctgctttctgacatcatccatgagatttctttttgagagtttcatatataagaaattacatggtatatgtactctttttgactcaacataatgtttttgagatccatccatgtgctgtgtgtagagacagttcatgctttgtattgctaagtggtatcccatggtgtaggttgtaccacagggcgtcttccattcactgtggatggacatttgggttgttaccagtctgggggcttttaagaataaggctgctgtgagcattaaagtacaagtattggtggaaacgtatatttttatatatttcatttcacttggctaaatacctatgatacctataaccttgccaacttttttatacagttaaacatatacttaaccgtcttccctaagagtggatataagagtctgtagagtgttccccagtctgggtttgtctgacgtttctctcacgaccagcctgggtgtggtgggttttggaaggaatacgtggggcgcatgacagccaggtaggaccacgagcttctccactgcagagttactgttgatctccttccctgctcttctttgaaagcaagtcacgaagtccagcccacccaaacacaggagagaaaaaccgaggttcgttttctctacacagatattcatttctccagcaccatttgttgaaaagatgatcttttctcccactgaattaccatgacacctttgtggaaaatcgatgggccatgtatgtgtgagtctttttctggactccagatcctgtcgtgtgaatttacatgtcttaaaacaacagcacaccatcttgactaccgtagataaatagtaggtcttgaaatcaggtactctaagttatctctggtttcttttttctttttcaaaaatgttattgcttttattttcaaataaattttagaatcagtctatgaattgcttccaaaaaaacagtctgctaggattttgactgaagttgcattaaatatacagaccaatgtgggaagaattaatatcttaagaatgttgagtcttctggttcataaatatggtctatctccccattcatttgggtttcctttaatgtttctcaataatgtgttaccattgttaatatgaagtacttaataaatactgataaatacatcactatttcatgtatttaatggtactgcaaatggacttttttttcatttcaatttccggtagtttttagtttataggaattggcttctgtatgggaccttgctaaactcatttattaggtctagtacctttttgcagatttcctgtgattctatagatgattttcttatagtgctggtcttctgacaacaaattccttctgcttttgtctgaaaaagcttttctttgctgttttgcttttttttttttcaaagagagagagagataaagtctttgtctgttgcccaggctggagtgcagtgatgcggtcatagctcacgacagccttgacctcctaggctgaagcaatcctccctcctcagcctcccaagtagctgggactataggcacacaccaccatgcccggcgaattttttaagtttttatagggacaaggtcttacagtattgcccaggctggtctcaaactcctaaactcaagtaatcctccctccctgagattacagacgtgagccaccatgcccgactgacagtgtttttatttcatcttcattttgaaagggtattttcttgccatagagaattttagtttcacagttttccagcactgtgaatatgtcttctcattgtgttttagctagtacagcttctaatgagaagtctgtgatgtcttatctttgttcctctgtgtgcaatgtgtctttttccctctggcaacttaagatgttttctttatcactggtttgcaggaatttgattatgatggccttggtgtggttttcttttggtttaacctgcttggtgttcattgatcttcttggaactttgggatcatatttttcatgaaatttggaattttttctgctctcctctgtctctctcctttcccctgggaccctaactacctgaatgatagacagcctgagagcgtcccctgactcactcacactgtttctttctttccagacctttttttctgtttgctttatttttcttagacttttccgtgacgtcttccattgcactggtcttccctcctgcagtatctagtctgctgttaatctcgttcagtgaaattttcatttcagatattgcattcttcatccctaggaattatgtttccctcctttttcgtatctcccatttttacatctcccatttatgcctcattatgtttatatttcctgtaaatgcttatacctcattataattctgtttcatgccattgtctgctggtttcctcctctctgccatatccgagtctgtctctgttgattgatttatctcctgggtatgggtcatatttttctgattctcgtgaatctagtagatcttgatggaatgctgatcacaggaatgcacgctggttcatcatctggttttgtttctcccagttaagagtgttgggctttgccttggcaagcagttaagttacttgcacatcagtttgatgcctttgagccccacctttaagctttgtgagaatggctctagagggcccttaccccagggatagctcagtcctactaagacttgatccctttggggtctcccccaaactcctggctgatcaccaaattccactctggctgtttagagtgcaaatgtttggagatgagaatgaaagcgccagggccttgaaggtcgttgcaaggatgctggcttttatgctgagtggcgtgggcagctattagaaggctttcaggagaggagtgacatcatcacatttgtgttttaaatcttgctcagggcgctgggtcgagatcacgaaagggaagtggcagcaaaggtggaggcagagaaatccaagaggaagctatttttttgggaggaggcggaggcctaggccggggtgggggccatggaggtgatgaggagcgcaggttccagcaggttctaaaggaagagacaagctttttcctaagtggaagcgggatatagagacccatccggggcttctttgacctgagcactgagcgccacggcccagggagggggttgctgcgggtgggcttggtctgctcatcagacatcaggtgcatgaggagcaggcagagtcagggcaggcggcctctcggctgtcggctcccaatggatggtgttgaagtctgggacttggtgaggccagcagggagtgagtgagcaccagcaggaggggccaggcctgagccggacggagaccgaacccatccgtgggagaaggacgctggtgacaggacaccatcgggagcagaggggaagccataaagccctggaggcaggaagaggcaaaggctggccgggtgtgggtgaggtgctgcagggctctcgcaggccagcgaagacaggcgagatggctgtgctcagagttagaagagcatcgctgggagcagaggaaagagggatttctgtgtcacctggggacccatccaggaccagtgggagatggagttgggctcattgagggaaagaggtgaatggaaggaagttggaaccagctgtcctaaggccggagctgctcctccctggaggactccggcaaaggctgctggccttgggctgtgcgggcacccagtggctgagagatcgttgccctctgcagccctcctgcaacttggatcctaggagccacaaagaggcttgaaaaataatccatcctgagaaacacaaaggctcacattaaacttcgcatcgtaaagttttgagtaaaagaacaataaggggcatttctgctaaaggtgccaggatgagaaaaagcaggaaacagtgctgcaccgccaggctctgcaccgtctctacagagggctggggttggttcaggagcattcggcccaggctgtgatctcgagaaggtggtcagggcccaggctcccgccagccctcacggcagcacgaggctggtacgagacaggtgcttcaggtgtttgttgagagctgcacacacttctgctgggctgggcaagacttccctcttcagagaggatgagcggccacacggaaggccaggctgggtgtccctccgggccagccgaggagcgctgcgcttattccgcagtgaggagtcgctggctgtccaggggagctgcattttcctagcagcgacaacccctcccacatctccatagtcacatcctggctgggctaacaccacctttccccgcctctgggtgcgtggggaccccgctctccaaataggccagtgttccaggcttttctttaggagacaaagtcggtgtcaggtagaccccccccaccccaccaaacacacacacacacacacacacacacacacacacacagctttcctgagaaatgtgtttacagaacattttttccatttggggtttgtccttaggaattcttcactctctctatggcaacaaccttccctctcccgtccatcggccttgggtcccagagccactgagccgtggcccaaggtcaggagttagctctagcgacgccgccctgagttctggcctgtaagcaaccccaggtgcccttgtgaatcaacagaccacatttccagtggcagaaaaggaaatgggagctgtttctagactagcacaaggctcagggggtggggggtgggggcagggtgcagggaggccaacgccacacagccccacacccagcctttcccaaggccctgggttcctcactgattctcagcaggtttcagtaaatgcctctaacgggcccggtggaactgtgcaatgcagaaacaccccagggttttgctgttttgctacttaaatattcaggaaatagtaaagagaagagtattatcaaaaacgtgacttttcatagaaaagggagaataggccagccctggcctgggtccacaaccccagtgtgagctgcagagacttctctggagcggtgaacagctcctgccaggaaagagcatggcacagcctcgttctccagcgtagagtagaaggaatggccccgtccacgcgaaggtctgtgttcaccaagcatcttctgtagaaaaatgctctcttcgcctgatcatgggagggaatcaaatggatagagcatttatcccttttgtgactaaaataaaggtaatagcaactacaaaaaccacgacacaggcttctcagcatctttttataacgatagtgctgattttttggaaaatccttgagcctcaatcacttttatttgatgtaagccgctcaaactcaaagagtgttgttttccagattataaaacacagatctcagctgatggcggttgacgggtgtcccccgagtgccctcggctgccaggagctggcaggggagatgcctgtgatgaggattgggtgctgtgatcacagcacgcgggaaaaggacagggcctccctcagcgtggcagatcgcgtgggtccatgggtccgtgtgatctcatgaccgtatcaaggggattgtgtctttttgaccagagcgttagggaaagcgtgctgcagtcacacgccaggacggccccccacggcccaagtcctataggagagccaggggccatcacgattttcttaggcacagcagcagttgaaccgtgctgtcacacttaacccaagtgatgacagcctcttcaactaggacagtgctgtaggggtctggttctgcttgttctcccccacattcctgcctgccctaggacccaggacctgtctctagtcacacacaccctgttcagcctctgcatctggcccccgcggagacccacaccacattctactcccctggccagagaccgagggtgactcggaggcttccagttcccagcagctttattggcgttgctgtttccatagaaggacaataaaagggggccataaggaggcgcatccgcagagtgcgtgcttgagcttctgcaagccagaggaggccggcggccggcagggtgggcaggctggctggctgtgccccacaacatgcatgtggagaggttttgggggcagccatggaaccccggagctgcccccacatgagagttcccccaggtggtgaccaaatgcatttacagtccagccgcagtccagatgcagatgcgctgtaactgtagaacacacagcaaattctgaaggcttagtatgaaaaagaatataaaaatctcagtcatttttatattgatttcatgtttcctggttgagatgtcattgatataacataaagcccaccattttaaagtgtacaacctcagccaggcatggtggctcacgcctgtaatcccagcactctgggaggctgaggcgggcagatcacctgaggtcaggagtttgagaccagactggccaacatggtgaaaccctgtctctactaaaaatacaaaaattagccgggtgtggtggtgcacatctgtaatcctagctacttggaaggctgaggcaggagaatcgcttgaacctgggggtagaggttgcagcaagccgagatcacaccactgcactctagcctgggtgacacagtgagactctatctcaaaaaaaaaaaaattgtacaacctcagtcttttttagtgtcttcattttgttgtgcaaccatcaccactatttaattccagaacatttccatcaacccaaaaagaatccctgtacctgtgagcagtcccccctccatccccttcaccccccagcccctggcaggccctgttctctgtcctgtgcattctgacctttcacataacagaatccgtggcctttccagcctggcttcttccactttgcacacggtgttgcaggctccccgcgttgtggcatatgacagctctttgttcctttatggctggatgacgttccgttgcgtggctgcgtcctgtggctgcattgtgtggctgtgtcacgtggctacgtcacgtttggttgatccgttcatcagctgatggacatttgggctgtttccacaaaggctcttgtgaatgatgctgctgcaaacgtttgtgtgcaaatttttgtatgaaagatacatggtgaaatgaggtattttgaggtacattggattaaatgagatattaaaaatttttttaaagtctagccgtcttgaaggggagggcctgagagaagtgctgaaagttcacagcagaggataccggatgctgcgggtgtgccaggctggcctgtccaggaggtccctgcagcctgggtgggaggtcccttacccactaatgggtgcctcctccaacccctgagtccccctacctgaggacttcctctgtgtgtggcatacgcggctgccccgaggtcagtcctccccagtgaaagggagctgaaggacaggtgcccagcttctttgctccacagtgggaccaatctctgacatcatcaatgcagttgctcaaagggagctcagagcgaggagtcacctgtacatcaactcaccctctgggagctctcttcccttccatgcctcaatcccccactccctcccagggcttcctgggctggcctccaaatgcaccactagcccccagctccttgtctccggtgggcttttgaggatttccaactaagaaccttagactccaagacaggtcaagccccctggcatactcatttgtcatttggatgaaatagccttaggagagctacttaaccccactgaacttccatttccctgacaaaataggaattctaatgcataccttgcatggttcttggaggataaatgaagtaatttatgcaaaatgctgagcacagtgcctgccacttggtaagcgcccagtaaatggttgttatcattgaaaatgacttagggggcatttttgaatggctaaagttatgtctctctggaattgctgaattttaatagaacaggaatgcttcctaaggtctaaaacaaaaggcggaggactggctgtgtctgccctggaagccaagttaatgctggatgtctgcgcatagacatgttgctcatgagaaataataatgctccttaataatattgtctatttcagtgcaatttcagtctagaaggctttataagcaaagccacagtcatccttacttgcatttttttgaaacaaaaagactgcagtgtataaatgaaaaataaccatttctggaatggtgtgttcagacggattccccttagagtagcctagccaacaaagacagcagcagcccttagcgtgccactgtcagagatattgatggcaaacagtaatacggaagcctgcggaatggaagtgtcctgacggcagatttgagtaaaatggagatgatgacagctgaacattgctgcacggacctcaagactgcaaacgttaggactgccctccctgctcctaggcatttgtgagaaccaggccaacccatacccacccactgctgtgtcctgcctgactgcactgaaatgcacagatcctgtgggtgcagtttgatgagttttgttttgttttttgttgtttttgtttttgaggagtttcgctcttgttgccgaggctggagtgcagtggcgcgatctcggctcactgcaacttctgcctcctgggttcaagcaattatcctgcctcagcctcccgtgtagctgagattacaggcgcatgccaccatgcccagctaattttttgtatttttagtagagacaaggtttcaccatgttggccaggctgatctcgaactcctgacctcaggtgatccacctgcctcagcctcccaaagtgctgggattacaggcatgagccactgtgcccagccacagtttgatgagttttgatagaagtgcatgtgttagatctttcaggaatcaccacccaaaccagaaataccatttgacccagcaatgacgtttatatatatacccaaaggaatataaatcattctattataaagatatatctacatgtatgttcattgtagcactattcacaatagcaaagagatagtatcaatccaaatgcccatcaatgatagattggataaagaaaatgtggtacatatacaccatggaatactatgcagccataaaaaggaacaagatcatgtcctttgcagtgacatagacagagctggaagccattatcctcagcaaattaatgcaggaacagaaaaccaaacaccacatgttctcacttataagtgggagctggacaatgagaacacatggacacagggaggggaataacacacactggggcctgttgggagggttgggggagggagagcatcaggataaatagctaatgcatgctgggcttaatacctaggtgatgggttgacaggtgcagcaaaccaccatgacacacgtttacctgtgtaacatccctgcatgtcctgcacatgtatcccagaacttaaaattaaattaaattttttaaaagtgcacgtgcatgtaaccgccaccacaatcaagacagaggacatttccatcaccctagaaaaatgtccccgtacccccttcaaggcagtcctcactgtggagtgctctgcctatttttgagtttcacggagttgaaatcatacagcacgagctctttgtgtctggactctttcactcaacatcatttttgtttgtttgtttgtgtgtgtgtgcgtttgttttttgagacagggtctcacgcctgttgcccaggctggggtgtgaggcacaatcatggctcactgcagcctcgacctcctgggctcaggtgatcctcccacctcagcctccgagtagagacatgttgcccacgctggtgtcgaactcctgggctaaagcaatccgcatcatgatgtttgtaagatccattcgtgcagttatttccttttgcactgctgagcactgcatgcctcgctcattcattcttctgtggagggacatttgggtcatttccagtttagggttcggctactagaattattgtacaagtcttattgtgggcatccttgtccatgatcttgggtccacctaggagttaaatggctggctcatatgctgtgtttgtttaacttaagacttacttgttaagtgtaagaaactgccaagctgggccgggcacagtggctcacgcctgtaatcccagcactttgggaggccgaggcgggcggatcacttgaggtcaggagttcgagaccagcctggccaacatggcaaaaccccatctctacaaaaagtgcaaaaaattagcagggtgtggtggtgtgtgcctgtagtcccagctactcaggaggctgaggcaggagaatctcttgaacctgggaggaggaggttgcagtgagcagaggttgcgccactgcactccagtctgggcgacagagcgagactccatctcaaaaaaaaaaaaaaaagaaagaaaaaaagaaactgccaagctgttctaccaagaggttgtaccattccacattcccaccagcagcatctgagtgatccagctgttccacatccctgcaacactaagcattctctgcttacattttagacattcgagtaggtgtaagagcaatcctatcttcttatagttttaatttgcatttccaagtaacttaatgatgttgaacatgttgctatgtcttattgactatttgaatgtcatattttgtgtagtgtctgttcaacaatactttgctcaggccaggtccggtggctcacgcctgtaatcctagctctttggaaggccaaggtgggtggattacctgcggtcaagagttcgagaccagcctgaccaacatggtgaaacctcctctctactaaaaatacaaaaattagctgggtgtggtggcaggtgcctgtaatcccaggtactcgagaggctgaggcaggagaatcgcttgaacccaggaggtggatgttgcagtaagctgagatcgcgccttgcactccagcctgggtgacagagcaaaagctgcatctcaaaaaaaatatgtaaaaaggattttgctcattttttaagctggcttgtattatttttgtcactggtttgtaggaaactctacataagctaggatataattcatttgtcagatatatgtggcaaacatttttcccaatttgtgatttgcctttttcgttttcttaatgaggtcatttgatgagcagaggtttttaatttggtgaattccatccaatgtaacaagtttttctgttgtggtcagtacttcttgtgtcttctctaataagttttgtttttttttttttttgagacaaggtttcttgttgcccaggctggggtgcagctgtgcgataagctcactgcaacctccgcctcccgggttcaagtgattctcctgcctcaggctcccgagtaactaggattacaggcgtttgccaccacgcctggctaatttttttgtatttttagtagagatggggtttcaccatgttggccaggctggtcttgaactcctgacctcatgatccacccacctcggcctcccaaagtgctgagccaccgcaccaggccccccaaattgctaggattacaggagtgagccaccatgcctggccctaataattttttttatcccaaggtcatggagatacattttagaagatttagagttatagctgttatgttttttcttaatttaaagaaaatttttaacaacccaatctgttgagatgttatgttttaatctgtcattcatttcaagttaatgttgtgtgtgttgtgaagtagagactgccattcattttcttccccacgctgacacccagctgttactgcaccacttgttaaaaagactccttttcccgctgaatccatggctcctttgttgaaagttaatggtatctctgtgtttgggcctctcgctgaactctgttctgcttcattgatctatttgtctatcctcacaccaacaccacactggctacgttactgtgccctggaatcaggtactctaagttctccatgtgttcttcctctgcatttgttttgactgtataggttcttttcttttccctacaaattttaggatcaacttgtcaatttcaaaaaaaaaagccatctatgactttgattactattttatttactatataatttggggagggtagtgtcttaaccatactgagtcttccaacccatgaacatgatacatccctccacttatttaggtctcatttaacttctcaaaaggttatggctttcaagataaaggtccttcatgtcttcggttaactttactccaaagtgttttctgttttctggttttattgtgaataagatttcattaattttccaattgtttgctgctagtttataaaaatataatagatttttggatgttggcgttggatcctgtgaatttgcttaattcattggttagttctagttgttgttttataggttcctataattgtccacagagacaatcatgacatctaagaataatgacagttttaattattgcattccaatttttggcttttatttcttttacttgtcttgttgtactagttgaaactgcaatacagttaaataaaagtgagagcagacgtcctcgccttgttcccaatcttagaggagatgccttcggtctctcaccattacatacgatgttagccacagatttttttgtggatgcctttcataaggttggaagtccccgtctaatgttagttttctgagagttttttgtctcatgttctttgacaaaattctttgttaacttttatcaaatgttctctctacagctactgaggtgggttgaggaggtgtcctctttttccttgttttctaatggttttgtcccataaagaggtattggattttgttccagtacctttctgcatctatgggatgagcatacatatggtttttctgctttattctattaagataatgaataatactgattgattttcaaatgttaaaaccactttgctttcctagggtaaatgcacttatatttccaggaaatgttcctaggaaatttcctggggtaaactcacttgtatttccaggaaatatttccaggaaaatacttgggaataaatgtaacaaagtatatgtaggccctctccctggtgtgtttgctttttatgtattgacttgtttttgtttttgtttttgttttgagacagtgtcgctctgtcacccaggctggagtgcagtgctgccatctcggctcactgcaacctccgcctccaggcttcaagtgattctcctgcctcagcctcccgggtagctgggattacaggtgtgcaccaccacaccagataatttttgtatttttagtagagacagggtttcaccatgttggtcagggtggtctcgaactcctgacctcaggtgatccacccgcctcagcctcccaaagtgctgggattacaggcgtgagccacagcacctggccgcttttcatgtattgctagatttgatttcctaacaattcgttaagaatgtggctgtctatgcttaaatgggatattgatttgtaattttttttcttgcagtgtctttgtcatgttttgatattggccctatagtggcctcataaaacacattgggaagtttactttcttctgtattttctgaaagattttatgtaattttggtattattttgtcctatgtccctttacacttaatgtatttgggttttttgtgtgtgtctttttaatagttaataacaatgtattttattcttgaaaatcactgagagtacattttgcattctcaccacaaaaaaaaactatgtggcataatgtgtatgttaattcacttgatttagccattctacaatgtatatatttcaaaacatcatcttgaccatgggaaatgtatctaatttttgtcaatttgttaaaactttttttttaattccaatttttttttttttgaggtggagtctcgctttgttgcccaggctggagtgcatgaccatgggaaatgtatctaatttttgtcaatttgttaaaactttttttttcattccaattttttttttttttttttttgagatggagtctcactttgtcgcccaggctggagtgcagtggtgcaatcttggctcactgcaagctccacctcccgggttcacgccattctcctgcctcagcctcccaagtagctgggactacaggcgcccaccaccgtgcctggctaacgtttgtatttttagtagagatggggtttcactgcattagccaggatggtctcgctctcctgacctcatgatccacctgccttgacctcccaaagtgctgggattacaggtgtgagccaccacgcccagccccaacttttattttacgtacagatctaaacgtatcacatgcaggtttgttatgtggtgtgtcgcacccagatggtgagcagagcccccaagtctttgttgatatggttggggttagctctcccagtctttgttcatatggttggggttggctctaccagtctttgttcatatggttggggttagctctaccagtctttattgatatggttgaggttagctctaccagtctttgtcgatatggttggggttagctctaccagtctttgttgatatggttggggttagctctaccagtctttgttgatatggttggggttagctctaccagtctttgttgattagctctcccagtctttgttgatatggttggggttagctctaccagtctttgttcatatggttggggttagctctaccagtctttgttgatatggttgaggttagctctaccagtctttgttgatatggttggggttagctctcccagtctttgttgatatggttggggttagctctaccagtctttgttcatatggttggggttagctctaccagtctttgttgatatggttgaggttagctctaccagtctttgttgatatggttggggttagctctacctgtctttgttcatatggttggggttagctctaccagcctttgttcatatggttggggttagctctaccacgttgctatttgctgtttcttgatcttgggttttgtttttctgttcctccttttctgccttctcctgtgttaattgaataaatttttgttttccattttattccttctgctgactctttagctgtctctttttgcattatttttcctcggctgttgtaagtgttacaatatgcatctttacttttttttttttttttttttacaattgatagactttgttttttagattcacggcaaaattgagtgaaaagtgtggagctcccacatgttccccccacacacagacattcagcctctgccaccgtcaacgtcctgcatcagattgtatattggttacagccgggcgcactggctcacgcctgtaatcacagcactttgagaggccaaggcaggcagatcactggaggtcaggagttcaagaccagactggccaacatggtgaaaccctgtctctactaaaaatataaaaattagccaggcgtcatggcgcacacctgtaatgccaactacttggcaggggaatcgcttgaatccggaaggcggaggttgcagtgagctgagattgcatcactgcactccagcctgggcgacagagagagactctgtctccagacaaaagaaaaaaaaaagactgtacattggttacaatcagtgaaccaacattgacatatccttatcagccaaagtctatattccacctcagaattcactctcagggctgtacattccctgggtttggacaaatatatgatgacctgtgtgtcccatcccagtctcagacagaatcggttctctcagggctgtacattccctgggtttggacaaatatatgatgacctgtgtgtcccatcccagtctcagacagaatcggttcactgccttcaaaaccccctgtgcgccacctattcatccctcccgccccaagccccagatctttttactgtctccatagtttggccttttccagaatgtcacatagttggagtcatacagaataaagcctcttcaggttttctttcacttactaatatgtctttaagattcttttatgccttttcccggcatcttagcattgaagcatattccatggtctgtatgtatcacagtttatttgcccactcacctattgaagagcatcttggttgcttccaggtttgggcagttatgaataaagctgccataaatatttgtgcacaagtttttgtgtgcacataagattttaacacatttggataaataccaagaagcacaattgctggatcttttggtaacagcatgtttagttttgtaagaagctgccaaacggtcttccaaagtgactgggccattttgcattcccagcagcaatgaacgagcattcctgccgctccacatcctccccagcttttgtgtttcagtgtcttggattttcaccactctgataggtgtattgcagtatcttcttcttgttttattttgcaattccctagtgacatatcatgataagcatcttctcatatgcctgcttgccatctgcatgtcttctttgaggtgtctgttcatatcttttggccacttttaatcatcctgaacttttcacaatctatttagaattaatactgtaccgcctcacataaaaaataaggacactgcagctatataagtctacttactcccctctcccaccacctttgagttattgtgtcatatgttttatatctgcatacattttaagccccataatacaatattataatttcctttttttttttttttttttttgagacggagtctcactctcttgcccaggctggagtgcagtagtgagatctcagctcactgcaacctccacctcctaggttcaagcgattctcctgcctcagcctcccgagtagctgggattacagatgtgtgccgccacgcccggctaattttttgtatttttagtagagacggggtttcatcatcttggtcagactggtctcgaactcctgacctcaagtgatccacccgcctcagcctcccaaagtgctgggattataggcgtgattataggccactgtgcctggcctataatttcttatttaaacagctagttgttttctgaagaaattatgaaaataaacttccagatagttttttaatagttgcctatatatttgccatttctgatgtttttatttcttctcaacttccaacttatattatatcccttcactctaaagcatttcttttttcttttaatgtttcttgcagtgcatatctgctagtaactaattctctcagcttttgctgattggaacatgccttttttttttttttttttttttgaaatgatgtcttgctctgtcgcccaggttggagtgtacaatcagttcactgcaacctccgcctcctaggttcaagcaattctcctgcctcagcctcccaagtacctgggattacaggcgcccaccaccatgcccacccaggcactccacccaggaggtggaggttgcagtgaactgagatctcactactgcactccagcctgggcaagagagtgagactccatctcaaaaaaaaaaaaatttttttgtatttttagtagagacgaggtttcaccatgttggccaggttggtctcgaactcctgacctcaggtgatccacccacctcggcctcccaaagtgctgggattacaggcgtgaaccaccgtgcccaggcaaggaacatgcctttattttgccttcattgtgaaggatgagttttcatggtgtggaattctgcattcacagtttgttttcttcaagaagcttaaagatgttgactcactttctttctggcctccattgtttctgatgagaagtcagcttaatttgatcattattcctctgtatgaagtgtgtctttcttctctggctgctttctttggggtttgtttgtttgtttgtttgttttgttttgtttttgagatgaagtttttgctctgttgcccaggctagagtgcagtggtgcgatctcggctcactgcaacctccgcctcctgattctcctgcctcagcctccaagtagctgggattgcaggtgcccgccaccacgcccaactaatttttagtagagacaggatttcaccatgttggccaggctggtctcgaactcttgacctcaggtgatccacccacctcgggctcccaaagtgctaggattacaggcgtgagccactgtgcccaggcctctggctgttttcaagctgttgatttctttcctttatctttaggtttcagcagttggactatgatgtgcttcagtctcattttcttcttatttatccttcttcatgttcattgagcttccatggactatgaatttaccttttcagcaaatttgcaaaattgtcagccattacgtgttatatgtgccattctttctcactaatgacctgtatgttagaaagtttgctgttgtctttcaagtgactgcagctttgcggttttttataatcttttttttctttgcccttcaaattgggtaatttctgttgacctgtccttgatttccctgactcttccactgactccagacttctgtaagttgatccatgaagtttttttttgtttaggatattatattttaaaattctaaaatttgcacttgactcttgttcatagatttgtctctcgagactcccctctgtttacgatttactgacgccgcttttgtttcggtgtttgcacgtacctgcaattgctgcattaaagtctcgtttgctcattttggcatctgagccggcaagcgtccagggtgtctgagggatgattttctcttggccatgggtcacattttcctatttctttgcatgtctattttttattgtagactaagattatgaataacacctaggagagacattggattttgttatcatcctctgaagagtgttaattttgctccagcagtcagttccgttactcactgatcatctgaacttcgtgcagcctggttttatgctttgttggggtagatctctagactgacccttctgtggttttagtaggaagcctgaggtatttatcaagcctctctaactcgactacatttaaactccaaactttgtctcctccacagcaggagctgaaacctctgccacactaggcccacaaacatgcgtcattcagggatccaccaaggaacagggtagtttatacagaatttgggtcccactgccatggcttcctcctttgggaactctcctttccatttccatcctctctgacaacctaaaactgtgtcatctgacgcttcaacctggaactttctgcttaagttttagccatctacattataagggcactttatagcaagaaatagaatattattccattctaggccaagtacagtggctcacacctgacatctcagcactttgggaggccgaggtgggtggatcaactgaggtcaggagtttgaaaccagcctggccaacatggtgaaatcctgtctcttctaaaaaaaattttgaaaaaattagccgggtgtggtggtgcatacctgtaatcccagctactcaggagctgaggcaggagaatcccttgaacctgggagccagaggttgcagtgagccgagatggcgccactgccctccagcctgggtgacagagtgagagtctgtctcaaaaaaaaaaaaaaaaaaaaaagaaatattccttcgttcttttataggagcatagtacttcattttgtagatgtactattgtgtatcctactgatagatacttgtgttgcttccagtcttgtttttacagcgatcagatggttcttcttaatttctcttgctacaaatgttgctgctgtgtacaacctgttaaagtccacagatggaataaaagctttggtttgcaaaaatgactcaatctttacaaacattctgtcatttgtaccataatcaattagtttattggatcaccgaattgcctgacagaatccttcctggaactagtctatggggtcatttggcatagagtcaaagcctcagacacgatgagccagagttgatttcctttggcttcacataattaaactttcccagaggattatcaggttacagtgacacacacacaggctgtcagataatggacaaagtcccagcagcgtgtacaaccagctggtggctcccaaattcaaattcccccagcggcatccgttcggttattcgtacccacaccctcccttagaagtttacccctccgccaggcgcagtgactcacgcctgtaatcccagcactttgggaggccaaggcgggcggatcacctgaggttgggagttcgagaccagcctgaccaacatggagaaaccccgtctctactaaaaatacaaaaattagccgggcatggtcacgcatgcctgtaatcccagctactcgggaggctgaggcaggagaatcgcttgaacctgggaggcggaggttgcggtgagccgagatcatgccattgcactccagcctgggcaacaagagcaaaactccatctcaataaataaataaataagttcaccccactacgggcaagaagccacacagaaagaaaaataaaataggtatctctggggttttctgaagggaaagtaagtgcagctctgtcccgtctttgcagctctaaataggaacatggtggagtagggcaggtcgggcttgacgatgtcatgacttggcctctctcagtgtcacgcagcccctgcaggttataaggaggattgagctggccaggcacagtggctcatacctgtaatcccagcactttgggaggccgaggtgggcggatcacctgaggtcgggagttcgagaccagcctggccaacgtggagaaaccccatgtctactaaaaatacaaaattagcccggcgtggtggtgcatgtctgttaacccagctgctcgggaggctgaggcaggagaattgcttgaacccgggaggcggaggttgcagtgagctgagatttcgccattgcattccagcctgggtaacaagagcgaaactccgtctcaaaaaaaaaaagaaggatagagctaacatgcatgaaccacctagaacagcacccagagcatagtaacagctccttgcagatgttacagtaccttgatctatacaacagtaaagggaaatgcatgctagctgccccagatgctgccagcttcacaggcatttttctgcctgcaaactaatcctaaggaagagaggagggcagggggagaaattgcacccagtcaaatgtaaacgatacaaaatgtgaaattcccctctctgaaaatgaaagggaaaaaactcgattcaatgcctgcccctgaggtgaacctgaaatgacaaggcagacactctctagaacttcacgtttggccaccagggtcttcggttgattttcctttcttcgtcatatctgagtggctgaaacgccagtgatctgggatagtcctttggctgctgatagacttatgcaatcccttggcaggcaggacaggccagaggaagggctcctgtgcctttaaggtcactgttaatcatgtaactttattgtgttcctgggctataaaggaaatgtcgtccttgatctgaatgtctgttttatgatgtccataaacagtgaattgccagtgactgtaccctgagtgagaacatcctcagccagttgaatagttcaagggcagttgcaggggtcaggagagagcaaaagtgggacagaagatgagtttgcttcccaggaagagagacagtgccaccccacccctcgctgacagggaagccttccagcccttcctccaaagagccttggctctcaggggttggaggttggacaagagcagaaataaaggcaccctgctcccaccccccacaatcttccggacgtctagagtgcttatctctttgggggcaagtaatgtgaattattttccctaatgcaaaaataaaaaataagagaccccttttacccttttctgaaaggatagcagaggtatttttcttttcttttttttttttgagatggaatcttgctctgtcaccaggctggagtgcagtggcacaatctcagctcactgcaacctccgactccctggttcaagtgattctcctgcctcagcctcccgagtagctgggattacaggcacgtaccaccatgcccagctaatttttttgtatttttagtagagacggagtttcaccatgttggccaggatggtcttgaacttctgacctcatgatccgcccacctcagcctccagaagtgctgagattacaggcgtgagccaccatgcccgtccagcagaggtattttttctaatacttgagaagtgtctgctaagtatgtattcaccggagggtgctcagcacctcgccctgttgctctgggttgggactaacaaggtgaaacatggctcattgcatcatattaatagcatgcaaatctaagcccagtgatgccgtgcaatggctacgatcaagggcaatagaatggatcgtgcatgagctcccaggccacacacacacgcccttgtgatgtattattccctctactcttgcaggtcggtgcttgggatgctagtgcccaagctgatgttcctaggtcacctccctcaatgcatgggtctaggggccagcatgttctattgctagggccatgtgtgcattcgtttgcctaggggagaaaagtacacattcccatcagctcaggtgcgtggaggacggaagaactgctgttgctgctagtattctcttcagcacaagataaaaaggagataggcaaatcagctggctggccaatcaaattaacttattgttacactaatttttagaatcagaattatgggtcaggctgtgctagcaatcagtgaaatcaaatttcatgtcattctgcactgggtagactcaggatttgcctgaaacaagtaaacaattcctggaagaagtgggcgaggcagaggcttgaactatccactcagaccaaggaggagtcaggcaatggcttctgggcatcgtgtggggtgggggcagcccctgccctggacacccgtgaacacggaggcagccgtgtgaacaccatgaggcagggtgtccatcctgccacccacacagctgcgtcctgcccaggaatgaggctggcagcccataggcccctccttggtccctctagaggtttgcttcattccagtacccttggttctgtcaagtgggcagggcctgggcccctctgctgcaaacccatggcccaaagcggacctgatccggcagcatctaaaaacaggacccggagaatctgctggactccaggattgccctggaacaaacctaaagtctcctatgacatgcaaacaattctgccagccccggccagcattccctgcatgtgcttatcaagtgaggaggccagcaggacttagcacccaggtgagcacacttcattgagtccaggtgtgtgcagatgagaagcagccaggagttgaggctgaagaggagcctacctaaacctgtcattacaactgattgatccttggtgtagtcaaatcttctgcctttatgaaagtcatggtatctagaggtaaatccccatcagcttggagcagcaccatgaaatccactctagcatgcagactcgggggcacttttagatattctattggttgttcttgggggacagcttcctttggagaacatgtgagttgtctgtgaatatcagcttgctctccctaggtttccatcacatggatcagcgagagttaatgctgactccccctccctcgggggcttatttgcaatctcccgatttgctcaaaaacttccaggtccagagggaccctaaagaccctgtcatgtccccctgtgaattaccagcatcccaggccattgctgggttttcttaaaactattaagacactatcaacgtgaaatgacttgaataggctttaatttttaaaattcattatacgtcctgcagcatttaggaaaaagagggaggtgtcacacataatatcaaatttggctgacacaaggtgattttgccacgaaggttgggaaggatgaacatttgcaattgaaaactgtttgttgcccccagaatccagcggtttcaggctctctgaggattccagaggtgctagagggggtaaggccacattcaggtggtgcaggtgggattcaccccttcacagcctggaggtggtgcccggagcgcaccctgtcaccccaaggatgatgacaccccagggaaggtggtggaagcaggaaggggaggtcagaggaaaactggggccctcagtgggcatccgtgatgcggaaacactaataatgccaacagcaatagcagaggcaggcagggcttacgtggccagggctgggctggtgctgtcctgagcacttgacatgcatgaaatcacagttgttttaagttctgaactcccctgggaggaaactgtggccacagcaggaattccaatgattctagggtcaggagaggaggcacccacttcctgatcagggctctgtttgtggatgcgtgggtgtggttggcctttgtgcacactggtggttttgcttctttcccccagcaaaagaatgcagattttgcattatctaaagaggcggttccgtgagcccactgtgctgagtcacatatattccatcggtgtaagtaccaccacctgggcagtgcccctggagtgttctcactgggagcgcagctttgtgtctgtacccttcctgagaatagctgacatgctggcctgggtggcgcattggccgaggtgtggctatgacagaccaggataccagcatctgccccagcactgaactgagcacaccacagaaggtgtggacagagtggcatgaaacatgacagctgcttgtgctcgaaattagatgtagccacacaaatcctgtcgtgctcaaagggttccatctccaaagtccaaaggaaaactcttccttaactgttattccattctgtctatacatttcttattttgaagcaaggataggttcacacgctgctgtaatgatgcatgcagagaaagcccactcatggcccggtttctcccagtggtgacatcttgcaaaactctagcacaatgtcacagcctggcattgaccgtgacacggtccagatccggaacatggcgtcccccacaaggatcccacctgccgctctttaatagccacgctgcttcccttccattccccactggatccctgtcccctggcaaccaagaggtctctctcttttttgtttttgtttttgttttttttttgagacagagtttcgctcttgttgcccaggctggagtgcaatggcacaatctcggctcaccccacaacctccgcctccagggttcaagcgattctcctgcctcagtctcctgagtaggtgtgattacaggcatgcaccatcatgcctggctaattttgtattttcagtacagacggggtttctccatgttggtcaggctggtctcgaactcctgacctctggtgatccacccacctcagcctcccatagtgctgggattacaggcatgatccaccatgcccggcctctggtctctatttgtatgatgttgtcaattctgtaacgttctacacatgtaatcatgcagtaggtgactttgggattggcgccttccacccagcacaaccccctggcatccatccgggttgtcgcctatatccgtggttcattcccttctttctgagtcatactccgcggtatggatggaccacggttggttcaaccattctcccttgaaaggcatctgcatcgtttgcatttgggactactacaaatacatccgccaggaacatgtggacaggcctttgtgtgaacatcagttctccgcgtacatcatctctctgccctggtgcttgcatctttagttggttttttctgtcttttgaagaacctaccagactgttttcagaatgactgtaccatttttcattcccaccagccacgagtgagtgagccgtgtttccacgggggttggcattattttgtatcccagccattttgataggtgtgcagtggtgtctcactgtggttgtaactggcatttcctaatggccgagtggctctcagcatctcttcatgggcttctttccatctgtgactttctccagtacccatctgctcatctcttgcccgctttcaagttggctggttttgttttctaccattgagttttgaccattctttatacatgctatctgcaagtctttgtcagatacgtgtcttgcaaatattttctgccacaccgtagcttgtcttgtcatcctcttaccaggatctttctctgagcgaaaattttcattttgatgaagtccagtctatccatttttctttttctggtttgtgtttttgctgtcaagtctaagaactccccaccttaccgaagaccctgaagatttctcctatcttctctctgtgttttatagtttcatgttttacatctgtggtccactttgcattgatttttatataaactgaattctaggtcaaggctctttttcttgttggcctgcggatatctaatttttccaacactactgaaacactatttccaacactattactgaatgccaccacgcctggccatatatatatatatatatatatatatatatatttttttttttttttttgtagagatggagatctctctttgttccccggctggtctcaaactcctgggctcaagcaatcctccaacctcgacctcccaaagtgctgggattacaggcatgcgccactgtgtgtggctggtattttatttataatttcagtgtctacatggtcattgctaagctttcttttctctgttgaattgcttttacatctgggtcaaaaatcagttgggcgtatttgtatggacatggtcataggccctctgtttctttccattgctctacctgtctgtctttctgccagtacctcacagtcttgattaccgaaattatgtcataagtctcaaaaataagataggctgattcctctcattttgtctgttgtttttcaaaattgtttttattcttgtgaatcctttccctatctaaatgttagaataatctctatttctacaaaaaaaaaaaaaaaaaaaaaaagtcttgctaggctttcaatgggaattgtgtaaaacttgtttacctatgtggggagaatttactatgttgagtcttccaacccattaacatggtcagtcttgccatttgtttatatcttctttgatttctttcatgaatgttttgtagttttcaacatacaacttctgcatatgttttgtcagtttgacacctaggggcatttttgagtgactgtaaatggtactggtgtttgtttgtttgtttttgagacagggtctttgtccctgaggctggagtgcagtggcatgatcgtggctcactacagcctcaacctcccaagctcaagcaatcctcccacctcagcctcctgagtagctggaaccacaggcacatgccaccacgcctggctattttttttttttttttttttttttgtagagatggagatctctctttgttccccaggctggtctcaaactcctgggctcaagcaaccctccaacctcgacctcccaaagtgctgggattacaggcatgtgccactatgtgtggctggtattttatttataatttcagtgtctacatgatcattgctagtatatacaattgtagtaaatacaattgaattttgtatgctttccaccctgcaaacttgctaaactcgcttcttagttctaggagggttgtgtttttttgttgttgttgtttgtagattcattggggttttctatgtagacaacatgtcattggcaaacaaggacagttttctttcttcctttctaatctgtttgccttttatttccttctcttgcctattgcactggctaggactcccagcactatgttaattagcagcagtgagagcagacagctttgccttgtgacagtcttagacaccaagcactgagtttttcaccattaagtacagttggctcttctgtatctgtgtgttccatatccatatatccaaccaaccgctgatcagaaatgttttaaaaacaagaaaaacaatacaaattagtaaacagtacagtatagcaactctttacataacatttacattgtattaggtattctaagtaatctagagatgatgtagcgtgtacgggaggatgtgcataggttatatgcaaatactataccatcttatataaggaatttgagcatccttggattttggcatccttgtggggagtcctggaaccaatccctcagagacaccaaggaacaactgtataatattggctgtaaggttatggttgatgcttttaatcaacttgaagaagttctcctccattcctaattttatgagagttttctcatgaacatgtgttgaattttgtcagatgttttttatgaattagttaatatgatcatgtaatttttcttctttagcctgttgattggagactacattgattggttcccaaatattgagccaaccttatatccccagaataaaccccactaaatcttgatatgcaattatttttatctattactgaattctacttgctatttcattagtgatttttgtatctatattcatgagggatgttggcatgtagttttctttttgttgtttttccttgtctgcatttggtatcagggtaataccaacttcataaaatgaatggggcccaggtgcagtggctcacacctgtaatcccagcactttgggaggccaaggcaggcagatcacttgaggccaggagttcaagaccagcctggctaacatgctaaaaccccggctctactaaaaatacaaaaaattagcctggcttagtggcgggcacctataatcccagctactcaggaggctgaggcagagaatcacttgagcccaggaggcggaggctgcagagagctgggatcataccactgcactccagcttgggggacagagtgagactcagtctcaaaaaaaaaaaaaaaaaagaatggtagtgttccctcctcttctgttttcttgaagatattgttagaatcatgttgactttttaaacatttggtagaattctctataaatgtttagaaccatcttggcctggacatttcgttttggggagtttttaaattacaaattgacttttgctataggttgtttaaattacctgtttgatattgaatgagttgtagtacctcatgcttctctaggagttggtccattttattgaagatgtcagagttatgtgtgtagaggcatttgtagtgttcccgtattatccttttgatgtctgcagggtctgtagtgatgttccctctttcattcctgatattgacagtctgtgtcttccctctaattgtttctttgtcagtcttgctagaagtttgacaatttcttattttcaaatacctagctctgttttgttgattttctgcattgtttttctgttttctgttaccgggatttctattcccctatctttgtgatttccctccttccttcctttgctatcattgtgggtttactttgctcttcttttcctgggtgctcatggtgggatcttggcttattgagttgagatttttcctctcttcaaatgaaagcccatagtgctataaatttccctctcagcattgctttagtcatgtcccacagctaagttttgtgttgtattttcatttttattgagttcaatgtctttttaattttcccttgagacttcctctttgacccttaagttatttagaagtgtgttgttaagtttccacgtgtttggagatttgtctgctatctttctgttattgatttctactttgatcctcgtgtggtcagaggacatgctctgtatagcctcagttcctttagattgggtgagatttcctgtatagcccaggatatggtcaatcttggtacatgctctgtaggtgcctgaaatgaacatagcactctgctgctgttgggtgaagtggtctgtaaatattcatcatttgatggacttctaaatttatctcaagactctgagatcatttactctcaaaggttatgtgatacgctaccttttccagacaattcctaagtgatctaaacccctgctgagttcaccaagtggcctgtaaaaccctatgatgattcttgttgatgggagccatcttcccccactagtaggtgtgggcctttcttaaggtgagggccttgagctcgcaccagttcaacctatggctgtatgaaaattttctggctgacatttttacgcttgtaccttcaagaaatataacaaaacatcatttttcttcttcttatcaagtcatagaatgctaaaggcagcgggaatctagggtgatctggtctaccctctcgtttgacaggtgaagcaatgaggtgttgcgaagttaaactgattagttttttttaattttttaaatgaaattaatatacgttaattatagaaaatgcataagaaaaaggggaaatgcataagatagagggaagcaaacatttttaaataaaatttatataaaacttataaccaaagatgactactatttttattttggagtatactctcccaatatgttttcaaaagcaggatcactctctatgactgctttaaaatcttttttttgtactttaacaacagacatgaacatttttcaaaatattatttctaatagcaaaatatcattccagatatatgtctgatgatacagttttctcatcatttatttaatgagtctccattgggtgggcgtgcaggttgtgacagttttctctgtgttaaataacactgtgatgaatatcttttgtgtacatgcatgatgatttcctagaaatgggaccctgggtcagtgcttgtgaacatttttagcttctgagccccattgccaagttggattcttgaaattttttgtttgtttgggcagctttggttttgtttttttgttttcttttgagatggagtttcgctcttgttccccaggctggagtgcaatggcacgatctcagctcaccgcaacctctgcctcccaggttcaagtgattctcctgcctcagcctcccgagtacctgggattacaggcatgcaccaccatgcctggctaattttgtattttttagtagagacggggtttctccatgttggtcaggctggtctcgaactcccgacctcaggtgatctgcctgcctcggcctcccaaagtgctgggattacaggcgtgagccactgcgcccagcgcagctttggttttatttgttttgtttatagtggagggttagacatgaaatcaacatagaagatgacgtaaacttatgactaagcctggtgtgggctctcggtgttctggggcatgagctagaggatggctggagccaggtagagaccgctcccttccttagaatgtcaccttgctgacaaggacagcgctgtgagcatccacaccttcctgtgaggtatctggcattgagcctggtcaggaaacaggaagacaagcaggttccattgagcctgggacctggaccttgtaaagccagccacccagcccagttttacaggccaggcaacaaagggagcaaccggctggacccaggcctgcctcccccgtgcagacccgccgtgagaacaccgtgttctgaattgagacgtgccttgcactcactttgtcccagtaattgcccccataaaatagacctggacactaagaggaaacttcccatatttggaaacccagtcctgcctgctttttatagctggtgtcgaggacaagagaaccacaagccgtggccagtctgctgagagaccactgagggacagacgggttgtgggcctggagcagccccggagggaaggagcatttgaaagtggacaggtagagcccaggcccagagagccccagggctgctaccaggaaggccagcgcatccctccaggtaacgggcagctcctcggccacagcctccaccccccaacacgtgggattcgggctgcaatggcctacacatcttttcctcttgtccgtgttccatctgtctttcttctttggtttgtagagagagaagaattaatccagagcgtgctggcgcaggttgcagagcagttctcaaggtacagagtcttctaaacttacaaccagccagagatgggcacatctttctctaagagcgagggcaggccccaggctctgaggctggccttggccggcaagcgtggctgtctcacctgcctggaggagctgcccgcacggtggaagccttctgtggcttctgtaactaagccagcttggatggggcccaggaaacgctcaccttagaccaaagaccatgttgagtgggtgcattagaatgtgagctcgtgaggtcgagaatgttctccaccggctcttctgggatgggagaacaagctataagaattggctccactggaaaataagcttcctcgctgagcttctgtgtagttaggagacttccttttcatcggagtcatcccaacaatcctgacctggataccgtattttccatttctcaaactgacttctctgtggcgtcttactgcccaggttaattaaaatagtgaaaagcacagacgggtgggattttttaaaaacctttgaattggccgggtgcggtggctcacgcctgtaatcccagcactttgggaggcggaggcgggcagatcacctgaggtcgggagttcaagaccagcctgaccaacatggagaaaccccgtctctacgaaaaatacaaaattagccgggcgtggtggcacatgcctgtaatcccagctacccgggaggctgaggcaggagaatcacttgaacccgggaggtggaggttgccgtgagccgagatcacgccactgcactccagcctgggcaagagtgacactctgtctcaaaaaacaaaacaaaacaaaaaaacctttgaattgtttaactgactgggttggagcctccagagagcacaacaggtcctccgaaggtgtctgtgcccatcaggggaaggtgcggggactggaccatctcaactgcatgagcagagagagggccatgtgtccaccccagagagcttgggtccactgctcaggcccgaagaagtaaatatgcccaaccagcccagaaaatacacctcatgatactttggtgattctttcctccccatgggacatgatgatttctgaaaagcaagtcctagcatgttggcacctcagaccctcaccagcccacctagaggccttgcccatgcccacagcagggactcagtaggtgtttgcttaaccggttttggctctgagaattttaagggtcatatttactctctcttttctttttcattcctagagcattcaaaatcaatgaactgaaagctgaagttgcaaatcacttggctgtcctagagaaacgcgtggaatgtgagtgacgtttctgtttcctttttgcttctctgtcctttaacctctattcaaattaaccacttggaacggggaggagttcagtgccgaaggtaaatacaaataaatgtcttttctttgtgaaatacttgaaaattacctttgatgttaacaaaggctagcacagtgactaactaagcattttatttctattttaaaagaagcacagctcatggtataaagcattctttcagccccaaagaataaaaatgaacacacgaagccttccgcacttagcccctctgagaacctctgctgagtgtcttgtctgtgtctttttgtgtgtaaatgaagacattctctgcacactgatcggcaccctgtgggtcataattttttggaatatgtctactaagttgttatctcttggtttctgatacagtctggatgtcccctccacatctcacgttgaaatgtcattcgcaatgttggaggtggggctggtgggaggtgtttgggtcaccaggcagatgcctcctaaatggcttggtgctctccttgagatagtgagttctcgcaagatctggttgtttaaaagcacgtggcatctctctaccctcctgcttctccgttgccttccaccatgattggaggcttctcgaggcctccccaagagccaagcagatgccggcaccaggcttcctgtaaagcccacagaactgggagccaatcaaacctcttttgcttataaattgcccagcctcaggtatctctttatagcaacagaagaacagcctactacagcctccaatcaccaccaaaggaaaagcagaaaaaggactagggagccaaggagtgtcgattcaagtcctgattcaatgatcacaaagctcaaattctgggaagaaaacagcttcaagtcacccaccctttttgtcctcatccataatatcaagatcaatgcttgaattccataggcctcacaattctgtgttccactcacagcttgacaagtgaactctttgtcaatgacaaggcaaaggttaatgattaacaggcactgtatttaccaacttaggaactaaataaacagaatccagacaggataccattaagagttgcagcatcaccaaaaatatctggctgattgactgaatgtcgtcgcttttctttttctttttttgagagacagagtcttgctctgttgtccaggctggagtgcaatagcacaatcttggctcaatgcaaccttcgcctcctgggttcaagtgattctcctgaaacatgatttacatagtcagatttatacttttcaaagtgtgttgacatttctaaaaatgtatgtggtcactggatcttcaagacagtttcattttccccattgtcaacgaggaagccacagagaggttaggtaacctcaagttcactcagcaaattagaaaaataaataaagctgggactggcacccagggtcctggccgggctgctgtcacggcctgctacctgcccttctggaacgagtcacttccctgcacacctggctgaagaggaccaggcactccatgaggattccttgataacgcaggttagaaagctaaagctgcaagcaacagaaactgatcgtggctgctttcaacagaaaaggagtttttccctaaaggattttgggaagcttccccagatccccaggaaggcttgggaacagggctcagaggttgtgcagcagcaacaattccccaaatcccgtgcagagctgatgctgtgcggatgcctgtgctgccgtctctgagccccagatgcggcaccagctcccctgtactcctcactctggacctaggtcccccggaggctccacaaccacttatgcagatatcaggctgcttctccatgtcactggctacaggttcaaaatctagacagagccaggccgcgcacccaaggtctagctgcaaggcaggccccacgaagggaggctgtgagtatcctgaagctgcctcacaaagcaccacagactgggaggcttaagcatcaaaaactgactctttcacagctctgcaggccagaagtcagaaatcaaggcatgagcatgactggctatttctggaggctctgaggggccctggttccatgcctgtctcctagaaccttgtggttcccagcaatccttaccgttcctgagcttggaaggctacattgctataatctctgcctgtgtctacacgtgatgacattctcccaggatgtctccatgtcaacagtctctctcagctaggtcttataaagatgcctctctttgaatttagggcccaacctaaatccaggatgggcccatctccagatccctaatggattatatctgccaaggacctttttctacataaggtcccattcacaagttccagggagtaggttgtgaacagatctttctggaggacacaattcaacccaccacagcgagtgtttgcatttccatattctgcactgggaggctggctcagctctccaccaagccccatgtcgcagggaattctccaaacttgggtaggggtttgagccaaagcatgcaaaaaaggcttgctgcagagtccccacccctctttacggacacaaaaagccacgcagtcactacggggcgagtgtgcagatgcccgcgggcagcaggtgcctcccacctctcctcctctctccagcacctgggtttttcctcagccttccccatctcctacgccccacctggaagccagtgccagctccccccatgctcttcccggaaagtgcaaacaggcaagttgaagaggccatgtcgtaactctcaaaactcttacagagaattatgtcgcccacaacaagatgaatagtaaccctgtgtgtctttgaataactgaccctggaaaataaccatcaagccagaagaaaagtgttcctattttacctgcaagtggcaggtgagtcgaagaccactgaaggaaatggcccataggaccttcccccctagcctgttctggctgcggaattctccaaaatttctcacttctcagagggaagcatcttcccataaaaccctcagtaaatgcacatagatggcctggaaaaggacaccgctcttgacccaccgagctcaggctcactgcactgaccaaaattcctggcgcttctatgggtaaaaccggttgtgactagttgtactgatttctagcaccagagacctaggactgcagaaatgggattgagggagctcacctctctaaggagtagagaaggaggaacagtctaggagttgtggagggtaagggaggggcttgggtgaggtcaggggggactctcctcagtcctcctggctgccctcctcccctggcatgcaactcacacccccaccccaggaggcagccatgtccagacaggctgtcctcctcctgaactccacctggctttgggctcatcctccccgggcacttctggctgatggctccccactctccagcggatgtgctttagcgggaggtggccaggatgctgcacctgtgctgagccccagagattctgagttccagagacactacaagggcagcagagccttaacccaaagatgcaagagcccagacattttaggaagcttggagggcagaaacggaaagtccttttgaggagagggcctgcagctgaacctctcacgcaggccactgggtaggtgcgcgcccagcttctcagaaggtcagtcccaaccctgcacggctgccagaagctagccagatggggaaggcggccaggagcctggtccgacaccccgatgcacagggcctgggccagaggcagatgctcccatctacatatgcacacacacatataaacacaaacagagaaaggtgcacatgcactcacatatacacatgtgaaatcacacaggcatgtcaggatgtcacatatacatgcacacgtgtaagcacccaggcacgtgcagatacattcatatatatgatcacatacccacacatgcgcacacacagctgcttctgctatacatgagctgctgtgagctgttttgttttgtcttgtcttgtttttgttgttgtttgagacggagttttgctctttggcccaggctagagagaagtggcgtgatcttggctcactgcaacctctgccccccgaagacaggacacttctgtctcagcctcccaagtagctgggattatagctgcccgccaccatgtccggctaatttttgtatttttagtagagatggggttccgccatgttggccaggctggtctcgaactcctgacctcaggtgatcgacccgcctcggcctcccaaagtgctgagattacaggcgtgagccattgtgcccggccaagctgttttctgcctcttgagttaaaggattcatccactagaactggccaccttaaggccatattatattgtggtggacttgtcttaaatggaatttcctgcttcttcttaaatgtataattcctctgaattgaatataaatttcttcatttctcctcattgactttcaaagctcttcttccttttgatatacaaagtttagccttgttcgagagatctgggatttcccttacgttacggattattttgtaaacagaacacccaggctcctcccctcatgtcctggctggaggtgaaacattaaaaagagattttaaagcagggccctttactcccttccttcctggtttgtggccagggcacagggcagctctgctccatccaccctttgtccctgtgctctgggcttggaccaaaacctaaacacagcgtgggccgtggcaggagctgaccggctggggcaaagtttaacacaggccatacaaacagcccagagcctggatgctagaaccaagccttgcttttctctgtcactccggaagtgtgctctacgcgggctctttagtgaggctcctggaggaagtgttgaaacacaactctattcatacatgtctttaaacagctttcactagctctgtagccaaaggactgggcctgccaggttcccggcctcttgctggagcacagtgaggctggggaaggagcacagcacagagcctcctgagcctcggctcagctctccccgacccccagctcggctctccccaccctccggctcggctctctctgacccccagctcagctcttccccacctgccaggacgatttccccaaagccagcgtctgtcagaaaatcacccttagtttttcctgcaggtggcctgtgacttgtagaagctcacaaaaatctctttcaaagcccttttttgttgctgttttgttttgttttgagacagagtctcactttaatgcagtggagtgcagtggtgtgatcttggcccactgcaacctccacctcccgggttcaagtgattctcccgcctcagcccccagagtagctggaattacaggcagcctgtgaccacgcctggctaatttttgtatttttagtggagacggggtttcattatgttggctggacaagctggtctcaaactcctgacctcaggtgatccacctgccttggcctcccaaagtgctgggattataggcatgagccactgcgcccggcctacagtccttttaagaggacagcccggggtttccagataatactagccccacacacaggcatgtcctagggtccacacctggtcagcgggaataacaggcagccgtgggctgggctcccagccccctagcagggtccagtgggccagggagcctctgctttggtttgtggtgcgtggtctgtgcccgcctgtgttcagcgtttgaaggcagaggagcgggccatgatgggcagagccgacgtccaggctccacggtagggccgtcctgctgctgtctgcagacctctcaggcttgaggccccccgccccacaggactggcccgctcctccctctggattgaggtggagcagggctggcagtgggtcgaagaggggagctgtggaatcttccccaaagcagccgggtgtcctggaaaggccagggagtgaggaggcaggacccccggggacacaggcacacacatccaccacatgctcacctctgcctcctcctgcagacctccccgccagccccgtcatttcatggcatcttgctttctcttcattgaggaatgcacttttgcaatgttgttactcactatccatctacttggccaacagcctcttcataaacttaattgccacaaattctgcatctctgggatgcaaactagtgaagctgtgctgtgtcacccaggaggcttaattttaacatcacctcaataggtagccagggaagcggatctcggtggactctgcactgtcaatacaaacgctatgcacccatcaaaaaccatgagctggcttaaaacagagccttgtatggacatgggaaaaaaattataggtttgttgcaaactcatttagcagcaaaaatgtgatctgaactgacatgaagcccttggtatttatttatcctgctcagtatgataaatagcattttcctcgggggataaaaagaaaaacgtgagctgcgacagcagccactaacatggggaagggccgtgacctcctgatgagtgaaaatagcaagttagaaaacaacaaattttatcttttaaaattaataatagatatatagatacatagacacacacaggatggatagaagctagatagatacatacatacatagatacatacatagatagatactatatagatatgtaaatagaaagataggtagaggctgggtgcagtggctcatgcctaaagtggttccccagcactttgggaggtgaaggcaggaggattgctttagcccaggagttcaagaccatcctgggcaacatggcaaaaccccatctctacaaaaaatacaaaaattagccaggtgtggcggtgcacccctttagaccctgttattcaggaggctgaagtggcaggatcacttgaacctaggaggtaaaggttgcagtgagctgtgattgttccactgcactccagcctgggtgacagggcaagcccctgtctcaaaaaaaaaaaaagaaaagaaaagaaagataggtagatacatagaatgggtggatagagagatagaacggatagaaaaataggatggataaatagaacataggtagatacataaatatgatgaatgcatagatggatgggtggatggatggatggatggatggatggatggatggatggatgaatggatacatagatgaatggatggatagatagtatataaatggatggatggatagatacacagtaggtaggtaggtagtagatagatagatagatagatagatagatagatagatagatagataaacaggatagatagatagatagatagatagatagatagatagatagataaacaggatgaatatttagaaggctgggagtgggcagaaagcctggaaggacacacattaatacaaataatattaactgagttgttttctgggcccataggatcctagacaagtttttaaatattattctttgaagtgctatttcctacacttcctacaatgataataggatattttatattcagaaaaatgacatttaagacatagtcaatggtccatggaccttggacagagggcccagctgccctgtttgcagtctacaccgcatgcccaacccttccccagatctactcactttcagaatgtgctgccttccacgtgtgaaccagactgagctcctttctgccactgatgttgaattgtccatttgctcacgtcagtgtccacgtggcaaatccacagggcatgggtgggatcctgcagtctagacaaagccaaggagcaccgctggaggccacgttgggcttcccaatccacatgcaaacccaaaatgtgttcttgggtaccttttctgagaagacagcctgtggcatgcatcagcttccttgaggggcccatgatgctggagaaaacggagacccggctccaaaggagaatgtggactcttagtggttggacaaagacgtcccgacctcagacctcaggtaccctgtgtttccccagcggcagctcatctggactcggccatcacgacagcgaccacactggctccagccacatgcacttccggaccccatgtcctctagctgttgggtagaagaggggtggagaaggtttctgtagcacagaaacacatcagcaggaccagatccaaatattgcactctccagattcttcgtccttctggcagaaagaagcagtgtcccgggaacatgcccctacttgacccctgaccctggaaacgcctcgaaacccacccgggaggctgattccagctagtctgccctgggccactgtactgggagagtttctttccggagctgcagtacttcctttggggtgggaaggagttgttacaaactagccaaaggctctgagttgcttggtttttcctttagaaaacatttgctttttatttttagcagttattcagagccaaacttcatgaaaaggggaatagagtggtatcgtgggagtatccttttgcataaaaactaaggtgtgattacaaagtaacaaagctaatcttttttatttcaattggtttatgaaccaactctaattgaaaagccgtgcaaagctgcttgcttcatggcagcttttctggggtaaacgtgcagtcagccaagggtaaatatcttgaagtttaacgctcgctcggaggcataagctccagtttgtttttggttgaaaaatagtatcctaactgttgaggtacacctttgcagtgggactctgtaactgcccaaggggttcaccctgcctgctacctaaacagagctcattcatcaagacaggggaactgcaatggagaaagagccattcacccagtgccggctgtgcgggagaccagagttttattattcctcaaatcagtctccccgagcattcggggcgcagagtttttaaggataacttagtgggtggtgggaagccagtgagccaggaatgctgattgattggtcagggaggaaatcatagggagttgaagctgtctgcttttttttttttttttttttttttttgagacagagtctcactctgtcccccaggccagagtacagtggcgtgatctcggctcactgcaacctccgcctcccgggttcaagctattctcctgcctcagcctcccgagtagctgggactacaggcactggcacaccatgcccggctaatttttgtatttttagtagagacagggtttcactatattggccaggctggtcttgaactcctgacctcgtgatctgcccacctcagcctcccaaagtgctgggattacaggcgtgagccactgtgcctggctgcagctgtcttcttgcactgagtcagttcctgactggggccagaagaccagacgagccagtttatctatctgggtggtgccagctgatccatcaactgcagggtctccaaaatatctcaagcgctgatcttaggagcaatttagggagggtcagaatctcgtagtctccagctgcgtgactcttaaactgtaatttctaatcctgtggctgttagtctcgtccccaggcaagaagcaggtctgctttgggaaagggctgttacagtctttgtctaaactataaactacaaatgaagtttctcccaaagttagttcagccaaggaatgaacacagacagcttggaggttcgaagcaagatggagcccgctaagttagatctctttcactgtctcagtcataatttggccaaggcagtttcaactccaggaatgtgatcaagtccaagttctgctgatcctcaactttgcctatttatttctcttctgttttaagtcaacactttctcctggtgaaactgctctggaaggacgttccaatgaaaagcttttcccataatgagatcgtaatccttgctgaaaacgctttgccgttcactgcattttaatgctctggcaccacatgtgcccccttttctttttgggataaaagacgcctttgtcccatgtcctcagctggtgcttaggggtatggagcaaaaagtgggtgccagagttgagattcagggagtggagagtggggaggagcttctgccttctgaaaactgcccggatggatgcggtagtgcagcggtggccacggcacatgcctgcgaggatagagtcagttgtggctgagctaagcgcggaagtgcaggcaaaacctgagtatcggcagccagggcaggtgtggggacctctgcactgaggtatattcctccctgggagccacagggagcccttagttaccagccttgagagatcctccacattcgtccgtggtaacccccttgctgtctctctctctgtcaccagtggaaggactaaaagtggtggagattgagaaatgcaagagtgacattaagaagatgagggaggagctggcggccagaagcagcaggtagggtctgcgctggggccacgggcggccgggcctggggagggctccccgtaccagttgggctggggctgtgggctttgtttgcctaaaagaaaggctggtgcagttcggtacagttcaggcttgggagagtgcagtctggaggcagccaccctgcttgcgacctgcttgtcagtggtgtgactttcttctaacaaaagagcacgcatgggccgggtgtggtggctcacgcctgtaatcccagcactttgggaggccgaggtgggaggatcacctgaggacaggagttcaataccggcttggccaacatggtgaaaccccgtctctactaaaaatacaaacggtagccaggcatggtggcacatgcctgtaaccccagctacttgggaagctgaggcgggagaatcgcttgaacccaggaggtggaggttgcagtgagccgagatcgcgccactgcactccagcctgggctcgacagagcaagactctgtctcaagaaaaaaagagcacatattggagataggggctgggaagacgatttcacagaagaagagtcctcctcctgcagatccaagccttaggagcaatgtgtccagcttggaataagttgatatccacttttaaagacagaacaagaagaggaaaagcattaggggaggagcctcctgttgcccccagggacccggttccttgtgtgatgttcccactgggttgcattccagcgagggcttcagcactggggacacagaagtcattctcctgggaacaggcatccttcacaggcgcttcggggggcccagtgagctgtgactcgtggggaaaatgccccagtctccacgatgccacctccaaagtcagttttgtgtacagcaggactctttactggagccagggtcaggacacgtgtggatgaaccacgaccaaactggggatggaaatgccggtagtagcaaagagacggcggtgatgatgagcagagcgcatgcattgaggcacttactgtgtgcgggcgctgtgcttagtgaggggcacacaggacctgctcacacctccgggctttgcctccatgcccgctggtgccagcccagacaccacaggcatatgatgtggctcatggttccccagagtgccactgcccggcctcagtgggatttaatggggactaatggactgagaaacagccctgtgcaattgcactgagttgtctcagagccacctggcatgctgacgatcattccctgattttgaaattgagggcaatctgcttattgaggaagcgtggcaagtgaaagggtctcagaggcagaaggtgaagggaaagccgacgggcctcatctggtcccctcaaagccccgggggcctggcctcggggtgggcgcagggaggaaggccgagcggaaggaagcaggccttgtctgagccacgtgagagcctgtcctacagggaccgtgccacgtgtctgtcccatgcactcatgggctcatttggagttagggatgtctcagcccaattgacttaggggaagtcaggccatagtttgtggccatggaaagttgtgagtgaacaatccatcttcgtcatccctgtgctggaggctctttaaaggacgggagacagagtctctcatttgtgagccaaggaagagctcccaagttgcacagggacggccacacagctggggtcccaaggctgggacctggcaaggctgggacccggcttggcagcctcagacacacagcaccttcacctgtggcaccgcccttggccgtgggctctacgtggcttggttcagccctctggctgtcccttgcgccccaggtgccatggctgctttggcaggagggtggtgttccagggtggtgctgcctggcagggttcccctctgcccagagccaggcggagatgggtggcctcaagctggggctgcgggtgtagcagggccagcctttccagccccaccagcagcacgaggggaagaggacaaaaactgagttctagtcttcagcctgaaaccagactccctgaacagcggcctctgggccccatatgggttggggaactccaccgccccaaggggtgtgtctggagccaggccatgcctcccgaagctgcccccagctcctcacccacaactgtgtgtccctgagcactttctggaggtgtttgtaggatgcagcctcttatcccttaaacgactgcatttaccgcccacctacagcagcaggagtgagtggtgagacagcctccggcctcacaggtcttgcctctgccgtgcctgatgggcacccgctctgtagaaagcaaggcgagtgctcggatcacacgccgctcctggcgtggtttctggtgtgcactagtcctgcaggtcaggttgaggttgcaggggggaagattatttttatcgaagttgtagtcatttcctggggctgcgtaacgaattctcataaactgggcagcttaaaacaatagaaatgtattcccacatagttctggaggccacaagtccaaaatcaaggtgccagcaggccctgccacctctgaaggccccaggggagggaccttcccggtctctcttggcctctggtggctgccggcggcattctctgcctgcttcttcacctggtgctcccatccgttctgtccaaattccccctttttgtaaggacacccatcctattggagtaggggtcaccctcctccaggatgacatccccttaactacatctgcaacagtcatgtccccaaatgaggtcaccctcagaggcagcagggttaggacttcaacatacaacttttggggggagatgtacttcagcccataacacaccacgtgggaggataacaccgatttcagagcttgcagaggaagccgccaggaactccagtgagacatcagcccccaggtgcctgtcaggcacgccgggctgtggggggcacctgggcccatctgagtaacggaggcgcatccgcacttcccccaggagtacatttttagaacccacagcgccataaaccaaagacaaggagacttcctggtgccccgtcagcttctggaggcgacgttctcggctgacagctctggcagcctcccctgtaggtgagagacaggtaaatgggactcttgcttccaaaacggaacagggtaaaaattctcaagcgttgtcgacacattgagaaaaaacaaatccagcctcctgggctctggtctcatccccagccgcgtcatgtgccccaggccggcgttgccacacatgaaaccccttcctgtttttctatgtagaaaggaactcagaatagagacactgagatattcgtgttgtcccttttgtctttgtcaacagcagagttacatcttactcatgagagccctgtagcaatgtggggaccctgggaccagtctcagttaagctggaacttccccggatgactggggagaggagctgcaaaaggcagggtgggggtggggggccttcccgagatggcagcccagccagaggccagcgttcttgcctctgggaagagaataaaggccccagacagggtggagctagctcagccccgtgccacacaaatggccagtgtgagcctgaaatgtggagctacattcagcccacatagcacaccctggtggggcctcggagccaggggtatggatccaccagaagctgccccttgggaacagcagtggcatcggggtccggcacacagcacccgggagcaggtggccgtcccctgacactcacgggctaggtttctcctgcttttccctcaaagaggacagaggtccaactgccagcttacatttagggcaggggcaggggcaggtctaccccaggggccacggccactctggcccccagcactgtgccaggcagagagcagagcatggaatatggggttcacccagagctggggagtctgcaggagcctggggtggcaactgagggctcagcgttcatcccaaacaaatggccttgcccactggcctaagccccagagaagggggatggggaccccaggaaatgaaagcaaagataagctccaaataggatgaaaagaaagagctccatgccagctgctctgtttgctgaagacgctggttcccgtggcagcggagcgcagagagaggggctgcctggccaggcagggtcagcgggccccagcagaccctcctctgctcccagctctggtatctgcaaggaaacagcgggattcgaacagtcaaactgtcttgctcggtgaagatttccataaccctcctggggaatgcaggagacttacagagacagcacatgtgcgaatgtttacacaaaacaggttaaaagcagcgaagaaatcatcatcatgccatctattttttttaactacgcagaaaacgttcgttacttctcagaaatgtgtaaatggaatttctcgtttaatggatgacaatggaaatcatttgattggtgcattttgttggttggttttgttaatactttgctgaatctgttagcgttcccccttacacatcaaactgtggtagcaactctgatgggttttgcaagcatgaaacagagggaagggctaccaaatggatctccgtggagcggtggttatcacggggaagagacggcagcatgccgagaaaataacaccgaagcctctttttccagaaaggaaatagattgattattctagttttgaaaatagcacaggctcattggaaaacctccaaactacactgatgggagctgaagggtgcacaccgatcatgacaacagccggcaatgtccccccagtttaaacctggacacgaggccttctagatgtttttctgtgcatagataccttgttttgaaaaacaactaaaacatgcgttgtgtagtctttttttttactagtggcattgtgagcaataaatagattaaattttaaccagcgtacagctcatagattttcccagaaggccacaatcaagcactctttttaaacctaccgaatgtgctctttcttcctcgtagcgtggcattttttggcacttgctttcagtacatactgtgcatagcattcttattttcccttttcatgtcaagtttcctcacttggcataatatccgtgatgatcctcctaatggcataatagtccatcatgcggaggcactgtgctggtttaaaccgcttcccgtcttgggacattcaggtggcttctagtcggttttgtgtttttgttacagcagatcacaccacggtgaatatctgtgtgcatagagctgtttgttcctgtttaattcttggcttaagataaattccccaggatagatatgtgggcttaaaggatacgaatttctatatggctcttactgggcagtattaacttgctctcccagaagaaggggctttatttacaaatcgcaggagcttctgctgcatttagctccctgagtgcccccatagcctggtgaatgtcacacaagccaggcgtgacccccacccaccatcgtccaagtacacagggagcctgttcacttccaagcaagttcacacccatagggtgtgaacccagatcggcccagccccctggtgcactctgctgcaggggcccaagagcagccagacctcctggggcagctgctcctcattcagcctctggggaccaccctgaagccagcacactgcccaaccggaaggtggctttcctctgaaacatgcctggctcactttgccctgctcctatgtgggatacctcgataccaagtgctaaacaaaaacagagtcagacagaaaactcatctgctaacattacatgtaacagggaaagttggaaacattctaaaagtccatcactggggactggattgctaacgtgtgctatggccacaccctggagaaacttggaaaatgaagctaagctctgtggagcaacttgggatgagttcatgatatgttagatgacaaagcaggttgcagcagactgactttggtgcaattccatctttgtttaaaagtacaaaggggctgggcgcagtggctcacgcctgtaatcccaacactttgggaggccaaggcaggtggatcgcttgaagtcaggagttcacgaccagcctggccaacatggtgaaaccccgtctctactaaaagtacaaaaattagtcaggtgtggcagcatgcacctgtaatcccagctactcaggaggctgaagcacgagaattgcttaaacccaggaggcagaggttgcggtgagcaaagattgcgccactgcactccagcctgggcaacagagtgagactctgtctcaaaaataaataaataaataaaaattttaaaaagtacaaaggggcggggtgcagtgactcacacctgtcatcccaatactttgggaggctgaggcagaaggatcgtttgaacctaggagttcaagaccagcctgggtaacatagcaagaccctatctctacaaaaaataaaaattaaaatattgttaaaaggtaaaagcggccacccatgtgtgtccacacttcaaaacattctggaaagatacaccaaactattagaagtgatttccagagtatgggatttagggaaataaatgggtaaagtgaggacttcggttttcatattttggtgtttttttttttactttactcttgtgttgtttagattttttagaatgtttttcttttgaaaacagcttctaaaagagaagatagccctcaacatctgacttttttttcttttttttttgagatggagtttcgctcttgttgcccagactggccaggctggcgtgcagtggcacaatctctgctcactgcaacctccgcctcctgggttcaagcgattctcctgccttagcctcccgagtagctgggactacaggcacacgccaccacgcccagctaatttttgtattattattatttttttaatagagatgaggtttcaccatgttggccaggatggtctcgatctcctgacctcatgatcatcccgcctcgacttcccaaagtgctgggattgcaggcatgagccaccacgcccagccccaacatctgactttctgtgtgttttccaagagtctagtgtgaggtcagaggtcagacaggtcatcagggattttgcttcgagtgagttgctgctgccctgactcctctcccacagcaaataagaccacacggggcttgggggttgggtttgtcgcttgcttttgctgtgctgagggcttcaccagactgaaacagcaggaccacagctcatctctgctccttctctctaggaccaactgcccctgtaagtacagttttttggataaccacaagaagttgactcctcgacgcgatgttcccacttaccccaaggtaagatgagattccggcccagaagaagctgcagctgtgtccccagccccacgcccagccctgtggccctgcggccagaccctgctgtgtgtacgttcacatcaaccgcccctcccagccctgggccgctgacggtgcgggttactttaaggcaaagtattttttctctttgacatttgtttagcaaaagtgatcccagaccataccttcccctgcaaggacataacagctccgtgctgctgtctgcccggccccgggagctgacctgggtagacagtttttacactcaaacgttactggaaagaactttaacgtttaactgaatttttaaaaatccattccattggcccttgtctctgagcaattcttagttgtcctggcaagttttgctcttttgcacaaaagtgttcttagttctaagagaagctgtgacgttggtgaagtagcaatggcatttttgaaataacgacaaaaggagggtctcgagttgccggtcacccgctcaacgccttcagctgggaagcaggcaaaatcccggcccacctgctttttttttttttttttttgagacagtgtttcactcttgttgcccaggctggagtgcaatggcacaatcttggctcactgcaacctctgcctcctgggttcaagcaattctcctacctcagcctcccaagtagggggcattacaggtgcccgtcaccatgcccagttaatttttttgtatttttttagtagagacagggtttcaccatgttggccaggctggtcttgaacttgtgacctcaggtgatccgcctgcctcggcctcccaaagtgctgagccaccgcacccggcccggcccacctgatttgtaatgtgctctcatgctaagattcagggggcacagcttccagagacagcagaggcctgggctaaacacaggtgggctctgccactgcctgcggttcaagtgatggcagagccttccacagcctccatgtaggccactggtgtccattagtccgtgattctatccacgcagttccaaacaatgtcctggatattgtcaggttctgggtggatttggggggtttttgtttttttcttttgatactgagtctcactctgtcacccaggctggagtgcaatggcatgatctcagctcactgcaacctctgcctcttgggttcaagtgattctcctgcctcagcctgagtaggtgggattacaggcacccaccgccatgcccggctaattactgtatttttagtagagacggtgtttcaccgtgttggccaggttggtcttgaactcctgacctcaggtgatccacccacctcagcatcccaaagtgctgggattacaggcgtaagccagcccagcctcatctgagatttttgaatggagactagtgcctttttccattggaaaatatgccccgcgcttctcaggatcctgtcccagggagccgtgaagcacagcctagatccaaaataaaaggtgtcagccctccagatctgtccccttacaaaaaacagaaaaacaaatatccagtaagacctaggagaagacagtgtgcaataccaaagcagtgttcttgtcttctgtatagaaccacagccttctgtccttgtgacagcttaacctaaagcctgatgtcctcagaagcaacccaggggcaccggccccatcagcaggcctgctcttctagctctcggcagaaaccaggaatgggttccagacaggagcatctcagaataacttcttaggtggtatctgaatttatgccaagtgaattttacccccacacttcactttattgccctttttttattattatttttgagatggagtctcactctgtcgcccaggctggtgtgcagtggcacgatcttggctcactgcaacctccccctcctgggttcaagcaattctcccacctcaggctcccaagtagctgggattacaggcacctgccatcatgcctggctaatttttgtatttttgtagagtcgggattccaccatgtttgccaggttggtcttgaactcctgacctcaggtgatccgctcgcctcggcttcccaaagcactgggattacaagcatgagccaccatgcccagctattgtccattttatcatcgggcttgttgaggtctaatttacatgcagtaaagttatttaggcttggagtacagtgaattttgacaaacttgtttagtcctgtgacctccaccacaagcgagatatggaacatttctgtcaccccaaaccctcccctctgctccctcaccctgcctctggcatccaccgatgggatctccacccgtagcattggccctttccagaagtatgtggcctgtgagtctgacgcaggtgccttagaaagagaacgggagaagctgggtgcggtggctcacacctgtaatcccaacacttggggaggccaaggcgggtggatcacctgaggtcaggagttcgagaccagcctggccaacatcgtgaactccccatctctactaaaattacaaaaattagccaggcatggtggcgggcgcctgcagtcccagctactcaggaggctgaggcacgagaatcacttgaacccaggaggcagaggttgccgtgagccaagatcgcaccactgcactccagcgtgggcaagagtgagactctatctcaaaaaaaaaaaaaaaaagaaagaaagaaaaagaaagagaacgggagaaagaggagaaatatctcagcatgcacatcactgtcacaggcccacggcgcctggttaacacggaactcctgtcctttctagtacctgctctctccagagaccatcgaggccctgcggaagccgacctttgacgtctggctttgggagcccaatgaggtaagtgcggggcttgcaggcaccacgtcccagggggaggcagctcaggatcttggacgccagtgggaccacccccatcgctcttcctccttcttgctttttcctcttctttttaaagactgaaaaaaaaaaacaaaacttgttttgccaggttttagttgaaactaactaacactttatagcagggcccaggagacttcacagcaaggggattctgtgagtgggggagacggctgtcaggggcagggaggctccacccagggctcctgatggcgctgggccccccgagccatctgctcatcctgcagaccctcatgcacgccggtggcagccccgtgctgcagaacacccctgccaggagcaaatctctcctcaaggaaggggctgcggtcagagtgctctgctctgagagcagtgtctgcaaaggcaaggcacaggcaaccggctgccccagataagtggacatgtgggattccgggaactgtgtcaccttctgcagcaaggcttgaggccaggaattccacactagcctgagtgatatgatttggctgtgtccccacccaaatctcaccctgaattgtcataatccccacgtgtcaagggcagggccaggtggagatcttgaatcatgggggcagttttccccatactgttctcgtgatagtgagtaagtctcacgagatctgatggttttataaatgggggattgtcttttgcctgccgccatttaagtgactttctccttctctgccattctccatgattgtgaggcctccgcagccatgtggaactgtgagtcccttaagactctttttctttataagttacccagtctcaggtatgtctttattaacagtgtgagaacagactaataagctgggcaacatagcaagacctcgtcgctacaaaaaaaaggtgttaaaattcctatttgctgaaaaatacaagaatggggaattttttgtttcatctcattggctaatagaccccctcttttcacaccccaaaaaatgaaaaagttccctcattgcagacctcggcctcagctgttttcaacgcaccaaaatctaaggacgttttcctgcttgtcagcaacacagaaaatgcacaaggctcctcagcaagctcacctgtgctctttgacaagctcggccgcagcgatgtctctgcaaagggcagaaagtgggctcttgcctcttggcacccctgaggccaggctgctgacacctggggcactgccctctcctaagtgaacctcttttcatgtgcatggtctcccagcaggagaaaaactgcagcaccagccagaaaagcaaagctccagcctccactccccagctcagttcacccaagagcagcaggcggccagtcccaggggctgcactgctgcaaacctgctcaaaacctccagccgccacgtggcaacttgctccccagctctgagagtgcaggaccggggcgcagagacgacagaagaggctttaaatatgcagaatgactgtctaggtcaacgcacaaaaggaaagggccccaggtgtgggagatgcaaggggtgagagggaaagctcagaagagacgtgttggagctgctggcctgcagcagctcccagggtccctgcacagctgctgagattgggcagagcaagtacacagcaagtagacaccgcagacagttagagcacactgactcctgctcccagcctgtgggcaaccgccgcacctcagcatcatgtagaaaaatcaccatccccaaagtcattttgacctcagcctgctgggaggaagagccaagccaggggccactgatggcaaagcacctgcgtggaaactggcactcgctgtcttttctgccaccttctaccagggaaccctttgagcacgggccactgtgactggggaggtggggcttgccccacgaagctgggggatctgtgtctccataatagaaaggccacctctctgtcctctgatcacagagtggattcacagctgctctcggggctggcaggtgggcaaggcagacagctcccggcagctggactcagcctctgggtggcatctcccacggcccgtggctcctgcccagcagatctcaagggcactccaggagaccgatgagggttccagtgcttccaagaagtatctagctgcctgtgtgtgagaatgcagagatgcccaagacaggagccttggcctctggcagatctagggatgccaggaattttggagtgtgagtggcaaagagggacaactaaagggacacacatgaaaacagcccactcggccccacaaaactgcatctggccacgcatgaggcacctggcactcagagaacgtcagggcgcctaaaagtgatcacctccctcccttccagcaggggcgcccccacttttctccgagtggtttggcccagtgtcctgcccatcacaaaccagacagaggacatgacttcaggctgctgtgtcctcccatgtgttagggcctccgagggcccagggctgtggcccgtgagcgtggcctgcctctatcctccgagggcccagggctgtggcccgtgagcgtggcctgcctctatcctccgagggcccagggctgtggcccgtgagcatggcccgcctctatcaagtgcagagctggaaggctgcaggagcctcccccgtcatctcatgagtcccccactcacgaccatgcagcccactcagaccacgacctgccgccacatgcgggaactgctggctccctcgtgcccgcccggggctgaggactgcacgtgcagccacagatgcatccggccctcctgccccacagcctctatgaaggccacataaatggcaccaagtgtctctgtctgccgatcagcatcccctcttggcttcacagcagacgcatctgcctttcaggactgccttgaacaacatctgggctggtcaggtggagagcgaggagtttccaggttgcagcccctatggtcctgagggctggcgtccaggatggtgggggtccagcagctctgggcagcgaggcccctggctgggtgatccaggtggcagctgaccagtggcctgggagccagccctcctgtcctcacgtggggccccatctccaaaagccagtgcagtgccctgcacattatccaacctacatctgtactgtctccccaaggaaaacgagtgtgtggttcacgtgctttaaggacgtttcccaggtgacattccaagctcccatctgtggccgcaagtgggggagtttccagttttccagatagattttctgccatgccagagaaccctccgcctccttcagagccatctcatcaatgcagtgatcgcaagcttcgatttacaaaaactcgcctcccttgcagcatttccaggtttcacacacagcgtaacaagtaaaaatggatttttgggcagcacgcctgtcctagtttgctgaggctgccataacaaagtaccagagactggggtggcgtcagcagcaaaagttgattcctcagttctggagctggaagtccaggatcaaggtgctgccaggttcggcttctccggaggcctcggtccctggtctgggaccttcttgctggggcctcggtccctggtgtgggaccttcttgctgggacctcggtccctggtgtgggaccttcttcctggccagcaagatggccgccttcttgctgggtcctcatgtggcctgttctctcggcacatgcatcccaggtgctcttcctcctctaatgaagacactagtcccatgggaccaaggcctcaccctgactagatggaaacttcattacctccgtaaaggccccgtctccaaatagccccactggggtcggggctttaccatgttgacctggggaagggggcagttcagttcgtaacatgcccttttgggaggagaaagtcaggcaatgagcagacacaggcaggaagccacgccgggctccagcagggatggcccagtgccctgtacaggcagcaggcagctgggctggaggtgggccctgggtggaggacacctaccaggtgtgtctaaactgcccctttcctacacatcttccttcgcactgggctcgccacccaagacctgctttttccagaaagcaaagcctactttggtcaaactctcatttttaaaaatcacttcatcttttcctccctaacttaattagctccaaagcactgagctgtattgaaatagatcaccacaatgacaatcctctttgggactgaaaacaaaatctatttcaacttgaacagggatattgatagaagacagggctccatgaaaaagggttaggaggagccgcttgctggggcaggggccgcatctgggcactgcagttaagatgttaaagtgtcttcggtcccagggggccgcagatgaacacagttcagcgtttctggatgtaaatcgtcaaagctccttcgatccccagcctcgggcaaggaaagggcctttctctctgtgatgccacctgtgctcaggtgtgcactggatggaactgtgtcctagacccctcagctgtgatattgatccgctgagattgtttttcatctgtagaaatcaataaattcctttttggtgcagtgttttgtgaacgggtgcactctctcacccggtcgctgtcctaagaattctccttgacttcggaactggccctccacgccccaggatccacctgccaggagacccccagtgtgctctcaaacccccacccatctgagtggcctggaaaggctggtctgaagacctctcttcccatgtctgccgaccaggctttgctctccagggactttctgggagggggagaacccacctcctgccaacggccctgctggcactccgaggacagcagagggaaggaagccaggggctggggagccggccacacaactgcccagtgcctatccttctcctgtgcccacagatgctgagctgcctggagcacatgtaccacgacctcgggctggtcagggacttcagcatcaaccctgtcaccctcaggaggtggctggtgagtgccaaacccgccttcggttcttcctgggcacgtggtttcatccagttccacaggaatggagggaatggatcaccagggcaccttccggatggcactgcgctccctgtgagcagaggtgacatttccccgggagttctgtgaggacactcagcctgtctctgttcctccttccaccaaaaccttctttacgcccgagctactcctgctctgataagcaaggagtagcttatcagtgagactctgccatcatcaagcaaagcagcatgtcctaaagcagcggtgtgtgggagcgtgtgtgtgtgtgtgggagcgtgtgtgtgtgtgagagtgagtatgggggtgtggatgtgagtgtgtgtgagtgtggggtgtggatgtgagcatgggggtgtctgcatgtgtttgtgagtgggtgtgtggatgtaaatgtgtgggagcgtgtgtgtgtgtgagtgtggggtgtgggtgtgagcatgggggtatctgagtttacgggtgggtgtgtgtgaatgtgtggtgggagtgtgtggggtgggagtaggagtgtggaggtgtgtctgtgtgtgtcagtgtggatgtgtgcatgtgtatatctggatgtggggtgtgtctgtgtgtgggtgtgtgtgagggtgtgtgtgcatgtgtgtatctgtggatgtgaggtgtgtgtgcatgtgtgtatctggatgtgggggtgtgtgagggtggatgtgtgcatgtgtgtgtgtggatgtggggtgtgtgagtgtgtggtgtgtgagtgggtgtgtgcatgtgggtgtctgcctgtgtgaatatgtttggcagcaggtttttttaatgaaatattgctcagaaccaaatattaaaagcctattaaaggtttcatggtgactggggacccagagctccctcttggagtctcccctccccccatcccctaactttatgccccactgtggctcctcagacacctccggggagaccccagtccttgactgcagggtgaaacccctggtgggagctctgtccccacacctgccccgggtgccgtggtgtggcccgctggacgttctcagggtccctgtgtcacctcattggtacctgtggtaaacctggaacactgttgacctctggttgggatgagggtttggcagagaatgttcaaaccagcgcacagccttctgggtggctttgggaggagaggtgggcgggcccaggcacagggtgactcggaccccctgcctcccgcagttctgcgtccacgacaactacagaaacaaccccttccacaacttccggcactgcttctgcgtggcccagatgatgtacagcatggtctggctctgcagtctccaggtgggtcctgcccgctgcacacccagacctctactctcgggggtcagacggaggcccccttccagggagcggcagccccatcccaccaagagagccacaggcgtggggtccccagccgctccgcccctcctagggacgcacccctgcccaccgttgtcagtcaccccatgggcgaggctgctcctaggattacgagagcaggtgagtccccgacctggtcacccccccaacccccacaggcaggccgatcctctcccaccatgccaggagatgccagatggctgcaggggcctttgtcccccgcttaccactcacccaattccaccccccctcaccccatcccaccctccgagtgaagagagcaaacacctacgccctgttttccaatccaggagaagttctcacaaacggatatcctgatcctaatgacagcggccatctgccacgatctggaccatcccggctacaacaacacgtatgtacaggattttctctttttttccttttaaaaggcaccctggctactggagggaacctgtcagcccaaccctcagagcagttcccagatggagctgtcaacgacggcctcccagcccccaactctgcctccactgacacagctcctggcttctggactttgcccagggccttgggtctccccggagtaggaactttcaggattatcaaaccccaggggctctttcccactcctgtgcgggcctggcttcaggctcaggtgcacggcagatccctggccccgccggcgccttctccaccccaggcagggagcaacacctgtccgcatgcagggatgggggctccacacccccctctcaggagctcgcctctccctgggcaggctcccagctggcttccgcagggaaagcacaggcaggagccagaagagagcagaagagggggagaagagggactgcagagggacaggaggtgggagtgaggtgtccctcgtggggccagggatcagaaggacagaccgttgctccactcctgcctccacaggcacagagttccgccccatgtggcggacaaggtccaggccatgggcttgggtctgtgtcctcagtggcgcagcagctctctctgttgaactgtgtgtttgtgtgatgtcatcacatgcctgagagctctgctgccatgtgtcagcgcctagtgggttccgaggtgtggctgtcagcgctcctcccggggccatcaccatgcacacccatctgttccccttttgctcatttcacactcacagtggccggcacagcacaggtcagcagaggccttgaccacagcatcccagtgaacctcagcctcgttctgcccacctgcctctggcacctggtgacgtttgataatttcacaagaggccgtgatgcctcagggcctgtcccagggagcatgccgcttcctcagaggtgtctgtctggtgggactgcaggagcatggggacgtgcagttgcaggggcagctgagcggcaggagggacctcctggccaggccagggcacaggcagctcccccagcccccacggcaccttctcctgactctacttgctccacttacatggctgggtgttgctcccccgtgcaggtacctggtgagggcgcctgagtctcccctcactctctccttgcctcccaggtaccagatcaatgcccgcacagagctggcggtccgctacaatgacatctcaccgctggagaaccaccactgcgccgtggccttccagatcctcgccgagcctgagtgcaacatcttctccaacatcccacctgatgggttcaagcagatccgacaggtgtgtggggtgagggccctcccaccggagtgggggcacattcagggacagagcagcccccactctccattggctggaagctcccagaagctcctggccacagcagtgccctggggacccaagggaacccctccctccttcctcacctcctccagggcccagagtggagccccaaaaagagggtaccctcgccatgcgcacgtgcatcccactgacctgcacttcccagcctgtatttaattcagccttcactggctccctttgagataaatcctttgtccctcttccagcccaagaaactgaggcttagcaaaggtagggagcctgcccaaggaggggacaggccctggacagacacatctgctgcatccaacataggagagctgccccctgccccataaccccagctgctgtcacctgccacccacagcccagtcagcccccttccttttatttatttttttttcttttgagacagagtctcgctctgttgcccaggctggagtgtaatggcaggatctcggctcactgcaacctccacctcctgggttcaagcaattctcctgcctcagcctcccaaatagctgggattacaggcatgcgccaccaagccggctaattttcggtatttttaatagagacggggtttcatcatgttggccaggctggtcttgaactccagacctcaggtgatccacctgcctcgacctcccaaagtgctgggattacaggtgtgagccaccacgcccggccaccccttccattttagataagggggctttatgcctctcagggcgtgatgggaggagagtgagaggatatctgcgtgagaggaagatgacctggtccacctgccccagacaaacacctccagctcaccgaaataacgccccattccacacgggaattcctcatcaaaccctcactctctgacatttgcaggggagggaagctctcggagtaaaccctgggagaaatgtgttgggttgaatagcagcgtccttcaaacaaggtccacctcccgtgaatgtgatcttatttggaaaagggtctttgcatttgtacttgttaagatttccagataagatcagtgtggattgtctaagggggccgtaaatccaaagactagtgtccttggacgaggagacagagtagaaaacagcccagacacagaggagaaggccgcatgaagacgcagtgattggagatttgagtgatgcagccccaaactaagggacttcggggcccccaggagcaggaggagacaaggaaggaccctcccctggagtcttctttgagagcagggccctgcccacactttgatcttggttctggcttccagaactgtgagagaatgagtttgttgttttaagccgcctagtttgtggtactttgtgtggcggccccaggacactcacccagggcaccgtcttctgcggttccacaaggcagacctcagccattcgaagtctaagtggcttccttccagaggcagcaagaaagactgcctggacttcagcactgggaagatactcaccaccctccaggcgtgctgctgagcctccctttatcagagagcagcagcctcttctaccatggctttccaatttgtctacgcttccaggaagttcaaagcccagtgtaaaaaactgaagtcagtgaagcatttggggaagctccgaggaagcagcatgctccctgggacggggccctgaggcatcacggcctcttgcgaaattgtcaaatgccaccatgtgccagaggcagaggtgggcagaaccaggctgtggttcattgggatgctgtggtcaaggcctctgctggcctgtgctgtgccagccactgtgagtgtgaaatgagcaggagaacagatgggtgtgcatggtgatggccccgggaggagcgccgacagccgcacctcagaacccactcggcgctgacatacggcggcagcgctctcgggcctgtgatgacatcattgcacaaacatacacaattcaatagacaatttacagtcattattgaatcactggttcccagtacagttatctcccctttatctataggctctctggcctctcctccatgtttgtgcccctccccaccctgcaagcaggtgccctgtgtggctacgataagctgtggcaaatcttcgtctgcagtaggtcaaggagcaaccgtgaagagagaacgctgcatctgccactgctaccccagtggggagctcctccagggacaggacctggggaatcaaagcaagtgaacgccccttagtgtaggcctcgtcccactgagccatgtcggagagcatcccgcaagagaaggaggcggcacctgattggaggagcagccgctctgcacaggggatcgttctcgtgcccatccaccgtggggacacaccagcattggcctgcttcaaatgcttcactgactgcaaaatatgactctcctctgggggtaaaattagttgtcccacttttttaaaaatatattttgtcatggaagatttcaggaataactgaataaatgcttcactaataacacaattaaatgtttacaggaaaattgaataattcaagatacaagtgatccccccaaaaaaatatatatatatacagttgaaatgacctagattgatgggtttgggttttgtatctgatgcttgttgttttattttcttggaagaggaaaacatcatacctggcacagagatgtgttctgtaaatgcttgtggggtgggtgggtggatggatggatggatggatggatggatggatggatgggtggatgggtggatggacaaatggatggaagggtggatggatggatgggtggatgggtggatgaatggacagatggataaatgggtggaaggatggatggataaatggatggaagggcagatggatgggtggatgggtagatggatggaggatgaatgggtggatggatggatgaatggatgggtttttgggtgggcagatggatgtgtggacaaatggatgggtgatggatgcacatatgaatcggaataagagatacatgaaataatgtgtgcagggggctcagtacacagtaggcctccgctgaataattgttcagactatacccgtgttaacacgttgttctctcgctatttagggaatgatcacattaatcttggccactgacatggcaagacatgcagaaattatggattctttcaaagagaaaatggagaattttgactacagcaacgaggagcacatgaccctggtgagtggcttattctgcctgggtgggcagccaggcggtgggctggcgaagcaggtcatccatccagctcacactggaagccaagaagctgaaattattagtcttcttggaacaaggtgtctataaatctggttttcaaggtcatgactcttactaggaaagtccgggcagggcctccctcctgatgggtcctccttcatggtcagaggcagcattctcccattcctccatctcttttggatttgaaggagataagtgggtgaaggccgtgcatctcgctctgctttccagagaataaaaccagctctcccatgaaggcacagccccagcatggcactctgaaagcccacctatgtgggggcaactccaacacagctcccgctccccaagccagcatcccccaccaggcccacaccatagcccagcacccctccataaccaggacaaggtggccagagaaggggtagggggcctcccccatgagaaggtgcacttaggttgcccagcatctgccttttggaaaggacaggcactgggcacaccaaggcacacaaggaccagagcacgactcatgcctggaatccagcactttgggaggccacggcaggaggattgcttgagtccaaaagtttgagaccagtctgagcaatattagcaagactccatctccacaaaaaaagaaagaaaaataaaaaaatcagtgcatatctgtggtcccaactgcttgggaggcagaggtgggaggatcgctggagcccaggtccaggctgcagtgagccatggtcgttccactgcactccagcctgggcaacagagcaagggtctgtctcagataacagagagagagagaggtgcatgagaactgccctcccggccttcagagagaaagctggttttgtggagccttgtctaagcatcaggtgcacccctggcattcttactctgaaatttgattatctgtttaaaatcaatagcatcactttccacctccagagaggttgaaagatagggaactctcggctcaggctgaccttctaaccatccagtcccagtaggtagagtcattaggactcatcgctctctggagctgaggtgcagttaattcccaaagactgtgcgagaggatgggagctcccgcaggcaagggctggacagcaggcaaacctccccaggccagggccaccagaagccccttccctaagagggaaacagtcacatagagcggcttcctggcaagcaagtttcttgctcctgaaaaaccaagggaaggagggaggcgccgccttgtcctctaagatatgaggaaggcagagatggacctgcagtcaggggtgacccaggccccgccgatgccttcctcctctgaggtgggaggagaggtcagggaagagacggggaggggcaggatgccagaggatcgggtgccaggtggtcaggacaagtgaacccagctgaaggtccccactcccaccccacccccagccttacacactgcagctgtgcagaccagaggcaaagcgaggctcagagcccagggttccgtttatcccaacgacctgcaccgcggggtcagatgacaagcagcacggccaggcatcgtctcactgctacggagccccagacggggctttatgaacacgggtggaggacagaggttggggtaaggtctcgggggaaaggttctgattcaaaatgggccccaatagggaggcctctgaggatagtgcgggccagcgtgggaggtgtgaggtgcagggagtgtggccggcagggcctgggaccttgaccttccccagagacactgctgccctggccctgccctaggtctggtgtcgggacagctccactgaggccggccaggcacaggctagtcattgcctctgatctggagccggactccacagaggagtcaaagaaaggcctgaatggcttcctgggaactgatagggcagggaaaggaagggcgaccacagcaggatcccttcgaggtcctgccgaggttggaaggcaggatccaccaagcatcatgcagactccgagctgaactgagctgctcctcacctagtcacgttccccaaaccagcaggtgcagcccgcagcccgggggcatgtgcctcagctgggctttcctgtctaatcagcttcagagcctggatggcaaccaacactttggtctggaaacctggtgattccagacactcatttgtgcccggtgcaggcagggccacgggacgccagccctccacctcttgtcctatggcgacatccgggctagtttgggtggaagctgctgcattcctgggcctgccctatctcctcctgaagctcctatggcatgcccaaccctggccaagctgagacagagctacctgtcccctgggaagatgagcaatgcacccacctagggaacagcagaaaatagggggtgaccaggcacagggcagtgcttcaggggatatcacctgggctggggtggccagaaaggctggaaggaggggacccaaacaggaccttgaaggttcattctccattgagaagggagcctgtcctccctgaaggcagccaagctcagttgcatggtccagcaggtcctccgtctcttcctgcctgtaatggcaagtccagacccgagcagcagcagcaggcccgtgttctacctcctgttacctcaattccaaaatctcttctttcagctgaagatgattttgataaaatgctgtgatatctctaacgaggtccgtccaatggaagtcgcagagccttgggtggactgtttattagaggaatattttatgcaggtaagagtcttgcagagcaatcaagcctccagccactcttattagccccacttagtaagggtttgcgttaaacgagcacgcctgggtggtcccgcatattccccgggctgccgacagttcagcctccagaaagccttcagggtaagcgtacatcagaaacaaaataggttataatttgagacctgaaagacagtaacaatccagaaaagctaatactctaaaactgtcacctgtcactgctaattgagccattattacaagcagccttgtcaaacaaattgcctgaaagtcaagaagcaaggactgcagaagcaggagggggcccaggagggccgagacccagcaggtcagctcacacagatggccacggggaaggtcggggacatagaaaaccaagccagctgaaaacaaccaccaaatattaatacaacagcttgatgaaccctaggagaagtcgggaggctttctgcaggacgctgctgccgtcctgggatacatccatccaactcacctctgcctatctctcaggtcggtcttcccagctagacctgcacgcccagctctgtttagcactgaagatagggtcaccttctccttgttcttactgagacacatttgtggtgtggtttggttggttggtggttaactggcgcatcttgtctttctctgagaacagcgatctggttatggggcatttctgtctctaatgtcactgtctgctgcattccctgcagagcgaccgtgagaagtcagaaggccttcctgtggcaccgttcatggaccgagacaaagtgaccaaggccacagcccagattgggttcatcaagtttgtcctgatcccaatgtttgaaacagtgaccaaggtgagtaactgtcaccacatgtcacacttgcttacactcagatacatgcatgcacacacaggcacacacacatatacacatatgcacacaggtacacacagacacacactcatgcacacacgtacacagatacacacagacgcacatacaggcacatacacatatacacacacgcacacagctacacacaggcacacacacaggcacacacttgtgcacacaggtacacaggcacacaaatgcacacacacggcacacacaggcacacactcgtgcacacacatgtacacaggcacacacaggcacacaaatgtgcatgcaggtacacatgcacacaaggcacgcaggtacacatgcacacaaggcacacaggcacacacaggcacacaaatgcacacacaggcacacacacacacacacatgcacacaggtacacacaggcacacaaatgcacatgcaggtacacatgcacacacaggcacacacagggacacacaggcacacataggcacacaaatgcacacacaggcacacacatacacacatgcacacaggtacacgcaggcacacacgtacagaggcacacacatgcacacacaggtatgcacatgcacgcacacaggtacacacaggcacacctgcacacctgcacatcctgagcagcctcttccccggctgtcgtggtgaccgctgtccctgttccatccagagcctgctccccacagcctggcccgtgaccccagcatctcccactctgtgctgcactccctgccttgccttgctgggccctggggggcccctcactgccctcacccatcgctgccggccttcaggaccctggaggcagcactggctgtggactctcctgtccccactctgcgtcccagttcctcacctgtggaggaacccctgagctctgtgccctcgagctgtgaagcccctgtccagctcccagtctcaccgcacccagccaccgagaccttgctccttgcacacagctcgttcctgcccagctccccccagggcctctgagctgcctgtggccccctgccaaggcccccacctcaaggcacccccagcatgtccaaaacaggcccatctcttgttccccccggggatctgggctcacagcctcacaccctccgaccttcctgggctcctacgctgcgcatccttctgctctagggcatctcttggagccaacccacccacttcccactcccaggaccctcagccgggaggctgtcagctcctttcccctgccccgtgtctttgtaagaacctcccaacctgtcccccaccctcatctcacgggcacgggggacacaggaggcaggaaggggactttctgtaggacctcatggagggtgatgagggccagagacagagccgcagtgggtggaggcagcagagccggcacgagggtgtccaggagctgggactggcccagaggtttccgcacggagcacctgacacctgtttttctccgacgtttcccattgccttaagaacgagggactctgaataaatccgtgtgtctctcccagctcttccccatggttgaggagatcatgctgcagccactttgggaatcccgagatcgctacgaggagctgaagcggatagatgacgccatgaaagaggtaaaacacactgagaagagcctgccttccttgcggcaagcaggcacgctgccctccgcactcccgactccagaagcttggacgtgccaagcagggcaccactgaaggccccgtggacaggcacacgtgtaccttccatcagaaagcctggctcagtaaaattagggaatgcgatgagggaaaccaaaactgcattcgccaagaacacgtcaggtctcagtaccttcgagggagtttactggccgtgcccttcacaagaatcacaactgtcacccacacctgtggacacccaggtgtctttgggtgtatcagccgccgttagagcatctgggacccctcagagtacagtgcctggcctggccccagggctgacttgttcagaggaggccatggggtagaaaggggccctcccctggcacggggacaaagcgaccacccacctgccagctcccgggcccagaacacacaccggcacctctcaggggccagggagcctggggctggctttaggttgctgctggatagatatcattttggaggaaggggtccaggtcacagcctcagggcccacgcagtctttctacggattccccacggctgtctgctgtcctgctgcccatggtgtggcctctgcccctcccagcctcctgcctcctccctccagcgcccccaggcagctagaacagtcttactactcctgcagggtttgacccctcctggccttggccggtgttgcctctgccacccccgctccccacagtgccactgaagcaccctccaaggcccgtcagtcagggctcccctagttactgtgcccaccaccccgtcttttctgcctgggcgctcctgaagcccatgtggcccacaatgcccttttgagcactgagccattttccaggcgtagccttgggttggtctcatctccctcgactgacggccccgtgctccccatgcccacacccgcctggagcgccatgccaggcacatggtaggcgctcagcaattgcttaggagtccactgaaaatccagaccagctgccctgacttctccagttgatgtctcctactggaaagtcacagaaaggtctctaaacctctggaaggctgagagcacttatgcagagggacagatgtagcaagaaggcttcccccactccacaaccccgcaagagagctgaaggggcttctgcctctctcgtgggccctccgagagccatagccctgatggccttgagtctctagtcctgagccctgctgcccagtaggggatagtagggttccttaaggcctctgccttcccccctgtcagcccccacaaaaaggagagacacgccaaagaggtgaaaaggccaagcccaagccgcaggctctgcacacaccaccagtccccgcggctgtggtggctgcagctgggtgagctcactgtccaggccccagatgaggcaccaagggtagcgggacagggtatgcagagctgcctctgaaaagcccatgtcaggagtgcttgggctcagaggggctggggaccacaggctttcacgttgcagcacctccaggcaacagaagctgctgggagagaggcagacactcccctgctgtctcctgctccctgacttggccttctctgtactctgttccagttacagaagaagactgacagcttgacgtctggggccaccgagaagtccagagagagaagcagagatgtgaaaaacagtgaaggtaatgcttgctctgctgaagtggcatctcagcgcatacaatgattctgacaaaggacagaaggaaagaggaaggggagaaaatctgaattttggaatacctttaaatgaatggaactttttttttttttgaaactaagtctcgctcttgttgcccaggttggagtgcgatggcacgatctcagctcactacaacctctgtctcctgagttcaagtgattctcctgcctcagccccctaagtagctgggattacaggcatgagccaccatgcctggctagtttttctatttttagtagagatggggtttcaccatgttggccaggctggtcttgaactcctgacctcaggtgatccacccacctcggcctcccaaagtgctgggattacaggtgtgagattgcgcctgaccaaatgaatggaaattttatttcttgcaactaatcattagaattaggctcttaaggctggtggctcatgcctgcaatcccagcactttgggaggccaaggtgggcggatcacttgaggtcaggagttcaagacccagcttggccaacatggtgaaaccctgtctctactaaaaatacaaaaattagccaggtgttgtggcgtgcacctgtagtcccagctacttgggaggctgaggcaggagagtcacttgaacctgggaggtggaggttgcagtgagcccacattgcgccactgccctccagcctggagaacagtgagactccatctcaaaaaaaaaaaaaaaaaaaagtgaggctcttaaagaaggggaacatgctttagttaatagaaaaacatcaataattagcatatgtatcacttataagagtaagtactttttaaaagtgcaattgaagtactgaaaacttttcacaaatcacgtgtttgctttatatggctttgagcattttcctctgtacttgttgatactagtcattcagctcacggggaatgcagagcagccgtttgttcacctcataataaggtcacactaatggccaggcacggtggctcacgcctgtaatccaagcactttgggaggccaaggcggcggatcacgaggagatcgagaccatcctggctaacacggtgaaaccccgtctctactttaaacacaaaaaattagccgggcgtggtggcgggtgcctgtagtcccagctacttgagaggctgaggcaggagaatggagtgaacccaggaggcggagattgccgtgagccaagatcgcgccactgcactccagcctgggcaacagagcgagacttcgtctcaaaaaataaaaataaataaataagccgggcgcagtggctcatgcctgtagtcccagcactttgggaggccaaggtggacggatcacaaggtcaggagatcgagaccatcctggctaacacggtgaaacccttctctactaaaaatacaaaaaaaattagccgggcgtggtggtgggtgcctgtattcccagctactcgggaggctgaggcggagcttgcagtgagccaagatcgtgccactgcactccagcctgggtgacagagcgagactctgtctcaaaaaaaatataaataaataagtaaataataaataaggtcagactccatctcaaaaaaatataaataaataaataaacaataaataaggtcacactctccatgtctaacagataattcaagagatagtgcatcaagcatgcaaggctcagggcaggacaaacgggacatggctcataagaggagctgcaacaggctttggcatccaacacacctggttttgagtccaggcttgccaattacaagccgagagatgtgcacaagtgtcccagcctctctgaacctcagagccccagtctctaagccagaggcaataataccattgttactgctgttttagtgattaaacagtcaaagtgcttgtctggtcccgatgaagtgctcagtcaatgttgccatttaatttttaagtcagttcatatttttcagtgggtcagaaaagagatcaatattgttttactttgtctaaatgtgttcagcaatatatctgatggcctctttcttttaaaatggtctgtgtgtcggccgggcacggtggttcacacctgtaatcccagaactttgggaggctgaggtgggcagatcacttgaggtcaggagttctaaaccagcctggccaacatggtgaaaccccatctctactaaaaacacaaaaattagccagctgtagtggcgtgcacctgtaatcccagctacttgggagccagaggcaggagaattgcttgaacccaggaggcggaggttgcagtgagccgagatcacgccactgcaccccaacctgggcaacagagcaagactccatctcaaaaaaaaaaaaaaaagtctgtgtataatcctgtaacgtttctgcgactgctggcacttttttttttccttcttttgtgagacggagtctcgctctgttgcccaggctggagtgcagtggtgcaatctcggctcactgcaatctccacctcccgggttcaagcaattctcctgtctcagcctcccgagtagctgggattacaggtgtgtgccaccacgcctggctaatttttctatttttagtagagacagggtttcaccatgttggtcagcctggtctcgaactcctgacctcgtgatccacccaccttggtctctcaaagtgctgggattaaaggtgtgagccaccgcgccctaattctaacaaaaacaaatcagtcatcgtttcccttcttccaggagactgtgcctgaggaaagcggggggcgtggctgcagttctggacgggctggccgagctgcgcgggatccttgtgcagggaagagctgccctgggcacctggcaccacaagaccatgttttctaagaaccattttgttcactgatacaaaaaaaaaaaaaggaattcatgatgctgtacagaattttatttttaaactgtcttttaaataatatattcttatacggaaatgggtactgta

SEQ ID NO: 14 - DNA, 132902 bp, Homo sapiens
cgggcttcccctccccggtccgcgggtgcccggcgcgggcccaggaggcggaggcggctcctggggagagggatccgggagtccctgaggcggccccggctccgcactaggaggcggggtccgcagtatcgccagcggccggcgcggcttcccggagccccggagcccgaggcgcgaggtttaggctgagccctccccggcgcctgcccccgcccggcgcccgcctccgcccccgcccgcggcctggagcgcgcctccctcgcctcccagggtctggcgagccggcgccggccgagctgcgggagccgcggagagcaccagctgacgccgcgggagctgctccggccgcaccatgcgggagctggccattgagatcggggtgcgagccctgctcttcggagtcttcgtgtaagtagtggcgcaccgcgggcagggcgcactgacgcgggggaacaaccgaccaagcctctctgtgccctaacttagtttgcgcagccgcttcccactggggcctgggttcgaggtcccttccccgccaagtgcccgcaacgtgtcctacgggaccaagagagacccttcctctctccttcctgggaccctaggcgcggagcgaccaccgcgcgccgaggctgagacctgctcccgggtctcaccgggcccgcgcctgtcgccagccccgcaccacctgcccgggggatccagggctgcacctctaaacagggacgcgcaccctggcccgtgccctcgggaagtttctccttctgtgtgatctttgaggcccacgttggaagtctttacccctggccccgtctccgattcctccccgctgtgcccagggccagactccttccgtgtccctggctttagcgcccgcggtcctggcgagcgttttcccagcgggcgtttgcggcgcttctcctactgagaaactgttgctgtggaggcttgagaagtcaaggggctgcaggccggggtgggatacacacaccctggagctctgtgcccggtcgatgtccgctttgggggcggaggccctccaggggtagccgtgaaatgcccagggtggctttgagcggctggcactgagaacagcgatcccgaaaagaagaaggggtggtggcgcaggttctttcagagatgcctgagcctcctccgtgcgcccagggacccaccgctcattgacttccagggcccaagctgcagggagctgtcacatctctctttcagacctgagcccagaacaccagctcagagccaccccgcagcctcccgtgagctgctgtcacctaggcacccacacctgcactggtccctccatcagtgagccaaattctctccccctctctgcccatggatgttttctgccacattctaagtattaaagttacatgaactttttggatttgccatgcatttatttatttgtttgtttttgttttcgtttctggaaaagccctcccgagccaaacaggaggccctctttgaatttctgcctcaatctggagtcatccatggcaggtgtgctgtgtcaaagatgacttctgttctgggcagcccaggggatacacatggaaagaaatgccctttcttgcatgtttttctttagcagggattaaattcatccagagtatttattcacaccatcagaaaaggccatgagctcccccagatgcaagcaagcccccctctcccgccttctgcccgaacactggtgttattcactgggaagaaggaacgagaacttcagttggattttgatgcatttggaaaaacaaaacactcttcccttctcctactctattttctacctttggaatgtacgttaaaactaatgattgctgtgtgatcagatggggacagtttctaattggcagatgggctaaaacctcattaaattattatgtgatagaaatgataaactagttttcagtgcacagtagaatttaacatttgttgggtgaatgtaggaagaatgctgagataaagtgagataggctcttacactatctcactatctggtttgactgctgctgggggtgctcagataaaaaagggtccaacaatatgtaaaaatatttatagttttcaggtgtcccttccaatatcccccccaaatatttatgagatgtttacagatatacaatggtctatgcagtaaatttgaaaacttggtaattattgcttatgcgcgtcttgctttttctaagggtgtcatgtaaaagctggacaggcagtttatgttctgttctctgaagttccctcttgtgttacttaataggggatctgttgtcacacatggacattgatagcatttttggatgactcccaggtttcttatcaagttgttaacagtgtgtccaacttgtggctcttttacctgcaaaaaccagctttggtattgatgcgagcctccctagggggcagatcttggatgttcagatgctgttagtatcaggcatgtaccgacttctgggaggacggctgggagcatgcagaaacagatgaccctttgttttctcagataagcgtctggcaccttgacagaggctgacttttgggggaagtttaattcttccttttgccagtactggaaatgatggcaatattgggttgtacctacctctgctcacgaagatggtggtcttagcagcacaggggtttagaaagtgcccctgggcaggctgaatccgatttccctgcttcagccagtgtagctcagcagctagttttgcttggtatttctaccctattgctcaggatgaaagaattatctgcggggagagggggtatcttgcttctttgcaaacttatgcccccggagaaacatcacctgtagatgtgcctgttctctgactacatttgctctgcatgagagcagggatcctgttacccgtagcccatatgctcctcaaagattccaagtgagagctaagaaaatgcattttgggcccacgggtagtagggatgcaagcttttccttactgactcttaaagatccctttttctgtttctagactaggcacagtgctgaggttttgtgcattcagaattctgagaggttgctctccaggcacccccgctcccgcaaccaacccgtagatgctcagtcctgcctaaggacttcaaatcgctgggaaggaaattagtagagtaatgcaaatcaaggctggcatataaagtttaacataacagaagataaattggttacaggaacccagtgtttaggaaaaataaaagtaaaatgtgaagctttgaggctgtgtttagtaccatgaagtgtgtaggccttgaggtcctattgctcttactcatggattgtgggcagagcaggaaggagaagcacttttgggcttcttctgtcctgctgctacccaagactccaggagagattcttttgagtatttctgcaaatgccaaggctagcaacagaccttactcagcaagcacatagtgtagaaatgagatggctggttaacacccagcagaccaatggtgcactactagaagcatgctactcactttgaccactatcaccagtacaatagcaatcatttactgagatcttactgtgtgtcaggcaccaatgaagactatcccgtatgccatttagcctgatgaagggggtatattgatatttctttgtcatagatgaagaaactgaagcacagtaaaattaaggaacttcccaagtaacagggctaacaagggcagctctgagatctaaatctagatgctccatctgcaaggtctggactctcaatcactttgcttcataaaaaatagcagccagttttggtcagtccagggctaacttcatgcaaaaggtattccatgtgatttctcttttaagcctcatctcactggattctgttcattattcccactttacaaacaaagaaaccaaggtttagaaaggttgagtaagttgcctgaagtcactcagctagcaggaggtataaccctgattcaaacaggcagctgaccccatgtccctgagtggtcagcctctgagacagaagacatccagccccaggcttccagactggtgctaaactgaccacatcctgtgagcaattccttccatgactccttatctccagaagagcaagtacacattgcctggagtgatgtgtgggaagctgtcactgtagctctaaaatctcatgctaggatgacacctcaaaggtggagggatggcagcagtggttcacacttcctaaaagatgggatttgatcatggcatagattttaagagtacgatgtggtgagtaaattgccggtgagaacatcaattgtagtagtaagaaactaggaatacactgctttcttccaccgtttttggctgtcatctcccaggacatctgttagttcaagcactctgtatttacaagattgcagaaaggaccctagaaagatgatgacgatctcatgtgctggacggggggaaagatggtctgtctgtttcacttgtaggcttgagttccttggcgtcttatcttcctctttccttccttccatctgcccttctccctatccctccctgtcatttctggtggctctctgtctgcagggtccccctaggagctgcttaggatgccagggtgcacaggtaatggtgtttacctccccttagataatccagcatccttctttgagctcttaggatgcaagaggcctttgccaggcacaggggatgagaggagagaaggccaggtggcccccagtaccttacagtccagtagggaaagtacacagtgggccaccatttgttattgtctccaatgcaattactggctttgaaaattttgcctccaaacatttctctttcattgttcatccacttgatggatatttggcaccttctaggtgcaagcatttgtgatagtcatttccttttcccttcattggtacgctttgattggtgtaattccagcaagacagagggaaacttggtgctttacctggtccaggtgacttgcttgagggcactggatgtcaggtagatttttgaaatatcgacaaaaacagactcatctttactacctctaagagcccagtgtaagactccatgctggggacagttggagcaaggtgctaggtttcactgagaaggaggatgcatgtgccagggaaggctgcccagggctgagcaccgaatgccaggtgtacaggtcctaggcccaaggacattcctgcagggcaaaggcctggaggtgtggaggcatattttgggtggagatgaggtcaccaagtgtggcctcagtgtgggctttggggtgggtgggtgtgggagtggcaggaagggagcctggaaggagaacgcaagtggcctcagggccctgcagggcaggggtcattcccacagaggcaaaactgggggggcctggaggtttgaaacaaaactgtaccatgctcagatgtttgcccaggggtggaaaggaaccatttggccagacacacaggccctgcagactgtgatgtgtgactgcacactgcttcgtggccgcagccctgcttcacagctccccaggacaagtactgtctgcactgcgttgtggtcagccatctgcatctttaacttctttgctttcccctgctcccagcctagccttggcacaagcatggtcggtgcctcctgactcagtttcccaggatcatttttacagacctaagcattctgcatcagtccaaagcaaagctactgaaggggcggacggcctgctgaacacctgcgtcaggattacacggggcccaggtcaggctaactgaattaaaatagagatcgaggcccgcagaatctgcattttgaacaggggctccttccatccgctgcctttgggaaatacttatgtgcagtctagcgaatggatggcagcaccgcagggtggaggcagcaggcggtggccctgtagaaccctgtcactagagtggcctttgtaagagggagggggactttttgtgttaagtgaagttttggggttgattggctactctaccatcagtcctttctatgtaatgaatacattcagaatcattctgcttgctctctagaaacaagtttctttcttttttttttttttttttttttgagacggagtctcactctgtcacccagcctggaatgagtgcaatggtgcgatctcggctcactgcaagctccgcctcctgggttcatgccattctcctgcctcagcctcccagtagctgggactacaggtgcccgccaccacgcctggctaattttttgtatttttagtagagacgtagtttcaccatgttagccaggatggtctcgatctcctgacctcgtgatctgcccaccttggcctcccaaagtgctgggattacaggcgtgagccaccgtgcccggcctagaaacaagtttcaaatgagttgtttgaagcaaagagctataacaaaagacctcgggctttggagccagacaggtctgtgtttgggtttcagctctgccactaactaacaattgccttcaatctctgaacctcagtttcttcatgtaggaaatggagctaatacttacttcactggattttattagataagattagataaggtactttaagtgcctgtggtacatataacaaaaattggtaacttctcgccacccttgttaatccctattgcatacatgtagtgtctaagaatggcagcacagcacagtggttacaactgtggcctttggcgtcaggttaccagggcttaaatcctattttgttttgttttattttgaagacagagtctctctctgttgcccaggctggagtgcagtggcacaaccatagctattctcctcagctccagccatctccttgggccctgctcttacaggccccagaggattctttttttttgtatatatagatagagtcttgctctgtcgcccaggctggagtgcagtggcatgatcaccacttactgcagcctcaacctcccaggctcaagcaatcctcccacctcagcctctcgagtagctgggacaataggtgtgccatcgcagccagctattttattttttgaagagatggggtctacattgcctatgctggtcttgaactgctgggctcacaagatcctcccactttggcctcccagagtgctgggattataggtgtgaaccattgtgcctaaccaaatcctggtttgcaacttacctgctgtgtgagttttgggagaaagtatttatccatcttcagtcattgttcctccttctgttcaatgggaatgtccgtcatattcatgaatgtaagaatatgttaaaaacatattgtattgaagtataagtttgaaccatattaagcatattttgttgaagtattgtgagtattaaatgggacagtatccagctcattgtaggtgctcagcaaatggtgatgttattattattatccttttgttgaaatgaatccataatatacactaaagagaaacaccataggtgtctaatgatgttcttattacaaatgatttaccacaggatttctagacaagaataaactcctggaagtgtatttctaatgattccttttaggcctcaaaagtgagggatgtaccttgccatgagtttgtccgatgagtcggaaccccagatcttgctgtctgatggggtgggctggtctcagccttgcagtttctcagcagtggcttaaattgctggccctttgcaacagtggttccaggacatcgaattgaagcgctctcagcatagctgcattagataacatactagaaaatgctatgttgtgttcttagataacataacataaggaaaatgctatgtccccgttgtgaactttgcacacagggctcaattagaagccacatccagggagtgcttttcatcaggcaccctctcagcccatctgtgcatgctgtgcaatggggcccgagtgtttcttctcccctccctgggaaggcgtctgccttgtttgataaatggggcatccttctgtttgaaatactacttgccactgtaaaatgagttggctgtacccagaattctgagaatggatgttttcccacagggagataaatgctcccggcactgcaaaagaagcatatggtttcataacttgtggataaaggtatctcaattagttgtaaagaatatgccttttgtgacacatgcaaggctcataaaagctcactacctctatttttcaatgatagcatttgtaaatagaaacattatcttggtaatagtgcttctttaaaaaatattatcttgctgttctatgtggatgaattagaaacactgtttttacagtgaggaagctccttcagacaagactgctgcctgccagtgggcccttgtcgtcattcaaccagaagcttcagaggtgttaagagcaaggtttgggatgcctggggcgagtgagaggaggctgagaggacctggggctgcagaacccaggggcagcttcatcacagtctctcaatatgtgaatgtgaaacattatcccacagaaaggaggaactagttgttattctatctccactaaagacaaagcagcagaaaaacagggccagaggaggcaggagcatttaggttggtttctagaaaggtagcagtctgccagtcaaagctagatgtttctttcttctttaccagagggtttttaaaaacatattttattgaagtattagtttgaaccatatgaaattgctgatatttgagtgttttgacctataaaactgggaatttcattcagttcaacctaaaataacatacacaaagaaatgtgcactattcataattgtacagctgtccagaaaactacccgatctaccaagcccccttccaccaccctgacttctaacatcatttgaattctatagaaatggaaccataaagtttgtgttcttttgtgtgacttttttgttgaatgtgtttttgagatttatctcttttgttgtgggtagcggcagtttgttcgttctcgtgtgctccaattcatttattcattttacccacggatatatgggatatttatcatttttggctattaagtgcaatgctgctattggtttttggtgaacatcttataatttcttgtaggtatatacatacgggtggaactgctgggttcttcatcagaagttcttaaggaaggatttggcctctctgtccagctatacctctaaaagcaatatttagcctgtatgatgctgtaatctccatctgctgagcagctaccttgtagaaagcatgtaatgggcctggcaagtgacagggcctggcaaatgggtcccattctgcaggcagatgggcagcatggcccacttctgatgaaaaacccagcagttgcacccctacgtatatatgtacaagaaattacaaataggttcaccaaaaaccaatagcagcattgcacttaatagccaaaagtgataaatatcccatatatccatgggtaaaatgaataaataaattggagcacacgagaatgaaccaactgctgctacccacaacaacagagataaatctcaaaaacgtattcaacaaaaaaagtcacgtgaaagagcacacgctttacggctccatttctctagagttcagtgatgttagaagtcagggtggtggaagggggcttggcagactggggagttttctgggcagctgtataattatgaacagtgcacatttctttgtgtatgctatttttaggttgaactgaatgacattcccagttttataggtcaaaacactcaaatcatgctgaagaagtgacaccctgactttgctgattttagagacgcacctgagcctcctcgtctgttaaacgggtacactctctcacctcctagggagcttgtaaagatgaggtgatgtaagctgtgccaggtaccttgcacaaagatggcatgtgttaggtgctaaagccagtctcttttccttcctccacctccctccttcctagaactgaggtggagatacaggtcaatgaaaagatgcctgacatcacagtgtaataataatgacaatgaaatagtgtagttctcaaaagtgcagcaaagagctgagccttcaactaggatttagaaatttcctaggagacatctgaatcataatccaagaaaaagaaattgccagtatataagtatgtgtaggtttgttttttttttgagacggagtcttgctctgtcgcccaggctggactgcagtggcacaatctcggctcactgcaagctccgcctcccaggttcacgccattctcctgcctcagcctcccgagtacctgggactacaggcacccgccaccatgcctggctaatttttttgtaattttatttttttttaagtagagatggggtttcaccatgttagccagcatggtctcaatcctcttacctcgtgatctgcccgcctcagcctcccaaagtgctgggattacaggcgtgagccaccgcgcccggcctgtgtaggtatattttaattgacatctatcatcaccttggttataggaaggcagggaggtggagaaggagacacctactagctactaaggaagaacacttcaatgcctaccatgtgccacctttgtactaggcacttgtcacagtcataggctttaattatgacacctctcaggaggtagcgttgtcctcatttacagagttaagggttaatgctccctcattcagagagctcttaccaattaaaaagaaaagagaagagctcatcaacagaaaaataggcaacagatacgagcagaaaactaacaaaagttcataaactgacacactttaaatccgtgatatttttatgttaacttttattttaagttcaggggtacatatgcaggtttgttacagaggtaaactcatattatgggagtttgttgtactgattattttgtcacccaggtatcaagactagtacctgttagtcacttttcctgatccttttcctcctcccacccactcacccgcttctagtaggcctcagtgtctgttgttctcctctatgtgttcatgtgttcttatctttccacttataagtgagaacatgtggtacttggttttctgttcctgcattatcttgctaaggataatgacctccagccccatccatgttcctgcaaaggacatgatctcattctttgttgtggccgcatagtagttcatggtgtgtatgtaccacattttctttatccggtctaccactgacgggcatttaggttgattccatgtctttgctattgtgaatagtgctgcaatgaacatagtgtgtacgtgtctttattatagaatgtaaatatgtgattccatagcaatgcaagatatggatctgaaaacgacaaaataacaatgagtatacattagtagaagctttttatgtgctacaatgaaagaatgtgcagctattgaagttagttctatagtaggtagttatttgtttacttgagaagacatttataacaattgttaagtgataaaagcagattagaaaagtgtgcgtgatgctattttaatgtggtaatgtaataaaatcaattgtgcctatatctctataaagatacataatacagttttaacggtggttattttgtgctgatgggattatgtaatatttgctttttaaatgtttatgtctaaattattttatagtaagcatttattattttcatgcacaatcaaaaaaatcaatatagatgttttctgttacagaacaaaggagaggccaatgaaatattccaggatagggcactgaatgatttttttgtgtttgctttagaaatatttaaagtgacaatgtgtcaaaatatcaacctttctacattttttatcaactaaaatacttaagaaaaatcagagagtaaagattactatccagaatgtataagtttgtgttttcaaatgtgatcggctgctcaggtggaatagtaaatgggtacaactgttttgaagagcaatattgcagtacataaacagccataaaattattcctgccctttgacttagaattcttggtaaaaaatacatggaggcactaatggaagagacaccaaaatcctcacatacaaagatttttttgctgtgttccatacaaaacaaagtaaatatatttgtcaaataaaaattattaaaactcaaatggtcaacatttgaagatgatttggtagattgtgaacacacagaatattatctagttattgaaagaatcattttgaaaatcatgaagaaacgtggtgaaattttatgatgtaatagttaaggaaaagcactatacaaaaatatacctcggaactgcaacttttttttttttttttttgagacagagtcttgctctgtcacccaggctggagtgcagtggcaccatctcagctcactgcaagctccacctcccaggttcacaccattctcctgcctcagcctcccaggtagctgggactacaggcgcccgccaccatgcccggctaattttttgtatttttagtagagacagggtttcaccgtgttagccaggatggtcttgatctcctgacctcgtgatccgcccacctggggctcctaaagtgctgggattacaggcatgacacaccgtgcccggccgcaactatttgaagtatgtctgatttgggccaatactaggaagaattacaccacaatgaatgtgatggaaatgaatgtatttctcctcacttacatttatttcaggattataaaatacttgtgaaaattaaagcaatacaaaaagtataaggctcctggaaccacttcaactttctctgcctattccattctcttcactttttatacacatttgtatataattaacaaaactactggaaacacattttatttatagcttaatttttaaactcattatctctttaagatattatatatataaacacatgcttcattgttttttactgggtgtgtggtgttccattgtattaacctattcatggaatcttagggtattttcattttttgctatgaaaaacaatattgcagttgttgtgtacattgtagtgcacctgttcaagtattgctgcatgataaactcttacaaatgaattttctgggtcaagaccacgtacattttaaattcagatgaatactgccaaattgtccacccaaagagctacacatatttacatttcaccacagttgtgtgaaggtgtccatcattatgcatccttgccgatgttggatgttttgtatttctgccatggcctggaatgtaacatttgcttcactttgcatttctctatgtttagtgttgagcatcgtttcacaagcgtattggcaatttgtatttcttcagtgaaatagctgtcttttcctttatctgtgtttctattggatctctgaattattcttactgatgtataggtgtgctttatgccttataaatactaatcttctctttcatgtattgcaaatattcttccatgtctatggttgatttttaagtttctttgtaatttctattattgtatacaagttttaattttatgtagttaaatctgtgagtctttccttgtggtttcagtttcagtcctatttagaaagtcgtttcccacccaaaacataaatattcttctgtattatcgagtattttacacttttgttctttaattttaatttgctaatgttttggttctttatctgttacttgtccccctcaaatggtttgtcggttatggaatagtccattattttcttgcatcttatgggattgcaactaaattctattctgaatatctatttgcctggtattgtctcaattaatattttaattattgtaatttcatagtatttttagatatctgtagggaaaatttgcccccccgtactcaccccactccacccactgggaaggagtagagtacagtggttaaggcttcaggctctagtgccaggatacctaaacacaaatctgctacttactggttataatttgggtaggttgcttcatgtctctgtgctttaatttcctaacctttaagccagataatgatagtgctaaaatagttttattgtattgagaccagagattgtggcttgtatgatttctgtgttttataactggttatgattttctgtgtggccacatacatagtaatttttttggctgtaaatttacatagcttgaacataatgaatagtttctgtttggtgagtgcaaagttctaaatatattaaaagaagttagccatgctattaaaattttctgtagtcttattcttttaattttgtctttttaatttgaaggtatgctatctctgtcaaacaagaataattaaagccttcacattgttttttggaagtaactaatattttgtgttattaaaaccaacttattatgtgttttctttttgtggtgctttatttttatgttttatcccctttgtttctttctttagctgactagctcaagtgttctttgctacccttcttttttactttagtaatttggatgtcataatttctatctctatatttctaattagtattcttaaattgtatctccttctgatgcttgagcttttattattataaaatttctatttgtctttgtattaatattattatcttaaggtctactttatctaacattaatatgttactacattatatttattgagattgaagtctgcacaggttatctttttccatccttttactttcaacttatctgtatctttatttttaacatatggctctcgtaaatagcatttagttatatcttttaactttatctgtctagccaatctctgccatttaattggagtggttaagccatttacagttaatacaattattaatatggttgaatttaaatctatcaccttttactatttgttgcatgtgttctttgtctctctttttctgtcttcttttagattagttagatacttgtttgtattccattttacctcctatattgaattgttagctatatctctttaaaaattttagtagtttatttcacaattataatatgcactttttacttattaccatcatcttccctgtgtcatttattataccatttcatgtacaatgtaaaaatcatatgacagcatactttcatttcttctctcatgcctttggtatattgttatagattttacttctatatataaatctcataaaacatttaaattatttttactttaagcaatcaatatactttcacagaaattaagattttaaaaaatttaccaacatatttatcattctcaatgttctttatcagttcggttagatttggtttttccctttgggattatatccttttagcctgaataacttcctttagcatttcttataatgcagattgctggaaataaattctcctggcttttgttttcttgaaattattaatatctttattttgcctttatttttgaaagatttttttggttggatgtagaattttcggttgacagtcgtcattcaacactttaaatatgtctttgcattatcttgtggattccattgtttctgatgataagtcagcttctactgttattgttgcttttatgaatgtaatgtgtttttgctcttgattgtttttaaaactttctgtttatgttttactttcagcaatttgattgtgatgtgtctaggttggtctcattagtatttttcccatttcttttcattgagattattggagatatggtttgttgtctttcatcaattaaatagtcctaagactttattttatccaatatttcttctacccaattctgttgctcctgtatttttggttcttcaggtacatatacatatatattagacagtttgataatgtcctacagatcttggatgctctattctatttttaaagtattttccctctctgtggctcagtttaagataatttctattgacttgtcttcaaattcactaattctttatgctactgattctattgtgtctattctgctggtatgttcatgcaataaatgttttatttcagatattcatgagttcagatctggaattttcatttggtttttagagatttagtttctctgttgaagttttccgtctattatccattgtgttcatctttccctatcatcttttaacatattcataatggaaaatccctttccaccaattcccacatcaagatgatctatacctttgactttctctgttgattgtgggtcacattatctctcttcctttgcatgtctagtaactattatatattggacactgtgaaacatacattgtagagattctggattgttatttttccctaagagtattgaattttgttttggcatgcagttaatttacttttgggtcattttagtcttcagaactttaattctaggctattgttgggcaaatctatcttgttttttttttccaagattgtattccttaatctgggacatggtttttactcctatggttttgcccttctgaggtttcagtagaaagcctaagttggataaatttcaaccccagactgtatctcctagcactggctgggtgctgaaatctctgcttggctctttagactgtgactgttactttccactggggttcttgtagtctttttctgcacattgcaatttctgagttagccaaataatttgaaggaaatttatacacagaacttgggttccccttctgaggctgatatggtttggctctgcatccccacccaaatctcatgttgaattgtaatccccacatactgaaggaggggcatggttggaggtaactgaatcatggggtgagacttccccctcgttattcttgtgatacagttctcatgagatctggttgtttgaaagtgagtggcacttcccccttcactctctctctcccctgctgccaggtgacgatgtgctcgcttcccctttgcccttctgctatgactgtaagtttccaggagcctccccagccatgctccctgtacagtggaaccatgagctagttaaacctcttttctttataaattacccagtcttaggtagttttttatagcaatgtgagaacgaactgatatagaggctaacctcctttacatggaggtttcttctttgttgtattatgtatttttttatttctatctggtttatcttttgcataattatttttttctcttctgctttgctgattggtactctttgaagctcttcaacctgtatatggatttatgtttatgtttttattcttttcagtagtgtttcaggagggtagagagacaaaatatatgagttcaatcagccatcttgacctagatgtctctttaaagagatctaaaagtttttctttgacacaggtttacattttttagatacaaatttatattttaaaaaaatttatcatttatccatttttacttttaccatgactatttttatggttctctgagttatccttcaaatgacctcactttgtctatctaaaatctacctgttttacaaaattcagctcagaatttacttttctgtgatgtgttgtttgaaatatcagccctgaattaatgtacataatactgatgacagttatatggaagtcccacatttatttttatttattttttgattatagaaatacttggttcctggatatattatgttttcattcattcttgtggaccaataaaaaatcttcagtcatataatgagaacatattaaattagacttttaaatattaatgctttatttatgaaaacccatgtgaaacattgatgctttgcttttgtttctcctgacacaaaaaaaatcatattgttcattaaaagcaaactggggttgtttggctttagagatgatgatatgataatgatgagaacaatgatagtaataactaatatttattgagtattttctatatgccaggcagaggcatagttaaggcaatttactccttgactattcaaacaactctataaggtaggaattttataatgctttcatttttttggatgagaaattcaaagcttagagaggttaaagatttcacccagcgtcacattgttaataaataagatgacagtgttttgagtgaaaattttaaattgagtattttatgtgttgaaacaatttacaccagatttggatggggagggggaagaaaggggctggtagtgaggctttcttataattaaatgaccctaatgacttcagtgaaatcatggatacaaaggggattgacaattcccgagcaagtggggctttgacattcaccagatggcccccagcatgaatgatgttatacccagcagctccctgggagaatccttagggattattatatccattcccttcttttttttttttttaagaagatttttctttttttccctcttaaccaagggccttactcagagcctccttgttgctcagtggcagagctgggcccagcacctcaatgtcttgacttttggcccacaggcctgcgttagcatggaacttcctcccttcgtaataatgggtgggttctgcacatttggccttgtccttttcccattcattgggggttatatgaatgcagctatgtttctagacaggctttgtggggcagctacttgggagagctgctcttcattacaacaaactcttgctctaaaggaagtcctggcagttcccttctgtgtatttatcatacttctgtgggatgcatgagacagacatgttcacaggtccagagaacaacacgagatgatgagtgagcccggcctttgggcggtgtattctcctgcaatggtctccctggcctgaggtttcctgtagattttattctaagtatcgggaaaagggatggaacctgaagttcaggggtgggtgttcctggaggtgttttttctatgaagaccagcttgaaaacccagagggcaccacatgtcacaatgggaatagctgcactttgggaaaaatatctgcagatggtaacactcaccttctttgttccaggttgttatcctggcatgatgtgggcggggggcaccagtgtccactaatctcacttaagataatgtctgaaatcacttccattcctccactcctgcaggctcggacatgcattgattgggtcctactgtgccaggcactgtgccaggcccagggaacatggagacgaataatggcatgtgcctgcatcaccactgtccacatggacagcaggggccttggagatctgggctgcagtggagctgggacttgggtgggaagaatggtggctctcagagctaagagcaaaaagggagtggaggacatcagggacacgttttgcctggggccagctgtgccccctgtgcaggccttgcctccagctctccagccccagggccagctctttggactcttttccataagttataacaactgcttcttctcttttttttgttgttgttgttgagtgcttactctgtgccaggtaacgtttttatgctgtatgtgcaattatctcatctaaaccttacaacaccaccatgatgtagatgctgtcatttttctcactttataaatggcgaaactgatgctcggggaaggaagtcatttgcccatagtcatttgccaacaggtggcacagatggaattagagtccaggctgactttcaacttccttgttcccattgctctgttgctgcagttgggtggggtgatactttgtccccagcttcccacatactggcccgcccactgcgggtcataacaaacccacactcagatgcaatccagtctagtggtgatgatccgagcatcaggagccagaatgtgtgggactaaatgctgcctctacctctacttgtattactctaatctctcctccctcagtttactaatctgaagaggatagtagaaatagtgcctactggatggggttctcagggcacaaatgctagcagagtagtacctggcacgcagggagaacaccacaaatgtaagcccttacattgccttcataggtgcttggctaaagctttccttacccttcttcttgcccctgtctttagagcactgtgtttttctgttccctctcccaatggtcttcttgtcaccctgaccttgtcttgcctgtgagagccacttgtttataagaattatcttagttcgccataatcttggcttctttcttaaatccagtctctccctggatgtcagcagacttgttggaaaacagtgtctgccttagaataaccaatgtaaaaaacatcaagaggctcggacgaagcttgattaattatctgtgtactttatgccgaaagagtgaatcatggtcttcattttcctctcaagaatgtgagctgcctgctttgaattaatccagaacggttcaaaaagaaaagaaaaaaaaccttctctactgctatgtcagcatttggaattactgcctgaggcttttctttttccttctcagagaatctaaaggtatgtcgaataattgtaattatttcaagttaaaaaaaaaaaaaaacagaagaaaagaactttgtgaaagttgtgctccagaaagaagtgttcccatcgtcagtttttttgtttgtttgtttctgagcaagatgctttgaaaatcacctcccatttttctgctcgctgagctggaaatcacaaactcttgcctctgatgggaaatcagaaagcagctcttggtctggactgagctgggtctgatgccatattgaacagagtcaggttctatataagaatcagtgtcagagagaaagaagtctgggtgtcatttcctggcgtggccttgagctaggaaagcatttgcccctctctacagtgagccccttgggaggaggggccttggctattgtgttcaccttgtctctgtcacccctgatatatgcctggcacatagtagatactcaggaaataccaagtgaatgaattgactgcagtgaggggatttcagatcacacttctgcctactggaggaacgggctgtccccatgggaatctcctgggcctgagtacagcagacaggggccatggcttgtctggccgacatgcagagaatcttagaggacaagttgaggagggcatgagtcactcaaggacaagtttcttctccaggaagacacacaacaaggaaggggtcaggagtttcactgagatgtcctttgggtctgccaccccaccagatccctggaatgggtggcccctggccctcccgcattgccctttgccacttagaggctgtgcagggttggaccaaggagggagatggcaaaggtgacagtgggcttgtgtgggtttgtgctcatttggctaaatgtcaggacacataccaaggttttccacgttttcatttctcatagtgacccatgcctagggctgactgtcccaccttcttgtgaggggtccttggtggagtctggcctgtttccccaggtgcagcttccaggcccagatacttggcacatcttccaggaagggaggtgttcagggtgcctgctttaccctcatagctgaagctcacctcttccaaaaccacagcttttaaacaacttatctttgctggaattttttctttttcttttaagtcaactatttggtaaaattatgaaacaagcataggcttgatgtaggaaacttatatgatacacagagaaaatggatagaaaataagattatttatgatcctactacccagagaaaaccacagttaacattcttgtgggtggtcttttagtcttaagcctgctcccatgataatgcatactttctttacacaagaggtatgtctcatctggaataacattttgtagcctgcctttttcccttggttttatgccttcagcattttcctatgccaaatattctttcttgacttgttttttaaaaagctgcaacacactccattaaatgaaagcaaataatttaatacagccagtctgctggtgttggacacccagtttttagttgatgtagttaacaccatgatgaacaacctggaacattcattgctgtgcatacctctgtatgttcttaggcttaattcctggataaggaaattctgagtcaaaaaactggctgggcgcagtggctcacgcctgtaatcccagcactttgggaggccaaggtgggcagatcatgaggtcaggagatcgagaccatcctggctaacatggtgaaaccccatctctactaaaaatacaaaaaattagccgggcatggtggtgggcgcctgtagtcccagctacttgggaggctgaggcaggagaatggcgtgaacccgggaggtagagcttgcagtgagccgagactgtgccagtgcactccagcctgggccacagagcgagactccatctcaaaacaaaacaaaacaaaaacaaaccaaaaaaaaaccttcccatcccccctactgccaccagttttgccaaatcgtcctccagaaataattttctgatttacattcctcccagcagtgcctgatctggccggtgtcctcatgggacctgctcaaatgttccttgctagaaaaactatcactgagcatctgtcccatgttccacacccttctctgtcacattatcacattcctctgttttgtttttcttatggcatttattgcgatctgaaatgatgctgtccgttatttattggtgtccctgtttatcatctgcctctgctcagcaggctgtatgttctgtgggtgcagagaccttgcctgtcgggatcattgctgtcctgcactgccttcccaccattccccaggatctggctcaccatggtgtgcaggaagtgtttgctggatgaatgaatgtttacccacaccattaatgatactcatattatcatgcattttttaataaaaatcgttgccttcattctaaaacaaatgctgccaaatttaatttaaccgatggctggagatgaaatggtgacagatggccctcaggtagtcatgtaattccttcttgttctgatgaggtatgaggtccttttccatgaaataactggaggttgtaattattttggtttgtttcttatagtttaaaatgttttctctattattgaaaggctatggatggtatgctctctaaagcaagttagtttctgtttctgatttgcagctgataatccgataaggccttgaaaggagatagtcaccttgttaaaattgtatgtaaagtaagatcactcttatttaatatttaggtttagcctgagtgtctggacagctgcagggttcaggtgctggaggtttctacctgcctagacctttttgattactggctggttcttagagagggacagttttgacggttgagtacctggtgcatgaggttttaccattcttgttactgagtgtgttgcccccttgagtacaatagcagaacatcttctgactaatccagtagttacaggttgaataaggagtgcatccaaggattattggctgtggatgtgcatctggtgcaggctggggaggctgtccagggccatgcctcaggaccctgaatctgacctcctttgtccaaggttttgatcagcaacttggataaagacatagaagccagccttatcaaatttgcgaatgacagaagaccgagatggaaagctaatatattgaataatagaatcaggattcataaaaatcttgacagagaggatgcatctgaaactaacaaggtaaatcctaacaggattacacatgcagtcggcagctcacttcagcagagctggcagcagccaccaatgacgggagaggactggcttgaaggcagtttgtggaattagtaaggtcctgggtttcctaaatgtttatttttaaaagtaattcttccttctatactattaacagcagtaaggcatccagacctaaagggtgctaatctgcccccaacactgctcctgcccccttgtctttcctttcttgctacaacaacactttccccactgtcctctgctccctcacccaacccatttgattttcaggcccaagttgggctctactttatctgaggagctttccctaagtctcaaggcacagcaagttaggctcttcttccaagcactctaacagtaccccttcttccccattagggtgctcaccaaaccatgtgaccagtgtctgtctgattgtacatcttccctttggattaaggactcctggtgggcagggcctgtgtctgcctgtgagacgctccaccctgagctatgacacagtgactggcacaaacagatcccagtggacactttggttggtggcatacattcctggagcatggggtggagtctgggtcccacactgttggatcttgtacccctgtaggccatccaggagtggcagctttctagcccttgtgctatggaaagcacatggtggaactgcagatacctaaccagaatacaaaaggatgtggtgaggactgtaccatgtgcaggctgtcatggatggagggtgtggactattttgaggggcttcagggcagcccaggggacatcagggagaagggataactcagttcctagaatggaaagggtttaaaaccattgtagctccaaccatctatgtactgcttgcttggtaggagttgtccattcactgcaaatgttgaattgtggagaggatttttaaattggaagtggaagagttgaaagataatgataatggcaaccacaatatcaacagctaactcttcctggaagttccctgggcatcaggtgctttatacaactgggtccttacagcctccctgaaaggtgtctggtgctctgtgacctcagtggagcagacaaggaaacaaagaccatgatcaaagttttatggccagtaaggagctgataactgaagcttgatcccactctgagggcatctgatgctgagattctactgtgctgccatttagcaactgatacggtttgactgtgtccccacccaaatctcatcttgaattcccatgtgttgtgggagagacccagtgggaggtaattgaatcatgggggcaggtctttcttctgcccttctcatgatagtgaataagtctcacaagatctgatggttctataagggggggtttcccacacaagctctctctttgcctgctaccatccatgtaagacatgacttgcttctccttgccttccaccatgattgtgaggccttcccagccacgtggaactgtaagcccatacaacttctttcttttgtaaatttttcttgggtttgtctttgtcagcagtgtgaaaacggactaatacagtaaattggtaccagcagagtgaggtgctgctgaaaagacacccaaaaatgtggaagcgactttggaactgggtaacaggcagaggttggaacagtttggagggctcagaagaagacaggaaaatgtgggaaagtttggaactccctagagtcttgttgtatcgttttgaccaaaatgctgataatgatattgacaataaaattcaggctgaggtggtctcagatggagatgagaaacttgtggggaactggagcaaagatgactcttgttatattttagcaaagagactggaggcattttgcccctgccctagagatttgtggaacttagaacttgaaggagatgattttagagtacatggtggaagaaattcctaagcagcaaaacattcaagaggtgacttgggtgctgttaaaggcattcagttctataagggaagcagagcatgaaagtttggaaaatttgcagcctgacaatgcaattgaaaagaaaaatcctgtcgccaggcgcagtggctcacacctgtaatcccagcattttgggaggctgaggcgggcagatcacgaggtcaggagatcgagaccatcctggcgaacagggtgaaaccctgtctctactgaaaatacaaaaaaaaaaaaacttagccaggcatggtggcgggtgcctgtagtcccagctacttgggaggctgaggcaggagaatggtgtgaatctggaaggcggagcttgctgtgagccgagatcgcaccactgcactccagcctgggtgacagagtgagactctgtattattcctgggtgtgtctgtgagggtgttgccaaagaagattagcatttgagtcagtggactgggaagggcagacccaccctcaatctgggtgggcatcatctaatcagctgctagtgtggctagaataaagcagacagaagaaagtggaaggacttgacttgatgagtctttcagccttcatctttctcccatgctgaatgctgcctgccctcgaacatcagactgcaagttcttcagattttggcctcttggacttacaccagtggtttgccaggggctctcagacatttggccacagactgaaggctgcctctcggcttccttacttttgaggttttgagactcctgctgatccaccactggcttccttgctcctcagcttgcagacagcctatcatgggcctttaccttgtgatggtatgagtcagttctcctgaataaactccccattcatatatacgtctatcctattagttctgttcctctagagaaccctgattaatacattctcttaggggtcttgtgaggactgagtgaattaatgaagttaatgagtgtaaagcacttagaatgtcccaggcatacactgagtctttgggcattccactgtggtcaccaccatgggccttgaatccctgcagtgatggggccctggaatagaagattctgtgatttgaatatttgactcctccaaacttcatgttgaaatttgatcaccgatgttggaggcagagcctaatggaaggtgtttgggtcaagggattggatcccttaagagtagatcagtgccctccttggggatggggtgagttctcactctattaattcccatgacagctagttgttaaaaagagcctgacccctccccactgtctcttactttttttctggccatgtgatctctgcacgtggagctccccgggccttctgccaggagttaagcagcctgaggccctcagcagatgcagatgcccaatcttaaacattccagccattagaattctgagcaaaataaaccttttatctttataaattacccagtctcaggtatttctctatagcaacacaaaatggactaagacagagggagagagagacaaatgagggctctgcagtcatggagcttccaggctggtggagatgaccagcaatgagcaagtatctgtataagtgctacaggaaatttcaaatgtgatgtgctagtaagtgagcagatgttaccattgttaacattttggggattttctttttgtctctttttttctatgcatatgtgcatgttctataaacaataacaatattagcaaaagggagagcacaggatctgctatattcttcccttttacctaacagtatatcattgcaaatagtcaatcaccataaatggtcagtgtatggctgtcttagtctgttttatgctgctataacagaatacctgaaattggataattcataataaacagaaatgtattggtgcatgtttctggagattaggaagtccaagatcgaggtgccagcatctggtgagggccttcctgctgcaccatcccatggcagaaggtgagagggcaagagaaggtgagagagggcaaaaggggggtgaatttgtgcttttataaggaacccattcctgcaataatggcattaattcattcaacggggcaaagcccttatggcctaattacctcttaaagttcccatgtcttaatatgctgcattagggatcaagtttgttgcattggggatcacctcttaatactgttgcattggggaccaacacatgaactttgggggacacattcgaaccataaaaatggaagaataatgttcccccagggatgtccacatcctcattcctggagcctgtgaacgtataaccttacatggccaagggaattaaggttacaaatgtaattaaggttctattcagatgaccctgagatggagagattattctggattagctggtgggcccagtgtaatcacatgagtccttaaaagtggaaaagaagaggcagaagaggaggtcagagagatgcaatgtgtacaggactcaacctgccattgctagctttgaagatgaagggaccacaaagcaaggaatgagggcagcctctagatgctggaaaaggcaaggaagtagattctattctagagcttccagaaaggaatgcagctttgctagcactttgcctttagcccagggagatctgcatcagacttttgacttccagaacttgtgttacttaaagccactatgtttgtagtcatttgttacagctgcagtaggaaacttataccatctgtttctaaacctgtgccttccccctagagctccctgaaggcagggactgtgccttattcactctgggtccaagtgcctggcacaggctttaagctcaataaacatttgctaaactcttttcacctgctcaggagctgagcctctgcattaggactggaggggacccctttgtctctcttttccatacccaaaccctagtcttgatgtggcccactaggagtggcctccaaggcctacagacctacttccagcccaggccagcctaaagtgagggcaagtggtacagagagaacactgcctgctggcttaactcacaccaaatagcacctccttcagaaggggaattcctgttaagtagaagggttcataagtggaactcaaaacatgcacatggtttttgatgctggatactgtgaatttcttgccatatttttacaaaaggaccattattgattcattcattagggaaataaatgaggtaaagacaaaaatcaaaaagaaaattgaaataaaagaaaagaacaagaaaagcaaaaagaatacagcgatgtgagctgttcacctcctgagttgctgcttgcccatctctccttgtaaggtgactgcacagtgggcctgccccaccctggctgccctgagatttgtattagttggcctagggtgaggcagggacagtgatatttttaaaagctcaacgatggagcctagtaagcagccggtggggacaccaactgctgcacgatattcttggtctgctctggtctcaagttagaagctcccaaaccctaaaactctgtaaaggatgctgcttgaaaaccagccaagcagccctctcatcttataaatggagaaaccgaggtttagaaacacagatgccaacctcacagtcatgtaatgtcacacttggtgtccgggttgaggccagggcctgcttctgtggatttttcacgcccaccctctatcttactagtgttgccaatagtcttaaattcgggcagccccgtcaacctccatctgtgagaggctttcctcccatttcatttaagtttttttttttttcctcctcaaatgctcctttgaaagatctgcttttgatgggagacatggactcgccctgcctccgcctccatgtctactgtcccctagatgaggcaataccaattagctagtatgaacatgggctctggagtcactcaggtgtggctctgaaatttggctgcactaatactgtgtggtccctgaaagcctcagtttgaccagctgtaaaatgggcttaatactagtacatcattcatagtggttgtgaggttgaaaagacatggaatacatttaaagtgctcagaactgcgtgtgacacataaatgccagctgttacacgttatattattgttttaaattactactgatatagggaggagaatgtggtttcaggtgtcagagccagtaaggaacatcgacagacgtttttgccattgcttattggcttcctttggaatgtatgtggcattggtcagtggtgtccactccttgaccagacaggcacaagtcctctcttggggactggtaacagtgagcttccaagggaatggtgtgacgagcttgttagccttggagcagaggctccctgggcttttacctcttatctactttgcctgccttaaggtcagcccacccgggctgcctcctgcaggggtcccaggtgtatggacagacatgagcccttgcttattgtgggattcagaaggggtttgctgccttctccttcactgtctccattacagaaacattttccatgcaagtaattgcagaatgagataacgaggaggaagatggggcagatgatagtggataaactaaactaacttgattacactttttcccaaacttgttatccacacttgctgtgctgtgcgaaatctcaaaagccaattaagaccttacaatcacaactgcaggttccagagaagtctcccttataagtctagcagatctgccaacagattgagcgtggtgagagtaactcttctgctttggatttttgtatttcggtgagaacagggagttttattgttacgcttttaaacaaagctattacacattgagatgggaaggcaactcttccgctgatgtggtgtgtagtgatttaggtgaacctttggtattttaaagcgggatcgttctgattggtaacattgtcaattgcacagagaactgattcattttaagacatgttgatgtcacttacaaaatcacaagttaaaggactttgggaaatcatttaagtcagagaagcaacatttgatttatttctcagcttactattagcttccttttatcaatattacttgacctttaaatcagttttttaatagacaagataaccttatagggtcatggtaagtgtgaatgaaataatgtatgttaagtgtataattcagcacctggaatgtagaaggggtgctgaaacttttggcttctccattgtttgggaggggagattcatagcatttggacagaaaaaaactctaaagtcatccagtccagttccttagtgagaaaaatgaggaacacagaaagagagagaactgtaaatgatttactcagattgctttagcagctaagccaaggatagaacgtgaatgtcctggcttccagagttggtggctactttttacctggtccttgactgtttcccatgccagcaggaaacccaaagctctcaacccagaggcacctggaaatccaagacaggagagggcaggggaactaagggatggagaccatgatgagaaaaggctccagaagtcaggggctctctgggagcagatgtggtccccactggagaaggaccatgtcccaagatggccttgtggggtgacattattcaggaagggcctggatggagggaagaggagcttggggaaaagaatgatcagggagagtgatcaaagaacagaagggcagtgtcaggagcccagagtcaatgccagccccccttgagtggtttataaagcattttcacatttattatcttatttgaagccttaaaacagttctgccatgtgggtggaatgtcaatatgtgctgaatgaatgagtgagtgaatgaatgaatgatgactgaaagctaacatttattaaacctgcttactatatgccagtcattgcatttaaaataagccttttacagatgagggaactgaggcacacagaagtaaagtgattggccaaggtcaaaccctaggaaggatatttcagaattcgtgcttttcatttaactatcttgccatactgcaagtgcatgaaagaaaagtaggtggatggatttccattttaccaacaaggaagtagcaacattgaagggcaagaggctcctacagttgtaaagtaatcagtggtcaagtcactgctagttagctcttttgatctctagtccaacatgctgctaactagctccagcttgtatcccacactacttgggcaggctctgggtcctcccaccacataccgagtcaagctgttgtcttcagcccacccattgtcccaccctcacctcagtgtgctcttgccccacattttcaaaaatagtcataatggaaatagcccaggattatggttagaagtttaagttccagttttgatgcttgttagctgaatgactttgggcagggcaagaaacctctttgagactcagcttccctctctggaaattggagataacagtgcctacttttcacttgtaaggtttgagataagatgtaagaagtgtctagcagcttcttggcaggtaagaagcactcagtaaattgatcagctgatccttccctccctccctacttccttttgtccctccaggtgcctctgaagatgacgtctcatttactgcatgaataaggagcggttcaggcagctgtcatatatcaaatccaattctcagtgagtgcagcagggctgatatagctccatcagttgggatagatgatgaagaacgcaaggtttgcaagttgatctttcgttggagaattggtggtgatagcggtggtggacagggacacattgaccacacagatgctgtggaccagttcgtcttaatgaaccacttggcgaatgagtacccagcaaagtccaggctccctgagaatagacatgcatttgttcacaggggagcagacttcagagagtgggaccaaggggccctggtgaccgttaaatacccgctactccccagacgagctagcagccagtttgagcagccatgagaggtggtgtgaacacagtgtcacactgcacaactgcggtaggagtgggccaccaacacatgggtgtggcggtctggatggggaagaccttggggtgggcatttgccttgtccaaagtgggcagctgcttcttagttttttggactgagtgctgccgtggggagatgcagactcaaggttgccagatcaaatgcttcatcagaagccagaaattcagatgttaatgtaagagctcctgtttttaaaatattggccatgagttacatttaaaaaaaaaaattttaacatggagcagctcaaaccaaatatgcagcaggctgcaattagttcaggttgccagctgccagcttccgattaaagattccaggtggcagaggcttgggtcttcattggaacagctgacatggatttatttgttcagtcattgattcaacaaatatttattgagcacctactgcatgccaggcactattctaagtgctggggatacagctcagaccacaagcagacaagaatgcctgctgcccttgtggagctggtgttctgctgtgacccctccattctgcctgaggccactgaatctttgcagtagtaatgatgatgatgacctggttattccctctcctcttcttagggagacttaaagtgagcagctcaacctcagtcataaagtccggttgtaccaaacaggcaaccattcctggtccttgactcaggtgatggccactggtggggacagagaccccaccttggggatgtctccagctgtccaaagtcaagaccagttctataggccacgtgcttgagatgcctccatttgcatttgaattgagaagttcagagtttgcagtacaggtggccatgaaaacatttattgatatccactgtgagcaaaaacttttgggacaaaaatgagggctccttatctgcttaaaaaacagcccctgccattccttagggtgggaggaagcccccgagttctccagagctcagccactgagcagatagacatgctgtgggaagctgcattccagagcctcattgaatgctcacatgtttgcagccctgtcctggatgcctgccctcagcctctcttctaatcatgggctgtatttgtggctgtttcatcttacacatctgattcctctcacctgccagaccattctagaacacagccttgttcctccatgggggaacagtaggtcagagaaatggtcatgggtgtcaggtcaggactgtgctgatttctgccaaggactggggtgagatctcgagggagcagcagaaaggcctgatgccacctgtgctgctgctcactggagccaggggaactcagatgacattacaaggaaggaaaatctcaaagacacctcacagtcccctatttaggaaaacacgctctctgtatattgtgttttaatgaaaatggcagctcaaaagcaccttcaaactaagttctgtttttcactgtgttttcccctgagtgatgagtagcattctttcctgtcctcgagcccctatctctgctcagggttatgtcctagagtcttgctgtgtcctggtgcggggtatacagactgtcccagactgctttcccattgggaaatttatttggccaagacaggagccgagttctggaggtctctgggctgctggccctgctgggtgaggggacctggcttgtgctaaggtgcatctgagctctgggttgcccaggaagccagtaggaggtgaattctgcagatttccctgggtcacaagcttactggcctcgttctgccccaagtcacctgccactgtgatgttcactttcgccagtacctcatcactcaaagttattaagcagctgcttttggaggcattcagggccacatccgagccagggagagggctcctcagtgccccaggctccagggcaccagcacctttaacctgagcattttgaaggtgactcattttgtgactgacccaacctctttccagttctctttctttctctttctgatatttcctatcctgcccttccttttactttctaatttttctcattattcttcccattgtcttcactgaaatctagatgaagctaaatatttcccaataataggctgtttctttagttggtaaaacacctaattttgtagcatctcaatggccaatgggcaaagttgttttacagaacttcttgatgtgaaaatttttaaataccctccaccaattatcagcacttttatttcatctgcttccctctctcccttttttggtgaagtcttttaaagcagatcctagatatggcatcatgtctgtatatactttgatatggaattttaatctctaagaacaacaacaacaaaacccaacaacaacaaaacccaacaacaaacatacaagcaaacaaaaaaacccaagtgatctcccattactattgtaatacctgatgaaattaataataatttctttgaatcaggatccaaataaggtccacacatatttggtatacaaatttttggaaataatttgtttttcatttagaattctttggtaattagtactactattaatgccagttgctgagtgcctcttgtgagatcttgacaattatctcaaatcttcaccacctcctaacagagtgctctgcccattttatagatgagcagggcaacttaactgcttgacccaggttatgaggcctcgactggatcctgctctgtcagctgctgcacccaggtttacgtagaccaggattttctgtttgtgttcagacaatgaaaatattttcagtcttctgttgtttactcccaaaggaaaggcaccttctgtagaaaggtttgaaaatagttgcactaaacatttggacttctggggtgatgcatgtggtttctgcacattgtgttgctgccaaatatgcttacgtttacaccatgccccatagcagccatgtttgaatgtgttttgctatttttattatgaggcagaagtggttttcaatatcctgttgctgctgaagacaactcctgcaggaagggaagcacagaacagcctggctctttacgtccattctgcattacctcactgtttattcctccccacagctgctgagatagtggcagttatctccatttacagaagagggctcggaggggacatatgccttgcccaaatcacaccatgagtaagaggcaaaggcaggatgcaggggtttcaactccacagctctggctgccagcccttgtactttcagagcaacactatcttccttgctatttccccacttttaaggtcctgcttctggacctttctatgccaacattttatcctgaaaaattccaaatatttagaaaggttgaaagagtagaatgatcccctatatgctctacctagatatagcaattgttaacatgtaatcatattggttggatatctctgtttattgttcatatatgtatttttctgaactacctgaaagtaacttactgatacctgaggttcctaaacccccctaaatgtttcagctgcttctcctacaaagagggcattcttctacatatccatgtcattactgcactgaagaaaattagtatacttccttactgtcacctaaaatctaattcattctctaatcccacaatttccccaatcatcctcagtgtttctttttaatagcttttggtttgttttgacccaagacctggtcagagcacatatgtttcatttttgattgttttgtctcttcgggctcttgtaatctggaacatttagctttattctaactttattcgtgggttcacctaattgttcattgagggtgtttgacttgttcctcttcccctgttgggtctaagggtttgatgagatccggagtatgcatgtttgggaagaatgctcagtgggatgccatggccgtcctgtctccttgtgttgagggcacaggagaaagggtctgtggttccagtgtcaggggccacaggtaaagaatgcaagttagggtcatttttctaaaagctgaagaagagtcagcatgagcaggcagaggctttgcattgggagctttgctttacccgcacggcctgttctggtcctctctctgccagtcccgctgccttccatgccctgggagctggatagatggatgacatctccaggcttgggccacacatttccacactgtccactcaccaatccccccccatcctaccccagtgtgtttaggagggtacagcagtagagtacgtgttttcattgtctcttatacacgttctcgtcgagggagggattcctgccctagggttatgaggatggtcatacatgacactcaacactgggcagatgagatcaacggcagcttactccccacatatactcacagcccaggggaggagtacactgcacgccatgcagggacacaaggaacagagtgaacagccagggactatgggaggcaggctttgtagtgtatcaggagggtggggtggtccctggtagtggcaggaggatgtaattgacttattgaataattccacgagctagcaggaagctgagactcactattctgagataagcagaaactgtgcctggtcatatcaataagaaatgttgtttggctacaggaccttatttgtgaaagcagagtagggaggggaacttgtggttaggacatttgaatgcattttggtttcagatgtcaaaacaagacataacattgggcctcaattttagactttacactgctcaaatttaacacccttattattcattcactatgtgtactcatcctcataagcacttcatatgaattaattcatttaatccttacaccaaccctctgaggtaggcgctattatcagcgtcacttcagagatgaggcaactgaggcctgacaagtcaagcaccttgcccaaggtcacgtggctggtaaggaaagaataaaaatccaacccaggagagctgcccgcagaatctgtgcccccacagttgaaaagggcatgagatttagagtgagggcacgaggacatgactcccggctctgccttggttgggcatttatgcttgctaagcctcagtctttgcatctgagttgggaggcttatcacagagcaagaagaaccatccccaagagggggtggtaattccgggagctgttcctggtccagtcctgggctggtctctacatgccagtcttccttatccaggtgaggggtggattatttgattaaatcagctgctgcaaaggaagcccctctttggatgataggtacaagagagttggtaggagcaacttcttggggtcttcatttctttttccacctccttccctgtgcattctttctttcccctctttccaacaaacatcaaactttgctctgcaaaaatctgatctcagttgtccacactgagtgagactggagatcgacatgttgcatttcccaagtaaggtcatatctctgtatctctaattggggaaaaatctgtgtcttattaaaataattgcagatgccattgagctggtggggaaagcatgtatgtgtgtgttgtatgtgtgtattgtgtatggctgtgttgcttgacttccttaaaagtccagtgcatgtacggaggaagagtgcactccgtgccgtatagacttaggcaagacatctgacatcttgtagcttcagtgcactcatttctaaaataggaataatggtaattcctgcctcatagtgttcttatgagggtgaagtcctgttggaaagcagcaagtgaagggcttggcatgagatgtctgcaatatcataactaactatgattattattctaattgttagctttgttttgggggatagccaactactccaattcagagtaaagacctgtctgagggcagtttgctggcccacaggcttacagagataatccatcaacatgttctccctataaccacacccaccccttgttcccaggactaatgaataatctgataggcctccttcctgccaagagtggagtggcctgccttttctgctgaccacatcggatgcctgtttataagagcttttccccattgcccgagagagaggctgactagggaggaaaaatcaatagtgcagtgaggaaatatgctttcctttcggctctcacctggaaaatgttttttgtttatcatgtgtcttcaagtgttactatttttttttcttcagatctcaggggttgaaagtgactttctgggccattgtttgttcacagaataaccaaatgatgcagagttttgttgccattcttctatctgctcccttttcccaacacacaacctcactaccctcgggtggggcttaaagaaggtggggcagccttctcagacccagcatattcacatttgtaagataaacagccactgtttgtggaggccttcagtgccccaggtgctatgctggaccctaacttattactgaacagaatattcacaatggccttggaaggtatggcagcatcctgggggacgggaggaagatatgtagcctcagagaggtcaagtgacttttttcaagctaccctgccagcaaacaccaaagcagggatttggactaagtctaatgatctgatctggtttatatttcagtataatcttttgttatttatagttgggaaaaaggatgatgaagtctgtcatcctagtacttgactttaaagccccctggagtcttaacctatcttgaaaaaggcctgtcatccaggcacatgggctaagggcattggcaaatccatgaaatcttttagaagcttatagggatcctctggggctttgggcacttgactttgaattagaagagagccagggggagagtggcatcactgtcccttgtcatggacttgctgtttctgctggtgtgatgtcaatatcagccattcctttggattcccaactttgggctgcacctgttgccacatttggcatatgaactgtgatagatacataccttggaacatccctagaggaccagggtcctcacaggtggctctgggtgggaggctatttcatgagaccaactactggggcactccaatctagacatcttcttaaagcagagtgcagtggcaagctcatgtgttctgatgcgtacaagcaaaaacctcaacacccaattccacgatctgttgtgacccagattatacaatctgtaatctccataagagttgggaccatatttgtattcaccagtgttataggacagtacctggcacatcatggacactcagtaaatatttgttgaatgaagaaaaatttggcaaagatgatagtccactctctgtcccctcctgtgtcctttctatataacaagacacatatcctggggtctttaagtcatgttgagctatggaaacagaattaaccaacaagagcatgggagtgagagagagagagagagaaaggaatagggagagagagagagagaatgtgtgagtgtgtgtgtgtgtgtgtgtgtgtgtatgtgcaggtgagcatatgtgagtgtagtttttatctgtcatgagtctagatgctgccccatctagccctagtctggggatcctcctagggggtaggaccatattttaatttgatgccaaggcggttaaaggcctggagagcccccagtgatgccacgtgtgcctctggaattgcatctgctgcttgtaggtgaagattcaggtgaccaaaaaaaggtagtcggtggtgcttttgtgatttagcagtgaaagagccactggcagccacggtttgcctaaaggggaggggtgtgtggttttctgttatatttcgctttcagatcactccaactttagttttcttcctgcttttcattcttagtcaatatcagattctcctttacctcttttccattttggttaatttgagtggattatccctgcatcttaaataattacatccttttgcttgccttccactcacttaatttcaggcagtgtgtatgtgtgtgcacacacaagtgtgtgtttatgtgtgtggggtgtgtgtgtgcattttgtgtgtatgtatatataattataagctttaaggaagatttaaacatctgaaccacacatgaacaatgcacaaactaaagagaaaattgcttggcataaagttagaattacatctttgaattttcttcatgaatttttttttcttgccctgtcttatggtgctgagtgaatgtgttttaaggtcttcaaactatatcatgagaaaattaaggagaaaatatatataactgcccccactttgcccaggagaaattaagatacaaatatatcaagataactgtccggccaggggcggcggctcacacctgtaatcccagcactttgggaggctgaggcaggcagatcacgaggtcaggggatcgagaccatcctggctaacatggtgaaaccccgtctctactaaaaatacaaaaaattagccaggcgtggtggccagcgcctgtagtctcagctactcgggagcctgaggcaggagaatggcgtgaacctgggaggcggagcttgcagtgagcagagatcgcaccactgcactccagcctgggtgacagagcgagactctgtctcaaaaaagaaaaaaaaaagataactgtccaatttaaacaggaaagaaatagtagtatgtcttggattaaaatccaacaacaatttatctgactttgggcagttaaaattatcattaaagaaaataatacgtttactgtagtagtaactttgcttttcaatgtagtaacatttgacctacgcagtctagacattttatttttagtttgaatccctattaagtgaaatgatgttgatcatagttaacaattcatgaatgcttgtaatgggggaagtccatgattttgaggtgagactggcactgctgctgaattagagtttattgataacaatgaagaaaatattgcattcacacctatacagtgtcattaaatagcattttttcctttgaaatgattcataaatgataccttgtaatctgttagagttccatgcctcctactcatgtaaggcggtttatttttggtcatcaaacctaatgaagttttaggagtcttactctactcttaaataaattgtgagatgcaatgatacaatggataactagtggtattatccacatgatttcagtacagagggccctgagttatgtacatagacacaccagctcttctattctttttttttttttcttttttttttgagatggagtctcactctgtcacccaggctggagtgcagtggtatgatctcagctcactgcaacctccacctcctgggttcaagcaattctcgtacctcagtcttccaagtagctgggattgcaggcacgcaccaccacacccagctaattttttgtttttagtacagaaggggtttcgccatgttggccaggctggtctcaaactccttgcctcatgtgatccacctgccttggcctcccaaaatcacttctattcttaatgaaggctttgcagagatggggaaaggctgtcacagtgagaacaacaggcctgaccctcatccccaaaggcactctgcatccttggatctgtctgagccttctggacattaagatgtttttagccgttctgtttttattggaagtaaaagtaaactaaatggttttacccaccttctactggttaaagagttgctgcaatttctttagccttttcttgaaaaactcaaggacgtctgtcattatgctggccaggaatatactgacacttgcaagctactaaggctggcagggctatagtcctctacgctgaatggcttcaggttgctgtgccttttcattttgttttctatatttttttctcccccatgacacaagtggtgcttgagatgattttaatggctttgtgaggtgagtttagattcagattgtattgggttggtgcaaaggtaattggggtttttgccatgcttttttttttttttaaatggcaacaaccacaattacttttgcaccaatgtaatacatggatgtgacccaccttctaccacagtcatggagaagatcccctggggatcatgttaaatgcagactctgatccactaggtctggggtggggctggagattctccatttttaacaagatcccacatgatgctgctgccctggccccttgtgactcaaggtttgatctacagatcggcagcgtgggccccccaggaagcttgctggaaatgctagctctaaggtcttttctgaacctgctgtctctgtatctgcagtcacaacactcccaagtgatccctggacatattaaagtttgggaaccgccgacctaacacactgctggagaccacaccttcacaccttccctagaagcagggttcccatttcttggattccaaaccacttccaaaccacttccaaagagcttgtgggaggatgtttccaggcctgggcatgtcctctcttgggaacacctttaatgtctccaggactttccattccactatgtgcccacctctgtccctgttaagatccttaagctttattaagaccttggtcctctgcatattagctccactgtctgcatgctttgagacagacgccagtggctggagcatggctggagaagggacatcaatctttcttagtactgctactcccagaggatataatttgcttgatagatgtgttctggctgcagctactcagggtagagtgagggattgtgcaaaagcctgggtgcaccagtctttagaaaaattgccacgaggataataaaacctgaaagacaaacaagacgaggaaggaaggtgctctgtggtgtacctggtcccattgccctgtggccggttgtgtgagaagaaataggagtcaaggttctggggtctcacagagtgggggtgtgtggccatcacagtgtcaatcgcaccctgtgggtggcagaatatatttcagaggtggctgcagccatatccctcatccacctgcttttctatagtaagaacttgccactacccagtcaatgggtggagtcatttcccctccctggaatctagactgagcttaggactcacttctaactggagatgacaccccacaacttctgagactaggttggaaaaagccactgagcttctgccttgttctgggatacctgctgtgggggaagccagtagctatgaataattctgaccaccctgagcccacagtgctagagaggaagggtttttctgggggtgggggggtggggtggggttccagatcctttattttcagagcttgcaacagttggttagcaatgctagctaagctggtataatccgaaggcaatccacctttctctttgggcactcaaccaaccgaatctctttcttacaaacaagatcattgaccagttaggatctgtctcaatgtgtgtgtgggaagaggttctctcccccacacttttcccaacaagattgttttatagccaaatgcaaatcaaatccataacacagcaactagtcatctccagtatcactgattccccccacccccagaataggaagttgaggtaagaggggagagactgtgtcctgttataagaaaaataatagcaggggttccagctcctgccagggttccagctaacagcctggtcagtggacagccattgactgtgcccacatgagagattctaagtaggaactacctaggcgatgagcccctctcaatttcctgatccacaaattcatgagcaaaataaaatgttttgaagtaatttgttacgtagctacagaaactggagtattctgaagctttagttatcagagatacactacatattcttaaaaacatccttcaagcaaaatttatttcatttcatttcatgtcttaaaaacacttgggagcagggagtaggttgtcacaaaatcaaacaaagaccgaaaactgtctagtaaaaatatgcagctttaggctagagtaaaatgataatagtaatacaattctaatttttgtttctcttctgtcaggccctacatatatatttcattgtttaactttcattccaactctgtaaggtgtgtctattttagagatgaagaaactgaggctcagaaaatgttaaatgactcattatgtgccacatagccagagcttggatttgaacgttgctggacctgactctagagcctgtcctgcagtggctggaagagttgttaatgagaagagttaaattacaggatgtcctgtccttggatccaagggtttgggacccttaggtatcatttagttcaatgctggggactcctggcccatcagggccacctaggggagtgttttaaaatccacattaccagacaatgttcacttggagtcttaggtctgtggtagggtgttttctagaaggttctgacccttctcaaattgaagtctctgatttagttcagcctcccccattgcagaggccctgggtggggaagcagcttgctccacagcatggagtagctcagttggtgagctggggcagagagcagaggggcagagagcagctggggcagagaccagggcagagagctgatgcccagagagggtgctcctccatgctgctctagaggaattttggagggctgatagcagaagtgacttgcaccccagtgaggggatgcaatagggattctgtaatagaagtgctccagatttagggctggtgaagggttgactgggttctgtgatgatggcactgcaggagtccattcagtcatctggcaaatagctacaagcgatgcctgtgtaccaggcagaggcgctgggggcccagtgctgagcagaacagtcatgggtaccactgctttttgaaattacataaatacacagacttttaggacttaaaacctcagagttaggggaggcagggagagaagggggaagagaaggagggagggagagacagggagagagacacagcagatgggtggattttaggtctcttagatatgcaatagaattgagagtcaggctgatcaaagtgagaatagtttcagtgtcacctgttcaaagtcccaaatagatgttaacttctgtggtctctgagtgcctacagtggcccagcagtgctactgggctctggagtgtctcctgccctccagagtgacactctacagtgacagccctggagtggctcctgccctcacaccctcacaggggagctgaagctgcaaacagcacatgctcatacaacgtcccaaatctgggatagaaagcggggctgtgggactcctgattctgtctggagactgggacggctttagggtgaccaactgttctggtttgctcaagactgaggggtttcctgggatataggacttttggtgctaaaactggaaaagttatggacaaaccaagacagctggccaccttagagggtttcctaggagaagctcagctttctcctcctctcccgctcccctgcgctcctcatcttggatcatggaactccttttcccagaagcccaaaccagaagcctaggaatcagcttcagccactcctgcccacaggttctccatgccatccatttcctccccaatctgctagtctctcttgtagggacagctgccgcaaccccagcacctcccactttgccttctcttctctcctctgagtcccatcctcaccatggccagggccgccattttgaattggaattctcattccatgctcctctgccaaacctctccttggctcaaaatcaaagtcctctagcctggcactcacagccccaaatgacttggcttcttttgccctctccaactgcatctgaagtggtgctgaacttagttcctcaggtaaagattggctggagagctgggaggtggcctgatggctgagatctgaaaaagcaaacccctgcatctctgcccctttcttccccccagtttttctcttggcagtgactgcttttcattgaccaaccgatgaagacagcacacgggcagctgtgccagttactccctcccttatgttccacctcaaacccattttgttttcaagagaccatgctgctgccctggccttgccctattctgacttcagtttccagtttactttggaaccccaagtccttggagtctttgtacacacaaagctactcccttatgcatggaattggtccttctggcaggtagtgatggaagagtctgcaaagtctcagtgattctttcagtccttcccaagcctttgaaccagctgagaactgacagcagggcctgtctctttccccttccccagcaggctggattcccaccctgagggtgcatagaaggggggcctccttgggaacttcccacagcaacagaacgctcaaccttcatgtacttttctttttatgtttcagttttacagagtttttggatccgttccagagagtcatccagccagaagagatctggctctataaaaatcctttggtgcaatcagataacatacctacccgcctcatgtttgtaagtaccatgatttcattccttatttgactgctctctcaaagatgaaccaaatgggttttcatctttgtttttctaaccctgaagacagtgggtggcctgagagaaagagaaggagagcagcccatcaaattaaaatccagttccatgtcatgataagaactgcttggtcatgtgagaagtagtctgttagaaatgctcattccctggtaccacaaagaaatagcactcaaacataaatttaattctctcagcaaggccatttttactttctggagaaagggtgctcatcgcagatggaacaatggcgggaacatgcttgaacaaaggagggaggcaatttttatcccttatgcagcttgtccctgctactgtgtcccgtctccattggctggagccagacctcacagtctaaactaatacccgattggctaacagctgaaaactttcttaaataggtaaaggcaagggagaacaaaggaaaagaggaagttgcttatgaaagatttaaagaagcaataacatttccaaataaggaaggggcataagctataagctaagatttgcctcggcctgtctagacatgcctgagtaagccaaagcaactaactgggctaaagtgtaagaactaacagttgataggaggctttagagtaagaagctattattcctagtgcctattttatttttaaactaagacgagctttgaagaggaacttttctactttctacaagtcattgcccagtattgtggaatgagagaggacttgtttgtctgggctatgctgagttacagtaaaggaagactagaagccagtgatgagaattttctgtcccctctctttttaggataagccttgattctgccaaatgaaggtacccagatagctctgtttaaacctctgttctggttttagctggtcagtttttggccactaataagactaccctgtgcttcaacctcttgagagtgtcttgtgtctctctccttctagaataaatgggcaagcacccatagagctggtgaatatattgagataaattttacctctcccaccctcaatgccacatggcaattgccacatggcagttgtaaccttttacatttcactgcctatatgccaggctttttgcggagagcttaagaaatggtggtctaatttaattccacccagcatcccagtgaggaagatgtcattattgtccacatttcacagatgcaaaactgcattccaagagagatgagggaacttgcccaaggtcacacagctagtgagcacagcaccaggttctagcggccagctcttggagctcagctctcagccaagaggctgccctgagggttgggggcagagtgtctgggactccttgctgatgctaatgaagccctggagaattggaggattaccatcaaacctttctagaacagaggaaatatttaagctcctctttgttatggaacgataatgtcacttttggatgggcagcctcccagcagtttgaaggttattcctgttgacctgccatggtgtcttgtgcctctctgggaactgctccagaaacttcatagacacaccgggaacatttttgtattttgaaagaaatccctctgattttacagaggaaattttgttaattagtgatgattggaaagatctgtgtttttgcaaactcttggaaatgcccataatgccagcgagcattaaagtattattttaattgcttcttaataattacttttctactggaaagtaaactggatttttataaatcttagggaaattgacaaattagggtggttgtgagtagggaattactaacacatgactactaaaatcagccttttttcatttctgctgtaactcaaatattctataaatcctagatataaaggaagcagtgtgtgtgtaatgagtttactcaatggctttaatagggagaagcttctatttatcagttactcctatttttcataacattttacatttcatgtgttgtaaaaacacaatttggagatgaatgttcatatgggatgttgtgagaaatctgtggctgtgtcctagatttatgaacaatggattgttttgaagtctagatacaaatgccacaaatattctggctacagacgtaaatacgatggagcaatttgcatgctggcggtggtagaaattagtcagtagagggcttattcagtgctggggttctcagagaacagaaggatattcagctacacatactgattcataccctctattctaatgaaataagttcaaccttttatttcattaatagcagttgataaatttcattcatttggtcacacgatttagtacaattccataataacataaggaaagcagtagatacatttataatacctataacacaaagatgaaaaatattttgtcaccccataaaaaagatttgttctcctgggttttaagaatttaatataaggcattatattattttggtcttttaaaaccttcagatgttagtagaagaattggtaatagaacatccattttcactgatgtataaaatggcttgattttctttgaaagctcacattttttcatttactacataaaaaaattcttggggtctcctttaattttggttggaatgttttaatctaaagatgaactttctttcttaccaaggtgttttttaaaggtagctggcattgacttggattttcttttattggataatgaatgcttctagagtcatctgtgtgcaatttagaggagccaattcggcaaatgtaacaagaaaattaacagaatgatggctaggggattaagtgcagagtaaatggtaataatgtcactggaagcctcctaacttgcactttcgctgtctgtggcaccattagctcaggtgatgtctgtcactctgaaagttgggtgtagttggaactgtttgattccaagagcttgtttcccttgacaacccagtgttcctgttgaccagagagactggctgagaattcttttcagatgcactcaaaagtcttgcttaacatttctgggatatgcccaaggcctttatggaaggctgtttcctcattcaaaagaggtaccggtttcctgctgagtgtgagaggtttatcagaatattttttaaaacctactttttgtgtaggacaacttaatcggtattagttgttgctctttggtatactttttgttgtctatagtagttgtgtctttgtacattcaggggacattttcagggagcctgctgtgggtaaagaaaaccataggggctataggggatgagaagtccaatgagacttgggaggtaccctcagggaccttccaggatccctggtacattaggatggtactctaatacaaaatggaatctgaaaagggccagaggagaggctcaggtaaacttctagggaagttcttcatcatcatcatcattatcatcatcatcatcatcatcatcattatcatcatcatcatcaacaacagtaaacatttcttgaattcaggggctgtgcttatcactttataaagaacatctcagttaatcttcagaatcctttgaggtcagcacttttgttaatctcatgtcagtggagaaaacaaaactgaggaaattatacagcttgtccgagattatacaactgtcagtggctgaaccaggatctgagcactggctgtgagtgcaaactctcacttggaggcactccgctgtgatgcttccttggtgattggttaggtggagaggcgtgtaaaggcagagaaatggagagtgagcctgtgtgggtcctgtcaataggagtttgtttggagtatctatgcgtaagggctaagaaagggggcagggatagagctagactgggggtagctttagattggttaattacaagctaattcagtggatggttatgaaacacttgccatgaggaaagatgaataagatatggtttctagtctagggaggggcacagacatgaacacaaggtgaacagttcagcatcactaaaaagccttgaggaataggtaagactcagtaagaagtttaaggaatgataggttttgcaaattttttccttggcttccaaaagaaatccacccaaggcctattctttgccctcttctctttttgcttcgaccgtgatatgtccagaagatacattctcatagactattactgatagatactgtgttgatttgataccagggttttctattctgggataggatgcttctaaggaaggcagaaataaagtcattttggggaggaagaaggaagaaaaagagacaaggctggatcatgatagacaatttaatttttaggctctttttaagagtcttagacagctcttttatctgtgatgggatgtaattgtttacccagagcagggccttttccaagtgtctgagtgtcttaaagttgtctttataatcaccctgcagcacacctttctgtcaaaagccagaaatgaaggcactttgggcccattgttttgttttgtctgttgtgaataaaccccagtgacaagctcctctctggctaacaccctcgcatcgaggctgctctggcttcgatcccttctggttgttagaagtccttggcatcctcatgccctcccccatcaaacacactgcttcacattttgtggtttcccagaagcgccccggcagtgtggtgcatggtgccttacatcagcaggtggggatgactcactttctgggtgcagcactggccagggattgacgccccttcctgtgttgattcatgggtggatgctccataacttagtttgtcgtttagggtatggtcagggtgcctgggagagttaggctccctcttctctccccaacctcctcctgctactcaaaggtgcacactacttagatctaagggtgcaggtgggcttgaattgaaaatgcatcaatcctatgtgtctggtgacaagatcttgatacccttttaacagtcttttctagaaaataatgaaatactagtcaacaaccagcatttgccggatgctagctctctgttggatcctgttggtgggcagttggtttgggctccacagtggcctacaaggggtcaactcccagctttgccattcactagctatgcaaatttggaagatcacctcccctcttagcaccttactttctttatctgtgaaaggtgtctttaagaacatgtcccatcaagctctagagagcatcagatgggggtgacagacctttggcacttcacttagtgtgtggcacctaatcagcattccataactattagtgaattgaaatcctgccaataatacttgccatggatattattatcgtcatacccatttatagataaggaaactgagaatcaaagaggttacatgatttgctcaaggacaaagaatggataagtgtcaggagctagggctgaactcacctctcctcaatctgagtccattccgcacatttttttttgtacagagctctggcttcccagcctgtggaatacatacaaaactagccacattccagatcctgcttaatgatacatacactatctctttatgtgggcactgtgcagtacaattagtaactttaaagatggtgttcaatatataatctctgccagcctcagtttccccatctgtaaactaaagcttttgggctaagggaatcaccgagattcaggactccaacccaggagcatggcaacccagtctgggagtcttggtcctactagctgtgtgcatttgtgtgttcactcatctctctgagttttagtttggttatttgtacaatgggaataatattttccatagcagaatagttagaagattggaaagtgtgaggaaagtccataacacgtagtaggtgcttaagatatgacagctgtcactgaaatttctatgacttatctatgacctggaaacaagcctccttacctttcttttttaacttggaaaaaaagcatgcactatgttttatttaatgtttactttctagggtaggaactgctctaacattgtggtcaaaagtgcagagcctaatttagatggtctgggtgcaactcctcattttaccacttgattagttgtgtgacttccagcaggttgctgaacctctctgtgctttattttcctatgcattaagtaagaagccttttccatgtaggattgctgtgagaagtgaatgagttaatttgcatggggtgcctagaatagactatagtccttagtaagttctcagtacacgttagcctttgttattgtaacctaggtatgtacattcagcagccccatactcataacaagtgagcagaactcaagtccaagaagggttcaatatgttctctgaatcctgcagcagtgttcggctggaattctttgttttctctcaggtctcagttaataagctctgaccactccccatcttcctaccctgggctcatcctaggatttcctaggatttgattcttttaaaattagccatggaaacattaacagaagagaaaacaataccaagggagactttgcttgctcatgtttttcctccacctctgcccatgtgtggaggtacaagggagcatccccaccttacgtccctctgtacatcttcatctgctcccctggctcgggcagcagaactgcagctaccaatggcctttgtcgaaagagtggaatgcttatgcactggtttcaattcagtctgctttgctgagtgaaagtgaggtggtggggtgcttactcgcctcattcctcctttacccagttcagaggtgttttgccctaggaggaagtcgttttcctaatgtgttggcttctgaagttcacctcttaattccaactttcatttaaaaatgtttgtgtacaagggggtgaatgatacatgtaactatgtctctatccatcctgattcacggactgtgctgcccaaggatatggcagatacatttccaggagaagaatgagacactagggcccattgcttttaggatgagaggaggaaacaagccacatcttgcaatcacacagacacctctgctgcagcaactctggggtgggaaccatggcattttgaaggctgcattcccttgcctgggaagcccttgatatggggagccttgggccctcctaggtgcttagcattggctcaagagcagttgatagtggtcctagaaaagataccaatatgcatctacctaggaaatttgcagcatgagttaaattaagtccagccttgttggggaagtgggggtgagggtccaattaggaagaggcaagttgaggcagggcgcagttctaaaggagaccactgggccatcaggccatgagcttggagtcattgggcagctctaatgaattcttcagcctgcacacctggccttgatcctgagcgcctcccacctggcacccacatctcctatgtgggcagtgactttctgctctggaatttcctttggaagcctcattgggaaagtcatcccaactcatacttttttctggggtttcattgttgcctaaccttagattataccagctgggattgccttgaaatgtttccttcaaaaccatgttgttctcctatataaacactgacttggtagtatcattactgggtcgtccactatttagtgagttgctttctcctatttgggagcacattgcctggtctgtatgcagtgcttaaagggacagaaaacaggaaggtaagctggtagccttcatgtttggatttggagaaacaaggacttctttgaccttgaccataacattggactttagtaagtggtgcttcaattcttgttctttaagcactaaatgcatgagacaaaagtctaaggcataattctcaatcatcagcatcagtaccatttgagatattgttaaaaatgtacatttccgggccaggtgcggtggctcacacctgtaatcccagcactttgggaggccgaggtggcggatcatgaggtcaggagatagagaccatcctggctaacacggtgaaaccccatctctactaaaaaagtacaaaaacttagccgggcgtggtggcgggcgcctgtagtcccagctatttgggaggctgaggcaggagaatggcgtgaacccaggaggcagagcttgcagtgagccgagatcgcaccactgcactccagcctgggtgacagagtgagactccgtctcaaaaaaaaaacaaaatgtacatttccagaccagctgtataagcatgtttgaggaaatcagtacttcaacaagccgtgtagttatttaggtgtgagagctgcccaataatttatggcacagacttactggacctcttaactcaggagtgttgcccttctgaatagcccccaggggaatcctctgttttctctgtagcagttctgaatctcctctagtgcatcagccctttagcacctgaataccctccatggtggcaagacttgcttatttgacttttaaacaatccaagtcattcagggccacagctgaatcatcaaactggttactaccacttctggtcagaaataaatggtagcaggtaaggagagggcttttttcatgtctcatacaaatggcctctgaagacagttcccaaagaggagtccccgagataatttgagctctagcagtctggttgtagtaagggtgtggagcatctaagcctgcattcatttggttgaattctgtttttataaaagaagagctcttggccaacatggtgagaccccatctctgctaaaaatacaaaaattagctgggcgtggtggtgtgcacctgtagtcccagctactcaggaggctgaggcaggagaattgcttgaacccgggaggtggaggttgcagtgagcggagatcactccactgcactccagcctggtgacagagtgagactctatctaaaaaaataaaaaatacatttaaaaaagaagagcatattccagccatgccttagttccatcaggaaacccctctccaaaaagtgatgtcttactagagcagagagagagatttccagaattatgaacactattcgtcaacagttacaccccagccctcccaccactgactgctaggccaattctggatttgtgagatgttcagtctcttctgatattgttatcctgagatgttatagtcatgaagaagcaacaaaaaatgccttttatatggttggtggaaggtttaaaaacaatttactaattacggaagctggaataaagactcaatatgggaatggaaaccttgtccccaaatcctagcctcgcccctctccagttgtatgttcccaggcacatcacctagtcctcaagcctggaggaggcagtcacagagttatcatgaggatgtaagaggctcctggacttgatggtaccaccagtaccatggtttccacctcacagtaggttctgtaatgagtgttggctgcatctgaatcccaccagtttaactcattaagtctgagttgagcatctatgtggaggaaagggtatagaggaaggaagagtagagtctttaaacaaacggactaaactctgctttgcagaagagataaatattcaacaaaagaacaccaaaagaaaatgaattgattgactctaagtgagtctcaaatgcactcgtgtttccagagagataggagttggaggccaagggttcttcacccttccacagaggagagcatgaggggaattactggcagacatgattcatcgtaattatagactattcttttccatttaaaaagtcactgctttaaacatggctctcagcaattacaaatcaattataacctacaatcagatcttccatttttaaagtctgtgtagtctctaaacacagacatacatcatccttttttttttgtttgtttgaggtcaggagttcagtaagattattcaaccagggagtctaaatgaaactaacgggaactaattatcaatcagcccttctgatagcaaactgatgtcctcataagggattgtttgttatttcttccaggcaatttctttcctcacacccctggctgttatttgtgtggtgaaaattatccggcgaacagacaagactgaaattaaggaagccttcttaggtagagtattcacagttcctgctttagggaatggggctgaccttaattagatgatcacatttaagaaatctcagttacacccaactgatttttttcttttggtcaaattaagctggggaggaacaagataagataaagataaactttaagcccaaagaagagccaacgtgcggtcctaaatgaaggatgttcagacaccgcccactgtcgctgtccgttgtgctgaatgctcgtaacaccctgtacacaccagagagctgtgctgctcaggcgcagactccgggtagctcttggcagtaaggcaaagtaaatctaaaactttgttgcctctgactgtccactctcacatttttggctaatagacccacattatgggcaattcagcaatcaaccacagactcctcgaccaaacactgttggctagaagcaataataggcaaatgcgggagtaaaataaaatagatattacaaacaagctctataactcatcttaagtttgaagatattttggtagttaagtgttcattattatgtgaagagtgctatgatctttgtcattgattataacatcattgttataaagtcttcccaagacgagccatgtctgcatgggacaagagtttgacatttcaggattaaatgcgtttttctggtcttcatgataatcaaatcctgagtaaatgacagcattaagagatagccaaaacgacttggcttgtttagcaaacaaaataaactaacctgtagccaggttttcagctttttgaccgtgagaaaaaccaaatcaggttgattttttctttttttgacacgtcacctaaaagttacccaaatcctcagcccaaattttgtttttggtgtgttatatggacttaccattcaatgggctagtaagtctggaaaatgagagccttcacttaagggtatgtttgtttgttaattattgggctttggggaaatgaaaatgtagcaaaatatgatcctcccttttccatggtaagggagtgagtgtgagagctgcatctagggagtgtgggacaagcagcagctcctgccctaaagcagcacagagaacgcttcctatataaccaggctcctgttaggccttatctacttgaaacgaacagaatccctctcaaattagctcaaataaattaggggtttaattacagggctctgataagcaatctcacagacatccaagaaaaagggggaaaggttcagaggcacctcacagggactggaatggggagctgggccatcaggaggggagacctccctcttggctcatgaccactgcaatgtgccttgcctcttctcctcacactcccagcctgattcttctgcctcaactttgtttctgctgccccatgtctggtttatgtgaggcttgggcttgcagtggtggtgatttctgccacaaatctgtctgcctgttcaacttcggtgcccacccaccaagcttcactgtgtttcttggtccagacttcctagacagagtctctggctcagctcatttctccagcctggacacaaaagccatgagtccctggccagcctgtcgatgccctccctcaggtcaggtgtgtaccgcaggctgcccttgtgtggcttggacttttggtcacaggtttcagtctcctcagctgaggtggaaaaaggtcacattctccaaggattcaggtaggtgtgcctccacacatggcttgagtggccgggcagtgtttggatggatatcaccatagtctccaaaaagtgctgttgggagccccctcagttcatttggaaatccctttagttcattctttattctagtggctcccctggcatggagtctcaagataagtgactgtgggtgagaactgtctttcatggttatggttctcactgacggctggcttttggagtggggctgctgtcacagcagtaagtagctcacagttgccttctccagacttttcattctcagctaaatctcccttagggtgacatttcaaaattgaacatcatactctgtctcctatacgttaacagagaaggtggaattattggatgttctgtttgcctaaataaatgagagcctgccatataaaaatgatgaacagcctcccattgtgtgtagaggtttttttttcaatcactatttttaggaagcctcggaagtagcgggtgggagtgggtgatccttaaaagccaaggacagaaaacagggtgtagattttccagtgttgtctggaattcaggactctatcgaccaggaggtttagttcttagcatgcttctttactcagatgtcttcagcagactttaacccaggcttccaaacctggatcccaagtgctgccctcatctccaggtaaacagtggccatgtttgtgcatctggcattggatgagaggagtgaggtttgccccatgcagcattgggcttttaggaattcaggctgcagaacagtcaggtctgtataatagagaaccctcttataaaagcacgatagtgctgaatttcctacaacaaaagtaacaacaaaagccctctaatctcctggaatgcttataaccagtagcgtcctgagtacaggctgcttacaagccgactcacgggacatgttgctttgagattttttatcagacacagtatggtttgtctttttgactcttctctgaaacccacagtgctgtgggatgctgtaaaaagagaacagcccttatgaatcagacccactgggttattgctaatgaacaagtattcctgataggggccatttattttcctgtttgtccagcctttcatgggtctgatcccagcacagccttctctggtatcaatgaggggctcctgcattgatccccggagggttgtgctattccagtaaaaatattaagcagtttggtttccttctagaatgctgaaatgacctccatgttaaatatcatcaccagcttcctacctttctgtttccttcaggtgtttggattagacagggaagttgccaactgtaggtggttatatcatatccatacattttccagctcagctatttcagactttttaaagaactgctctgtgctgcgataagcccaccaggctcagaggctggggaagtgatccatgtggctgtgtatgaagttcaccaagatttacatggggcgatagggaattggctagggatgcttgttcccagagaggccatgctaggaccaggatgataatgagttcagccccactgggaaaacacagccgtgagcgtggcaggccagccctaacagagaaaagaccacagtaattttgcggcaatctcacaacctgttaattatcagggtttgtggagagaatatggcaaagatatcccagagaatttgctctcgccttttggagacaggcctctccacagtgctctgagcttgccagagagaagggaagctggcatttgaggaaggaaggatctgtgtgttcagaatgcaatcagtggatctttccaagttccctcatattcagttccaatttctgcacccccattgcatgctcagtgttttaatggcagtgctgtgcggctgattcacactctgccctccaagtctgtggcctgtccctcctttctgccacactcagatatggccagttgcccccatctcacacttaggtgatttgtttccctttgacaaagatgttcatttgaatgtgtccctcccattctttctgcttcggataacttgttaaaagcaggtgggttgtgttcccatctctgtggcttgtactcttagtgaccatgttggccattccacagtactttctgctcatagaacaacacgtttgtctctctcgatgggccatgaattgccctaggcagctccttcccgaaaatgcccccattcactgctatattcttatataaatctcagctagtgttgaacagttaatatttgccaaagggaaatggtagctcacatgctttattattcaacaaagcagtggatggggcatcaataggtttgtactgcttctgtgaggcatttgaccttctatcacattgatggtgatgactctgccttttacgcactctcgataaaccacaggagagaggtacaacattttgcagtgaaagctctgtgactcatgttacctgccgccttcgggacaatctgtgctgcatctggcaaagtcttcccagactgtttggagaaagtccctgtgctctgtatggtcaaataatgtatcccagaagttcttgctgttttagatggcaaaaagcaccgcccgggcagaccttctccaaacccagtgaggcttttggactctgcaccttggcagaaacagtgatttgtttgataacaaatggacagctgtcggccggtgatgggtcaataatgagataattgccgagtgggaatgtccttttctgcagtaggattccagcagctgctctgattagaattatgtctgagaaggttgccaggaggaaataaaaaaagttatgtttcttgttaccagtaaaagaaattctacatgctgtggtattaaatctgttcatatcaggccagaaaatgatagataagctcctctgtgattgtgaaaatttcagtcaaggaggagagataaatttcatgtcacaggggcctagaattttatgagtcactctccaaagtcctggcataattatattttgctctctagcaacccaaacgtatctctgttttcaaagtattcgttcatatttctctggtcattaaatagtattataatgtaacagtgatgatgatgataatgatgatgatgattttgatttaagagccagcttgctatttttctgtctgttggttttgttttgtagcggtgtccttggctcttgctttgaatggagtctgcacaaacactattaaattaatagtgggaaggtaagttccaagaagaatgaaatggtgacttagactatcaaggtcatctatataggaagctgggccagaggacactggatgggacagatttgagctcatctagttctcccttaaattgttgtccttctgagatttccatccttagcacagatctttcctttgaattacaaactcactattttagaaagcagatcactagcaaggaagtgcccactgactgcactttcttgtgggacaaagcttactgctggcattttcagattcttcccctgccagcccagggcctcccctgacacccactcacttgtcagttttggcctctaataagtaggattacttacctgtcattctcttcaggatgagacatatggattggcatttgagccttggcttatggcacatttctcttaatgcccctgagaaatgatttctgttttccatttatctttccttctcttctgactgctctggtgaagagctggtctctacagacatgagcagtcaaaacatctgaattcaagacctaactaactctagctggctgttggcctgggacacactagatcccctctcagaacgttaggatttattttatctactggatgcaggccagggactgagggggcaggagatagataaaaatcaggcagtacatggcctgttgctgctgtgttcccttaactttgtgtgccctgaccagtgcttactctcaggcctcacccctctgaggttctggtgcattaggtggacatccatacttggagaaacagtggctgagtaccagagagacagtaccccagctgttctggtagactgcttaggccctactggagttgcagagctgaaggaccagtgaccaggactgtgacctggagtgctcagaaagcaagcgctatgtttccaacattagctaaacttcacccgtggtaggtgctcagcgaatattagttgagtatgaatgtgaggtgataggccatcacccacctgtgtgaggaccctcattcaagtgaggcagtaaagcatggggtgaaatgtgtcagcatgaagatccaggcgctggtgttcaaagcttgtccttgccacttacgggatgtgtgtgaccttgagcaatgaagagccttcatttttgcacctgtaaaatacagacagctccaggctctgcctcagggttctcctaaggattatatggcacagcaggtgtgtggagcttagcactgtgtctgaagcctagtaagcactcaggacttcctgcagctgtgattgctgcaggaggctcgacttcaggcccagggccacccctatgtgcctctagagatctctttcccatgtcctagaccagagaggccaacctggggcactgtgtcttctgcatcatggagctgagtgttcaaggtctctcagtgaggccaggtgaggcctgccatttcaggaagggcaagtggccacccaaattcaggatatacggacacgaggagcctggagtcttggatcccagaggcaacctctgaaatagatcaagcggtagagtggtagattaataggattacttatttatcgttctcttcaggctgagacctatggattggcatttgagcaatgcatgccaatatccaacaatagagcggtagatcaagacaggaagtaacttctagtccacagatggcatgaagccttccttttcacacctgtcaaacaaggaacttgggccagaggacactgcttaggtgcctcctgtaagtcatgtcactctatccacaggacctcagctttgggtcagtattgatttcccccttctacagatgtggaaactgaagctgggggagaccaactgaccttcccaaggtcataaagtgagtaagtggtacatgggagcgccaactcagatttctctgacaccaaaacctgagctttttcccaaacggctgtgtctagagtattctgtgaggagctccagtgttgacagccaagggggctgaggaaagagctgggggcagtggggagttgggggggtcagcttggggtcatttgtgatggcagcattttatattgaaaatgtccatggtgtcttttgtagacctcgccccgatttcttttaccgctgctttccagatggagtgatgaactcggaaatgcattgcacaggtgaccccgatctggtgtccgagggccgcaaaagcttccccagcatccattcctcctgtaagttcatggctgggattctcttaatgcccccagtcatgtttcctgctcactgtctttgggaatttaggtgcagagaaaagcactggtacaggaatgttaagcgcagttcatttttcttcactttacggcgtttgacttagaaacaagattattcaacaggaagtaatatgcccaggatgaggctctggagcttataaaacattgcatgtgttgctttcatgagcttggcagagcataacatgtgatactttacccctgcacagtacgatttaggacaagggaattctctacgctccctgggagcctccattgtttaggtcattgttctctctagtttatttcttcaattcaggtgttgcgtgtgtgtgtacacaaatatatagcacatatgtatacatatatacatatacatacatatgttacatgtatatacatatactttcccccatgcctccagtttatagtctgactatagatgtgtgaacaccttaaaacaaagacttaatactgtgaatcagaagccgtgcaatgtagctgaaaaggagacaggtctctgaagtctaacaaaccctggctctgccaggtattagctctgtgacttcacctccctgtgcctcagttcctgctgtgtaacatgggaataagaatgcctccattattggttggaatgaggattaaaataagtggtgatgatcgctcacatttctggagcagcagctatgccaaaatggcaacataaattatcttatttaatccatgcagtatatgtaaagcgcttagtattgtgactttcaataaacagtagttatctacatgattattgattatcagagctgaagtttcctgagtattctggcttgtgccatcatccattcatcagttcatattgcatgggggatgcaaagataaataagatgcagcttgtgtcctggggagtgcccaggtagtgacagatggtgtatttaagttgatgattcctgggataattggagaactatggtcacaggtgaccatcttgaataggacaggctcttctcatgatgccaagtccttaattctcccacgagtctgattattatttacctttagcaagcctgctattttagtttcttttttccctaaatacccgagacacatcctactaatggctgaatcaagaaataactgaacgctgtttcctggggactgtctgttgaacatgttgctcagagccgttgaagaatagggcctgtcaacgagacattagctgggggcagacactctaaatgaatcactgtcaacttgcacaacaacctaccaggtgggggattgtcccagttttacacataagggcactgaggatcaggcaggcttggtaacttgtctaaggacaccagctctgacaggaatagctgtaggtaccagctggaggaattcctgctgtcttgggactttcaatgatcaaatacaacaaaacatttacagtccatgtttatttaagtaaataacaaattttcttctctagtttgttggaaacggtggtgagttgagtagttgcctccaaacagatacgtttaagtcccagcccctggaacgtgtgagtgtgaaccttatttggaaaaagtgtcttggttgataataatatgacatcgtagactagaaatttgctaagagagtagatttcaggtgctgtcatcacaaaaaaataaagtaaccatgtgatgagatggatatggtaacttgtttgactgtcgtaatcctttcgctatgtgtatttttatttgaaagaatgaacactgttttacatgccaaaaaagaaaaaggaaaagtaaaaggatcttggcagatgcaattaagttcagatctggagatgagatcattctggatttagggtgagccctaagcccagtggcaggtgtccttataaaagaaaggatcggccaggtgcagtggctcacgcctgtaatcccagcactttgggagcccaaggcgggtggatcacgaggtcaggagatgaagaccatcctggccaacatggtgaaaccccacctctactaaaaacacacacaaaaaaattagctggacttggtggcgcatgcctgtaatcccagctactcaggaggctgaggcaggaaaacagcttgaaccagggggtcagaggttacagtgacctaagattgtgccagtgtactccagcctggcaacagagtgagactccatctcaagaaaagaaaaaaaaaaaagctcaaaattcttgtaggctctagccattcctgtgacttacggcagaacacccgtttggagttgcttcctctctaaacatgtttttttcctctatgcagtcccattttaagtgagcacctgttttggaggccttgtagttaccagctggaggaattccttctgtattgattttttgtctccttgtttccagggagtcccatgctggcattgtttagaggtacctggaatagtattcacctgggatcagctcccatctgctctccatctgtctcctggtagggtcactcaagttctcttagattttttctccctttgttctcttctccttttcttctcttccttctttcattcctcccttctccctcctgtcactttctgtcctcccaaagacttggtgctgaatcttaaggggcttcagaaattaaaagcacctaagaagtgaaattctaaggaataccttaatacgggcttccagaatggttggtaggggactgtagcacaatttactgtctactgttgcatttgaacttgggaacgaaatagctgtcatgtgaatatctcaagctgtcagactactggacctcagaggttagaagctggaccccaaaaaagatgttgatttcagatgcgcaccctcccctccaaccagcaggaagcattttccgacatggctggctttcggctgccttgtcaaatggtggctgacatctgatctgtgctagacaagctttttgacagaggcaattatatcctttgcttatgatgctgcttaaaatgttacccatttttactacctggcagacatggaattctacccagtctgtaggctttgatggtggtattttcatttattttctcctttttttaaatgacaggttagtgattggcttgaagggagtgccataaccacttagaaaaaacaccgatgctgttttctggatttcttagtagctaataagaagcctagtagttgatgtgactgctcctcagagggggtgacctaagtggactcccattttgatataaacactcttttttttccttaaaaaatcaatttcataggctggacttgagtgactgggtaggggagttctggactgagggatctcctaagactaattctccatgctaggtagacatgggttttgcttctgctgtgtttgcagataattggcggctggaatgaagtccaggtcctcatatcgtccttagaacagctggttttctttgaacttaagaacaaacattgatttcttttggaaacaaaggatcttgttcttaatctaccataagcagccaaacaacacttgtctgaagggcttttgtgtcaaactctcagcaaacagcatttccccatggcagcgtttttatggggcttgctctgtaaggcagcctaagccacccttgattggaaaagcagagaccacaatttcaaagagcaagtgattttcatccaacctaaaagaagcttaggctttaaagtggagaaaggcagtgtaccttcccatagtgcttaaagcagggatattctgaaaagagaatttgtctctcagagcgtaatcccgattttttattgagtactgattcaacttccagagagaggatagatatgagagaaaaatagaaaaaacaaattattaatgctaagtcgaggtattaagaaacttctttcctgtgaaaatggtgggaataaataaagcaatactctcatccaggtgtcagcgaatgacagcatgtggaccaagtccagtggctgctagcttttgtaggtagagttttacgggaacacagagatgcctgttcatttccatgttgtctatggcctctttcactttacaatggccatgttgaggagttgtagaagagaaacatggcccacaaaactgaaaatatttattatctggccctttacagagaaaatttactaaccttgcagtcgcccatgctccaaacagatagtattaaaaagctttactaaagcaagaccagtgcactcaaattgtgcacatgaatgtttcaattttaaacattttaaaactctattacagtataaaaaggggcagttgttgcttgtggaatacattttttaaatgacggagaaagcctaaaaggtatgcctggctgatgaagattcaacagatgattcttgagttctttccgttaggtatgtaccaggatgagcccttggggagagtacagggtgatcagacatggcccacgttttcctccaggatgaaggcaaacactaagttgttgaacaccacactctgggattggggagctgagaattccaatcaggggacagggaaagcctccagggaggaaaagccctttatcttgtagtttcccataaatgagtacatacaagttacatgttttgagatgtttactattctttagctgcatgtagaattctaggaggaaaatcatttccatgcaggattccagttcacactgtgcttgagaagtctgactgcattcctttcctttgctttgtttttctttctttctttggaaccttttatggtcctttctctgtgtctcaccatctaaagtccacaatgatgtaccttaccgggatttgtttttggtatttatcgttctgctaactctgtaggtctttttaatctggaacttcatgtgcctcacctttgtattccccgtttcttctccttggaactgtattaggcagatgttgagtctcctggactgatcttatctttttagtatctcttctttcctactgtctagctctttgtcttttttgttcatccatcagggagactttaaaatttttatctactaaagcttctatagaatttttattatgatttttatatttttaatttccaagagctctttcttgaactctgattagaaaaatcattaacatcctttttttgtcttttcatggatacatcatctcttaccccgctttgtttgccggtttcatgtgtgccctgccttccctttatttgtgtgtttttgtatctagctttccttaaatatctggtacctttgctgtgtgttgtgatttaaggttgagtcataaagctaattgggcagggcttgttaattgggcttcactgagggtgactggtgtgagctgggttttcattggttgacctccagtgttagctagcgtctggcctttactttgaggctgtttgattccctagaggaggctcttcatactcctgcctggtgtatgtgaacctggcattctggaagctgtgcagaagggcgtaggtgctcacaggtcagttcttagtctttcacatcatctccctattttccatctgtttgttcaggcatgccctctactcatctgtttttccaaaaccagagcctcagatagttaaaacttctgtcttcctcaaaagttggaaaggggatggtttcctggctttgaaggaggggtggaaacctggagagtttagcttctctttatcggcactttccacctatttgcctgtttctagccccatagttcaccccctgccttctgcagtacctggtgcctttagtttcaaagctctgcagggccctgcctggtgaatgggctgcctctcatcagcaccaccctctgcaggtgtgtagattgagctgtcttcagctctgcaagtcagtatctactttgccacctgcttcccatcttcatagagtgatgtggtgttcaggtgctccgagatggaatgtgtgttcttgtttgtattagtgagggctctctggagaaacaaaaccagtaggatgtctgtctgtctgtctacctatctgtctatttgtctgtctacctatctatcaatcaatcatcagtcatgtatctatcttagcaatcaatcaattgattgatttattttagggaattggttcatgaaattgtagtggctggcaagtctgaaatctatagggcagggtggcaggctggaaattcaggtaagaattgatgttacattgttgaccccccaaatatgcggaccagcaggctggaactcagataggatttctacgctgcagtcttgacgtagaactccttcttatctgggaaacctcaatctttactcttaaggccttcaactgattggatgaggcccctcacattatataaagggtaataaataataccctccataatttcttacttaaactcaattgattgcaaacgttcctcactgctaaaaatacctttacggtaacatctaggctggtgtgtgtttgactgaacaactggccaccatagtctagccaagttgacacataaggttaccgatcacactgtttttcctttcttcctgcatcattttaaagtcacaaataccatcatgatggtctaatgcattcgttgtagaggaatcattttttagagagttcttgctttgcctcagtgttattactgttgatagcagagtccttgagggtggaggatacagactatagggtcttttaccagctgcgtgtctgggagtttgcttttgctgaaggaatctaagtaggttttaactatgaattgagaaattatcacatgatagcatgcatctatgccaggtttaatgccatcgagcatgaatattcattattataaaccagctggttcttagagtggttgggcaggcctttgcataaagaaagaggaaacaggaaagtagaggaaattgcaagatttgtttgttttgcttcatttaatggaatgaaattgctgtcaaggggttttgctggtagatgggaaatttgaaaaataccactctccgtttttttttttttttttttttttgaggcggagtctcactctgtcgcccaggctggagtgcagcggcgcgatctcggctcactgcaagctccgcctgccgggttcacgccattctcctgcctccgcctcccaagtagctgggactacaggcgcctgccaccatgctcggctaattttttgtatttttagtagagacggggtttcaccgtgttagccaggatggtctccatctcctgacctcgtgatccgtccgcctcggcctcccaaagtgctgggattacagacgtgagccaccacgcccggccgccactctcctttcttttaagaattgtataaaatggcatgggctgcttaggtcatttgttccaacaggacacattggtggccatgtgtctgaggtcacctcaacttgtatggtttctcttataacttacaaatgaaagctcccagattcactgatatgtcaaggggtatcagcgaacttggcaagatcccctcatggttttttccctgaatttttataaccctacatctcaagcttccaagacaattgcggaggttctgggaagtaacaacagttgttttgccaaataaaggaagactccccctagatcctgggaggcttgctttgggcatgccaagtccctggagggaatggttgtttaaagctgaatcagacctctttggagggcaatgtttctcaacttgttgtttttttgttttgttttgtttttttatcactccctcctccccatggagcctttttagatttttaaaaaataattccccaccataaaatgttaatgctgcagatatattgtatatctgtttatgtcttaaaaatataagcatctaggttcacagtcatgttaagggacatcagcatactaggcaagagcccctcatgttttttttttttccctaatgattttttccctaaataactgtcatttctaagattttaagatctccccaggaaccaattaccaattttcatctcctcagggggcatatgagaatgcatgttctagggcagtggttctccactgggcagttttgcaccccccaggggacatttagcaatgtctggagacatttttggttgtcacaagtgtgcgtgtgtgtgtgtgtgtgcgtgcatgtgtaacagggggtgctattggcatctcgagaacagaggtcaaggatgctgctgaatatcctgcagggcacaggacagcccctgtggcaaagaattatctggcctcaaatgtgaatagtgtccaggctgaggaagcctgttctagggtaattaggcaaatatatggaagaaattgatcactgtgttaaattcgtccactctccaagttcctggtctgaataagtagaatatttttagcaatggatactgtttaattaattcaaaatactctttctcaaagaaatagctcactatttgatttctatgaaaaaaagatcagagtcagattaaaggttataatgaaaacccagtgcaaagccagaaatagtggctcatgtctgtaatctcagtgccatgggaggctgaggtaggaggaccactttaggccaggagttcgagaccagccttgacaacatagtaagaccatgtctctagaaaatatttttttggtatgcagcagagcagctccttcgctgagatctattgaaagccctcaacacaagggtttgtaaaaaagaaaaaacaaaaaataataaaagaaacaaaaaaatgttttaaaaagaagccagggattgtggcacacacctgtaaccctagctattaggaggtgggtagatcacatgaacctgtgagtttgaggctcaagtgagctatgattccatctctgcactccagcctgggcaacagaccaagacctgtctcaaacaaacaaacaaaaatccaatgcctctttctttcaactttttattatacaacatttcaggcatatgaaagacagcaatgtctagtgaatcctcatcccccgcgggtacagcattctgcccttcttgtatcctgtccttctctacccatttctcaccaccattcaatgatgatgattcttaaagttattttagcattttaaggtaaaattagcatcaaaatgcataaatcataaccattcagtttttacaaatggacatactgtataacccatattcctatcacaatacagaatatttccataacaccgaaatctctcttatgtccatgtccagtcaatcttcatccccatgaggcagccactgttcagggtttttttttgtttgttttttgtttttttgtcttttttaaactttagattagttttgcctattttagaacttcttagaaatggagtcatatagtatgtgctcttttatgtctgacagctttggctcagtatgtcttgaaatccatatatgttaagtatcagtaacgtattcttttttattgttgaaatgtatttcactataatgagtatcacacacgttctttatccgtcttatctttgctaaacatttaggttgttctagtttgttcagttgtgaataaagctgccctgaacatttgtgtgcaattgtttagtggacatatgttgtcacttatcttggctaagtatctatgagtggcattgcttggttaaaagtgaggtctgtgtttaacattggaagaaaccatccagcctttttactaaatgcttgtgtcagttggcattctcatgggcaatctatgaaaattccagtactccatgtcctcaccgacatttggtgtcatcactcttttcaattttagtcattttggtgggtgcatagtggtatctctgtagttgtaatttgcatttccctgatgactaatgttgctgtgcaccttgtcatttgcatacaggctgttcacttatcttactacattaattggtggagtttctccatatcctgtttgcaagccttctgtcagataatttttcatgcctattttcttctatcaatagaagaaagaatagaagaaagaaagaagaagaaatgtatgcctgtcattttcttttttttttttttttttttgagacggagtcttgctttgtcaccaggctgaagtgcagtggcaccatctcggctcgctgcaacctctggctcactacaatctccacctcctgggttcaagtgattcttctgcctcagcctcccaagtagctgggactacaggcacgtgccaccacgcccagctaatttttgtatttttagtagagacggggattcaccgtgttggccaggatagtctcgatctcttgacctcatgatccgaccgcctcagcctcctaaagtgctgggattacagacgtgagccaccgtgcctggcagccttttattttcttaatgatgtcttttgatgagcagcatcttttaattttgattaaatctaatttactactttcttcttttatggctattgcactctgtgtcctaagaaaccttttcctgccctcaagttacaaatctgtctccatatgttttctttaaaacattatggcttttatatttaggcttttctctaatttttgtttatagtatgaggtagagtttgaagttcatttttttcatatcagtattcatgtattcagcaccatttgttgagatgactttcctttcactatcaaattactttggtgcctttgcaaaaattaatagactgtataaatttggatctacttctgtactctgcatacaattcattaatctgtgttcctatccttaatcaagaaccacagtacatatatatatatgtacacacactacacatatatatgtgtgtacacacactacacacactacacacacacacacacacacacatatatatatatatacacacatacatattttatacttttaagttctgggatacatgtgcagaacatgcagttttgttacataggtatacatgtgccatggtggtttgctgcacccatcaacccatcgtctacattaggtatttctcctaatgctatccctcccctagcccctacgcccccaacaggccctggtgtgtgatgttcccctccctgtgtccatgtgttctcattgttcaactcccacttatgagtgggaacatgcggtgtttggttttctgttcctgtgttagtttactaagaatgatggtttccagcttcatccatgtccctgcaaaggacatgaactcatctttttttgtggctgcatagtattccatggtgtatatgtaccacattttgtttatccattctatcattgatgggcatttgggttggttccaagtctttgctattgtgaatagtgctgcaataaacatatggaaccacactatattgattagtatagcattatattagatcttgacatcagacaagatctttatttaaataaattcatttgaaataaatttcacatatgattcaattcacccatttaaaatggtttatggtatatgtttttagtatattgtctattgtatattcacagcatttgcacaatcaccacaatctaatttcacatttttgtctctcataaaataaaacctgaatccattagctctctccctccacctctccccacccttctctatccccagacctaaacaaacattgatttacttactgtctctataatttgcctattctggacatttcatataaatgaaataatacaatatatagtcattcgtgactgatttctttcacttggcataatgttttcaagattcatgatgtagcatatattagtactttattttttattgctcagtaatcttttattatgtggatataggtcacattttatttatccatgaatctaagtcatttgatggacatttgggttgtttccagcttttggatattatgaatagtgctgccataaaaatagtatacaagtttttgtgtggatatatgttttcttttgggtatatattagataggtgcgaaagtaattgtggtttttgccactgaaggtaataacaactaagaatggaattgatgggcatatggtaactctgggtataaatttgaggaactgccaacctgctccattacaactgcccattttatattctgaccaacagactgacatctgatatttccacaaccttgacatcatttgttatattccatcttttttattatagccatgctaattggtgtgaaatggtatctgattatgattttgatttatgtttccctaatgactaatgaggttgaataccttttcatttgcttattggccgtttgtatatcttatctgcaaaattttctatgcaaatcctttgcccatttttaaatccggttttgtgtctttttatcattgaagtttaagtgtggttttacatattgtagatacaagaccattctcaaatatatgacttgcaaatatcttctcctattctgtgggttgtatttttactctcatgatagtattgtttacagcaaaaagctttacattttgatgtagtcaaatttatctatttttcccctttgttatctgtgcttttgtcataatatctaagaaacaatttcctaacccaaggtcacatttttcctatatagctctcttgcctcctccctattttcatgctgttattactgtacatattgtatctttatatattacaaacccaataatatgttgttacaattattatttaactttatgtcttttaaagaagctgagggaaaaagggagagcaaatatatattcctagaatttgttatatttaccttcttaccatatttggttcttttcatttgttcctgtggattcgagttaccatctggtttcatttccttagtccaatccgactttgctcccacccagttcttttgtgctgctattagcaaatatattatctttccatatgttgtaggaacaacaatgcaattacatatgtatcattctttattactgctttttaaatcagttaagaaaggagaagaaagatgcatttatactgtcttttataattacataattaactttattggtgttctttgttttttgtgtacgatttcaaattactatctgggatcacttgtttgtggtctaaagactttagtattttttgtgaggggggtctgctagcaatgaattctctcacttttagtttttgtttctctgggaacatctttattttgcctacatatttgaacaatgattttgtcttgattgacttttttttttccttgagtctattgttctgttttcttctggagttgtttctattgggaagtgagctgttcatcttattagggttcccttgtaagtgacaaatcatttttcctcttgttgctttaaatattttttccttctttggcattcctcatttttattgtgacttatctgtatgtggatctttttgtgtttatctacttggagttcactgagctcctaggatgtatacattaatgtttatcatcgaatttaggatgttttcagccattatttctttgcgtattttttttctgctccccctcctctcttattacttcttcaggtacttccattacatctacattggtatgcttaaatgtgtcctatatttctgtaagactgtttatttctcttcttttttccttctgtttattggattggaaaatcgctatcggactatcttaaatttgcctattcttaattctttgtttccaatctactgctaaggccctctagtaaatttttcccttcagttaatgtacttttcaattccagactttctatttggttctcttttataatttgtgtctttattgatattcttaatttgatgagacattgtcatcatcccttccatcccttcctgaggcgtgctttcctttagttctctgaagagaattataatggctactttgaagtctttgttaaatctggcatctggtggccctcacaggcagtttctgttgcctcctttttctcctggtgtgtgatcagactttcctgtttctttgcatgtctcatttttttgttgttgttggagaccagcgaatttaggtaatagagaaattctcagtactagtcaccttgcattctaaagcttattattgtcatttgcaatgaatggctggattattttagcgaagtctattttccccacaatatgagacctgtggtggtggtattattattatgtccaagcattttctacattcctttgtgatttcctttatctgtgggctatttaggagttgattgtttactttccaaatttttaagacttccctacttaatgttataaatttttagttttattgtgaatagaaaacatatgaaattttactctcttgacatttattgaggtttgttttattgctcaatgtatagtttatcttggtggatgttctatgcacacctgaaaatttattctccatctgttgggtgttgcattccatgtgtcaattacttaagatgatgttgttcagagatttttggtccttgttttttgtgtgtgtgtcttattctatcggtcactgagagtagagtttgatagtcttcaactatgattgtagatttgtctgtttctccttttagttctgtgagggtttgcttcatatattttggaactctgttcataggcacattcatatttatgattagcatgtcttcttgatattttgagcctttttttccaatattaaatgtcctcgttttttattttatctcttcctgtttcatgatgtgacttcatgtggatgcaaacccccctgggatcatcaattgtgaaaccttttaataacagagttcttgttcttaacccttggtgatggaatggacttaaattataaagggattggatagcagctattttgtgtggttttcttttattactgtttcaaattactgacttgtaacagtcttccaaatttgagtttagagatcattcaagacatttcaaaaatagaaattcaaaattaccatgtgtcctttgtaatggacatcttttgggaaatggacatctataaaatattgatgaaagaaattaaagacacaaataaatggaaagatagttcatgcttgtgaagaatcaatattgtcaagatgtttatattatccaaagcaatctagaggttcaatacaatctctatcaaaattccaaaggcatttaggcatttttcacagaaatagaaaaaaaatcctaagttttgcatgaaaagacagaagaccccagataggtaaatcaatcttgagcaagaagaagaaagctagaggcataacacttcctgatttcaaattatattataaaactgtaataataaaaacagtataatactggcataaaaacagaccaatggaatagaatagaaagcccagaaggaaactgatgcatatagggtcaactaatttttgacaaagactccaacaacacaccagagggaaaaggtactctgttcaataaatggtattgggaaaattggatatccacgtgcaaaaacaagtgaaattgggtccttatcttatatcatacacaaaaatcaattcaaaatgaattaaggatttaaacataaaacctgaaaccatcaaacacctagaagaaaacatagggaaataagatcctcaactttggtcttcttggcaatggttttttagcatatgatacctaaagcacaggcaaaaaaaaaaaaaggcaaaaataaacaagtaggattacaaaaaaactgatgtttttgcacagtaaaggaaacaataaacaaaatgaaaagacaaccttgaaatgggaggcaatacttgcaaactgtatatcaaataagaggttaacctcaaaaatatatgaagaactcatacaattaaatagcaaaaagacaaataacccaattaaaaagcgagcaaaagacctgaatagacattgtcctaaagaaagctacaaatctccaacagatatattaacagcactaattatgagggaaatgccattcagaactataatgaggtgtcatcacacatctgttaggatggctattatcaaatagacaagagataataaatgttggcgaagttgtggagaaaagagaacccttgtacactgttggtggggatgtaaattggtatagcccttatgaaaaagagcatagagcttcctaaagaaattaaaaatgtaactaccgtatgatcaagcaatctcacttctgagtccatatccaaaggaaatgaaatcagtatgtcaaagagatatctgtaccaccaaattcattgcagcattattcacaatagccaagatatggaaacaccctgtcaatggatgaatgaataaagaaaatgtgatagatatagataaacaattgaatattattcagcttcaaaaaaagaaaaggaaattcttctatttgtaacaacatggatgaacctagaggacattacgctaagcgaaataagccagacacagaaagacaactactgcatgatcttacatacatagatgtgaaatctaaaaaagttgaactcatcaaagcagagattagaaagttgattgccaggagctgtggggttggggaaaatggggagatgttggtcaaagtgtacaaacttataagatgaataaattctgaaaacctaatgtacaggaagtgagtataattagtaatgtattgtatacttgaaatttgcaaagagcatagctcttaagcattctcacccctcccccaaaggtaactatgtgaggtgatggatatgtacatcagcttgctcatgggaatcttttcacaataaatacatatatcaaaatatcacatcgtatgctttgaatatatacaattattatttgtcaattatagctcaataaagctgaaaacaattaaagatctaaataccatgagcgagcactgttccgcattccctttttctggaaattgtcccaatcctgagctgggtgtccatcctcagccagggccctgccacagaaaccttctgttttgggttcagaaccaccaggccctttctctctctctctctctctctctctctctctctctctctctctctctctctctctctctctgtgtgtgtgtgtgtgtgtgtgtgtgtgtgtgttttcagattcatatctagtatgcatttccttagaaccagaatattttcttttcccttttggatagaactcataagtctggataagtcattcccatgggggcctccacagcaaacatttccttccaggcttgcttctttatgcctcccggtgaggctgggctgcctctcttggcatctccttggaaaatgcaaactcatttgaacattagccagaaccatcataattagggagttaactctgccaaaggaaaatgaaacagatcattctatagccaagtctgtgccatctttggatgattcagaccaatgcttctttcctttcatcagccttcggagtctgctaattagtgctaaatagcaccttccctctatgccagcagcagatttagtgctggagatatagacatagaaaaggcgtttcacgtttttggagaatgacattctagaatgatcacgtcaggtcactcctcagcttgaactctgcagtgtcttccattgcacctgagagaaaacccaggccctttcacatggtcttcaggcccttccaggatctggctcctgctgtctcttcaacctcatgtccttctcccctcctccttatacattacattctagccaccctgtccttttcatgataatgcaaatggctatcatttattaagtgtgtgaaatgtgtcaggttttgtgttaagggccttaaagcctttattttatttaatcctcaaaatctctgaggtctttactattactagccctattgtccagttgaggaaactgagagagggcaatagtttgtctcaatctcaacagccagcatgtcacagagctggcatttatacccagatcatctgacatcagaacccaaacccttgatttcagagctcagctcttgccagcagactccacaggagatattgcttctctttccttccttggcttttgcacttgcccttctcccgtatttcccacgtgctgtcagaagcccatacatactaattccttcagcccttactacgtccctgcacacctgtctgatttccaactagtggcagctgaaccttcctctctgagggcttctgctggctgccagaacccatgctgcctgtgcttgtggggaactggaagtgcagggagcagatgcttaacccgtcccctagagccactgctgttagaggcagaaggggtcaggatatggtcacaggtcaggtcacttggagttaggaaattctgtggtctctttcagcctcggtctaatcagctttataagagggcttaaaatgcctgtcaaagaaggtctggtgataattgaaagggataagaggtgtgaatacattgcactgtgcccagcacacagtgggccccttgtaactgctggattccctctctgccttcccagcagaactaaggatttgaaagactaacatgaacacctgtgagttagggcccttgctacctggaagcttgaggtggacctggagaactggggacttggggcggggcagagataaatgatcacttttactccagagcctggacatacctcaagccttttattatttatttttaataagcagacattttcagaaggtaaaagttatttgagagcctctttctgcttatttctaccaataaatggattccatttcaggccacaagttgttctctttcatgggctctccctcagttttctgggtcatgaggaactctatataattttgggaggagtgagggaggaaggacctttgctttccttatatacatttatttactattaggttggtgcaaaagtaattgcaaaaacaataattacttttgtgcctacctaataacagatgctagggaaaacacttggtatttttgagtgccaccagctgagcctccctccacagatcccaaggtgattagtaaacttgtaaaaaaaaaaaaaaaggctcaatttttgccctttactaatatggtcttttggtcaaatcttcaaatattttgtcctagggattatttcccatactttataaataagattctaattattttctatcaaaactattttcttccaaaaaagaagaaaaatgactacatttgctgactctggagagagcaagggagccaaatgcacagctgcccagctctccccagggcctgtcctgtgaacctgggtcttgtgtcctcctgtggctaaggttttaactgctagaacaagtgacatgatgttgctatgcttcacaatttggcctttgtcacaatatctttggtaaaactctcaatactctgtaaactctttaaaaagtattcattctcatttatttagtcacttaataatttgttccacacatatttactggatacctactaggtttatgtttggtgcaggaggaagtagacagacacaatccccaccctagcagagcttacagggcaggaccgctgtgagcccatacaatgccttatgccaattaggaagaggcatcgcatcctcctggcaggtgcaacccaaggtacagggcaaagtgagaagagaagaggccttgctcctctgctgggcacccttgggccctgcacatcctgaataactattcttggcagccctgatggacagcaatggacattaaacaaataattacagaaatggccacttaattacaatcctgttatgcactagtatgaaaactatataatgcataataatggtgtctctagcatagagaaatctgggacaattacttctgaaggaagaatgaggtgagaacaggccatgagaagtgagagcatttctgagcggaacaccctccagtgcacttgcctgtcatcatggcacatgtgcaggagagggaggtgagttaacctgtggtggagaaggagcagaccatgtagagcattttaactttagagtttctggtctaaataccatgaccattcattttaaaattatttttctgtatattcgtaaccagatattattgcgtgtcaaaagaatgcctttttaggactttacctggggctaaaaatgatatatttgcttttataatcattgttctacataaataaattgagttacttcgtatttaagtatgtttctatattgatgagagtagaattattttcagacagacctgagtttgacctggttccatgacttagtaataatgcaatattgggcaaattgcttcactttttgcctcagtttattgatttctagaatgggagtttcagtccttacctttcagggtgtgagggaagattaaatgggataatgcagtgccattccctatggaactgtgattctggagaagtcagaaactgatctctgtccccagatgatgggagagccagcgactgtcctgacaggtacctactggaatgcacttttgtctaatgcaacactagaggaagctacaaatccttcagtccagtttatttccccactgaaaggtacttgttcgattattgcattcttaatgatgtcctccatggcatgtgttttgctgtgaggggggacatatatttactcaacacgttccttttggagtggttctcatgtctccacttatggtattaatttgattctgagtacagatccacctgcttcagaaactccatgtcttgtagttgttcaaagcaaaaataaaaaattgactgtttctctggtcatggcctgctgtgcattcaagaagcatgaagtgccatttaagtcattcttttttttttttgagatggagtctcgcactgttgctggggctggaatgcagtggcacagtctcagctcactgcaacctttgtctcctgggttcaagcaattctcttgcctcagcctcccgagtagctgagagattacaggcgaccgccaccatgctcagctaattttttgtatttttagtagaaatgggatttcaccatgttggccaggctggtctcaaactcctgacctcgtgattcattaagtcattcttgaaagtcagtgtgtacttcaaagagccctcccttgagttaggcctctggaggtggccacatgtaatgagcacagcaaggcgctgttgcctgctagcctccagcttggaggtgaggaagactgctggaggttcatttccaggaatattggttagtggttgcacccataccgacagaggtcaccgaggcaggaacacccagggtgaggtcagccagtgtgtcagccagcatgggctcagatgcaaatgaccagagtcatagcctgactttaaacagtggggacagaaggtcattacctgctgttttcttcattgtattgtttattggatggtggctaaagtggaagaacagaattaatagtgaatcacataatttatggaagcaattgttagagacacaaaggaagcctctgggtacaactaggatagttgtcctaaaaagttagaggcaacctggggaccactgtttcctgggtctcctccaaaatgtttatgaaagatgggatttggaattgcacaggcttggccatgcattctcattgcagacgagctggctgcctcccccagaaaaggtgctattagaagacttttgccccacatgtgtaaacctcagcaaaaaagtgactttgtaaaagtatgttcagttcttttcttgcactcagcctacattctcaattccgcaggcgctgctgagtaattacgtggtaaaagctttttcatgcagtaacaatctctaaacccactgcagagtgactgtcgatgatgcttcattgtgggcatttggatcagttagacccctgattgtggggcaaaagatggcgtcatcttccaaaattattctgtgcatttgcaacatgtagtgggatgaggtttgcttctcccagaggcagttcgtgtcctttattcttgagagacagagacgctgctccaagaaatgtgtcatagggaccatgtgcatgtagaaggagattatgaagaacgtggtaatgtgtgtagcctgacacccatccccaggacggtgggtgagtgtgggtgtgggtggcaggactgggccaccttggtagagatgagcagtagggaagggtcaccaggctctgccagcacttgagacctgcctgccacagctaagtgagtaacatcacaggggatagagccgggggtcccagggacacccaggggactagagtcagtgtctttagcacaggcaccttttcagtccttcctcctcaagctggcattgtctagcgggggatgttgcctgtggatggtagaggcagaggagggacagagcccaggcaccttgcagctgcctgtctcagggttccctgctgttatggttggcctgttacccctgatagctcctatggtgggaagagctggagcttgtgaagcccttggtgctcagatgagggtgtaagcattactagcctttggcatcaagtccagattggcagatgctcaatgcaattaaaaaaaaaacacactcagcttgtcatttggccctgactaatctctgcagccttgtccatgagggacagaggagagaacatttctgaaggtgtagattttttgggtgttgtgaaatatacataacagaaaatttaccatcttagccatttttaagtgtgcagtgacgttaagtacattcacagcgttgtgcagccatcaccaccatctatccacagaactcctttcatcttgcagaactaaaactctgtacccgttaaacactgactccccattccccttcgccaagcccctggcaaccaccactctgttttccgcctgtgatttcaataactctaggtccctcatataaatggaatcataccgtattcgtcttgttgtgactgttttctttcacttagcatacgtatcctcaggatgcatccatgttgtagcatatctcagaatttcctccctttttaagactgaatattattccactttatgtgtacgtgacattttgtttgtccattcatccagcagtgtacacttgggttgctctcatgttttagctattgcgaataatgctgctacagacacaggggtacagatacctctttgagcctctgatttccattctttctgggtataaacccagaggtggaattgctggatcatatggtaattctgtttttaatgttttgaggaaccactatactgctttccaccgcagctgcatcattttacatttccacgaacagtacatatccaacgtccttgccaatacttgttattttcggttttaattttttttatagtggactccctgagattttgacagagcccctggggggatgtgtcatcttctctgcctgggagactagagtcaaagtaaaatgaagatgtagtaactgagtttccacattctctcgatcctcccaaaagcaagttgcccattcctgctgctaagctcctcactgcccttcctgccccgcaacacagagccctggtcaaggctctcattcaaggcccagctcacacccccaccttctaggaaacttcccctcccatacacagactctcctgctccccgggcctcactcttccctcttccacctccagccagtggaggttggagtgtgagcctgtcctcccttctagactacaagcccccggaaagcaggcctgcctgctcatctccccatctctttgggcccagcccagcacgttgtatgtgttataggtttggtgaacagcacaggctgagttgttgaacttccacagagaaagaaaccagaaaacctagggaaacttttgaatcagactggcaggagggcccattggtttgaggctttgtgtagcccatctgagcagagccaggggaccagagtgtcaaccagggaataggatgatgcccaggccatctccactcagacatttgctagggaagtctatgccagaagaagagaagggtcattgtcagggccagggattctccctgagcgtttggttttggctgaggagtgacatgtgcttggttgatggcgtcacttctgctttgagaaggcattgctgatcagagttctggcaccatctgtaggtctctgaaggtgaggatctttatagggctgccagtttgcctgcatggcactgtggcagacacaaggaggcaaactggagagccagccacttagccagcacctgccattgcccaattccaaatccatttgctcttaccctttcctggtccttcaggaaactaagtcctgggtggaggcccaaggcttcctctttatttacgaaagcaatttaataggataagaatgatttttgtttttttcccatctttgtctttctactacatcattgtgattttcagggccagagatttggccacacaaagccaagggacgagtatgatattctgcctttactcatggacattctttcctttcattgccctgatagtttttctggcctctgctcacttttaccttctcatagcaggcccagaaaagggctttggctctttctccttctctttgtgtccctccagcatttgggaagctagggtgatgcttctgccctggaagggaggctcagagacctcacttgtcctcttctgctggtaacccatgctcagcagaagtggggtcctgaatgttgtctcgtctcactctgccctggaagtggcaatgcagcttaaaggaaggttggataggggtttggctgccttccagttttttatttaaatctataatggttaatattgagtgtcaacttgattgggttgaaggatgcaaagtattgttcctgggtttatctgtgagggtgttgcccaaggagattcacatttgagtcagtggactgggagaggcagacccaccctcaatctgggtgggcaccatctaatcagctgccagcgcggctagaataaagcaggcagatgaacgtggaaggatttgacttgttgagtcttccagcctttatctttctcctgtgctagatgcttcctgcccttgaacattggactccaaattcttcagcttttggaatcttggacttaaccaatggtttgccaggggctctcgggcctacagccacagactgaaggctgcactgtgggcttccctatttttgaggttttgggacttggacggctttcttgctcctcagcttgcagatggccttttgtgggacatcaccttgggttcgtgtgagtcaatactccttagtaaaatccctttcatatatacgtctatcctattagtcctgtccctctagagaaccctgactcacacaaactccttcttgagaatggaaaatggacctgcattctatacctcccctgtcccccaacctgctatagagccttcctgttcagttctctcacacagtggcaccagaagtcctcatctcttctctgtggcaccagccttgaaaacctagggatctgcatcactcagaatcactcatcaattcctttaataactcgctggggaattctaacctggagattttcccaaagcatgcttgaaccagtttgcattttctctcctacccatttgagaagagcacattctctctcctccagcatgtactcttcaaaccagtcagtcccaagtcctcacagtccttgccctggtctgtggctcctgctccttcccccaacgcagtgccctcctggctcttccctatagcctaccctgcctggcacagtagatgttgagaaaatgcatccacatcctgcctacccatctgtcaggtctggattcatgtttccaaacttcctagaaacctttgattatcaagatccacatttgcttctccatatcatctatcttgtctcccttgcaaagtggttgttaggataatgctagagaatacatgagagagtgtttcccactgtaaacctgaatgtaaagaagaattaaaagcacagttctatgattgttttcagcactggataatttgttatgtgtattgattcacaggtgaaatgaataatagatgttcacaggtgtaggtctaacatgtatgttcaatgttttactagagttcagggaccctaggtagcatgttcttttttaaaaaatagatgttcctgaaatagttgtctttttttttaatctttaagaatgatgaacatagataatggaaatgaaagttatttttcttcattttctaaaataaggcattcaataagaacaagtcctgaaataaatgtttagttaaaccctaatatttcttgattaagaagaaataaatgcctttcaaagaaaggcatttatttcaaagaaatctctagaaattagagggcaaatcataaccctatgagaacctattatttaataaaaagaaatggcatgatttgatcaacacagcatattataaacttgcaagcgatgcttcccatcctcattaatcacatttttgaagtggacgttgaaaattgtgtatgtgttttaaaaattgatattttggaggagaaacccagtaggagaatgattgattattaataagtcaagaaagagctacattcctctagagctgcattcatcaaagtgttgctttccgttgtttccatcaacaatagtattttattcagtacaatgtgaaacttcttgacccatgtgaaaaactgagagacatccctttttatcatagattccctttttccatctgtatttatcgcagtttcatgaggcaccatacctttccaaaggttgactgctccagtgttggttataggaccttcaattgtttgttcatgaaaacgtcatggtttagttcataggcattggaatagtgggaagttcctaggcactggaacagagagacatgagttgaatccaaaatagcttttgtgactttgataattgcttaatttctctaagctttgattttctatttttgaaatggatataataatagttcataatattattatgagggttatatcatgaaactttccaaatatgctgatttgttttagtcacatgctattgaatttcttaagaataatgaacacatgtggaccatgatgattggtgttagatttggggaattaatgtagatggcaattgtttaaaattgccaaactttttttttaacttttagatttaggggtatatgtgtaggtttgctatataggtaaattgtgtgttgtggagttttggtgtacaaattatttggtcacccaggtaataagcatagtactcaataggtgtttttttgatcctcaccctcctcccacccttcaccctcaaataggcctcagtttttgtcattctcgtctttgtgttcatatatactcagtgtttggctcccagttataagtgagaacaaatggtacgtggttttctatttctgcattagtttgcttaggataaaggtctccacctccatctacgttgctgcaaaggacatgatctcattctttttcatggctgcatagtattccatgctgtgtatgtaccacattttctttatccagtctaccactgatgaacatttaggttaatttaatgactttgctattgtgaatagtgctgcgatgaacatacccatgctatgtctttatggtagaacaatttatattcctgtgggtatacatccaataatgggattgctgggtcaaatagtaattctgttttaagttctttgagaaattgccaaactgctttccacaatggctgaactaatttatattcccactagcagtgtataagcattctgtttccacaacctcgccaacatctgttatttttttactttttaatagtaaccactctgactgtcatgaaatggtatctcttggtggctttgatttgcatttctctaatcattagtgatgttgagcattttttcatatgctttttggcaacatgaatgtcttcttttcaaaagtgtctgttcatgtcctttgcccaacttttgatggggttgtttggtttttgcttataaattcgtttaagttccttatggattatagatattagacctttgtcagatgcatagtttgtaaatattttctcaaaattccaaaatttttagataaagtacttctgattctagacatgagggagaaactggtactgaacttgccattattattattattattattgttatttaatattaatgaaatcaataaactcctaacaagactgatccagggaaaatagagaacccacacaaattagcaatatcaggaaagaaagaaaagctattaaatatttccaaaaatcctaaatacttaaagaaaagataatcttgtgagcggtttcatgccaacaaatttaaaaactaagtaaaatgattaatttccttgtaaaccactgctaaccaaaatggatactagatgaaggcgaaatctaatttttaatttaaaaccttttcagcaagaaagctccaggcccaggtggtttcactggtgtctttaatcatacatttaaggaagaacaaatgttaaccttacctaaaactttcaaaaaagccagaagaacagggaacatttcccaactggctctgtaaggctatacagataaggtaataggataatcctgataacaaaatctgataaagatattgcagagaagaaaactataggccaatattcctcataaatgtagatacagaattctcaaattatcaagataagtccaacaatacataaaaaagaatttgaactaattccagaaatgcagttgatttaaaagttgaaaatcagccattgcaagtaagcacattaacaaaataaagaagaaaaatcatataatcatctcaatagatgtggaaaaagcaacacttatgcatgacaaaaaatctgtcattaacctaggaatagaaagaaacttcccagtctgataaagggcatctatgaaaagcttgatgctaacttcatacttagtggtgaaagattgaatgcttttcctgtttgattgcagacatcataaagagatgtctatttctactgtttctattcacaattttagtggtggtcctagtcagtacaattagacaataaaataaaataaaaggcaaggaagaagtaaaattagttttatttgcagataacacgattatttgtttataaagtcctaagatctacaaaatgtattagaataagtgaattttgcaagatcataggatacaaggtcaatatagaaaatcaattgaatatttatacaatgtcaatatgcaattagaaaatagagacttttaaagtaccatttataggtacttaggaattaataaacaaaaactgtgaaacctatatttttcaaactgcaaaacattgctaaaaagctaaataagacttaaataagtggaaagtataccatattcatgagttgaattatccaatattgttaagatattgattatccctaaatttaagtatagattcaacaaaatcctatttagattctgtatgtagaacttggaaagctgattataaaatttatatgaaaatccaaaggacctaggatagccgaacaattttcagaaagggggatacatttgaagtactgacagtacccaatttcaagagttcttataaagttatagtgatcaagccaatgtggttaaggacagataaatagatcaataaaacagaatagagtcaagaaattgacccacacctttcaaaaaaggtgtcaaggtaatctagtggcaaatggaaagattaaaatcaatgatattagaaattctgaataaaagtgtgggaaaaaagtaagcttgacccctacctcatgctatatataaaacttatttcaaaattaatcacatactaaaaagttcatctataaatcatatagaagataatatagaataatatctttggtactttgggatagacaaagatttctttaggagaaacacaacagcaccaataatagaaaataaaagataaattgaactcaagcaaaattaaaaatgtctgcttttcaaaagatattctagaaataaaatggcaagtcacaggctgaaagaaaatatttacagttcatatgtctcaaaaggacttgtgcattcatatccacaatatataaagagtatgtacagatcagcaataaaaaaagcccaatacaaatgtaggcaaaagacttgaacagagactacataaagggaactgtatgtatgatcagtaagcacatgaaaaggtgctccattattcctcattagggaaatacaaattaaaatcacttcatgacaattagaatagctaaattcaaaaagatcagcaatgccaaaatgttgatgggtatggatttaagtgtaattctcaaatgttgctggtgatgtataaattgttactgccactttgtgaattggttgtcagtttcttataaagtaatcatatacttatcctactacctagcagatgcatttctaggtatttgcccaagagaaataaaaacatacattcataaaaggtcttgtacaaaatattaatagcagttttattcctaatgatcccaaactagaaacaacccaaagttaatcaataggagaatggatagcaattaaaaggaacaaactactaacaaatattgcaacatggatgaatctagaaaacattatgttgagaaaaggaagtcagacagaaaagagtataagctataatattctgtttatatgcagtccaagcacaatcaaaactagtctatggtgtagaaattagagtagttgtcctaagtggggaggtcattggcaagggagggaactggctggcaagagctgtaacggattattctgaggtgatggaaatgttctctatgtttattgaggtcttgcttacatgagtgtctatgttttggggaacttaagacttatgcaccttggacactccttttaatgctctttgcataagttgctccttctcatctttcaggtttatataaagtggagtctcctctcctgtcatcaaccattctgtttttcataagcctatttgttgctttcctaacttttttttacaatttgtaattatttctctgtaaattccataaggccaaaacccaagtgtgtcttatttgccccccagaactgagcataatacctggccagacttgtagcaggaactgagtaaatatctgttgaattagtagcttccttataaaatgctcaattctgttgccccaggtggtgataatgatggtgattgtgttgttagtggtggtggggtgtgtgtgtgtgtgtgtgtgtgtgtgtgtgtgtgtgtgtgtgatgttatgttttgtgaagtccacacatttctctaaatcctggcaggccagattcttattcattgaaaaaagcttgtatcaccagagagaataaggcatctttctctaaactcaggtatttggctgcctatagtgagatgacctttcactgaatcacagcttctttatctaacggatgaaacattgaagccaaaatcagggtggtatatcatcatccctccaatgggtaaagttggaatctgatttgattctaattctttttgacattatccattctcattctatcaccattggccatcaaaaaataatgtcttgggaagtctccagaactttatttgaattcaatgtgcatatttcctgtgtttcacatgcacatacttttgtgctcattcccaggaaagcaatctggctggtgggtgagaagcaccattttgactgtcttgacaagcggtttggctgctgctttttttgtttgttttttgttttaactgaactttactgaatctatgacctactttggccctacagaacacaaactaactttcaccactgagcctcatttcttgcaagctatagacttgtatcagtgattagagacaggcatataggctatgctgatttacacaactcttcaaagaactgagtgacaagactgcagttgatggaattgatgcaggagaaggcctttggaggatccaagaaagctgagactctgctgctgactgacacaccataggtagcacttctgctgtgcttgagaggggcatggacattagagttctcaacattcgagttactattatctgattcttctgattctttgtagttatgagattgcatggggaagccaaaagcagcatgatatgaaagaaaatatgtagtaatgaattgagcacttccaagagatgctttcaaacacctatttcggccaaatcctggtgggagcctcttactctttctcagttaccattggttattggtcattttaatatgacagttgtcatgatgtgaatgtgttccccaaaattcatatgttgaaaagtaatcaccaatgtcatggttttaggggctggggcatttgagaggtgattaagtcatagggcctaatgataggtcatagggtcatagggtccttatgaatgggattagtgccctcctaaaagaagctccagaaagctctcttgccccttccaccatgtgatgacacagtaagaaggtaccacctttgaaccaggaaacaggcttcactagacatcaaatctgccttaatcatggacttccaagcctccagaactgggagaaataaatttttgttgtttataaagtacccagtgtatggtatttgttatagcagtcccaatggattaaaacaacaaatagcacaatgcaaatcacaccaatttgatggcaaagtacatatcttgagaaagaggcaggaggcttccaagcctcaactcttgccctctgcatacccacagacttaacaccatgtggaagctgccaaggcctatagcttgcaccctctcaaggaatagcctgagctataccttggccactttaagccatggctggagctggagtggccatgaggctgagtgccatgtccccaggttactcagggcagtgaggccctgggcctggcccacgagaaactattcttctctcctagggatctagaccttgatgtaggagctgccatgaaggtctctaaaatgcctttgaggcattttccccaaagtcttggctattaacattcagctcccagtatgcaaattctgtggctggtttgaattcctctgcagaaaatgtttttgttttttgtttcctaccgcatagtcaggctgccaactttctaaatttttatgttctgctttccttttaaatataagtttcagtttcagattatctctttgctcatgcatatgaccatatgctgttagcagcagccaggttaccccttgaatgttttgctgcttagaaatttcttctgccagatactgtaaatgatcactctcaagttcaaagttccgcagatccctagagcaggggcacaagtctgccagtctctttgctaaagcttagcaagaggacctttattctaattttcaaaaagttcctcatctccgtctgagaccacctcagcctggactttattatccatataactatcagcattttggtcacaacaatttaacaagtctctaggaagttccaaactctccatcatcttcctgtctttggctgagccctccaaactgttccaacctctgcctgttacccagttccaaagacacttccacattttcaggtatctttatagcaatgccccacttctctggtaccaattttctgtcttagttcattctcaaactgcagtaaagaactacctgagactgggtactttataaagaaaagagatctaattagctcacagttctgcaggctgtacagggagcatgacggggaggtctcaggaaacttacaatcatggcagaaggtgaaggggaagcaggcatgtcttacgtggctggagtaggaggaagagagtgaaggtggaggtgctacccgcttttaaacaaccagacctcatgggaactcactatcatgagaacagcaagggggaaatctgcccccatgaccaaatcacctcccaccaggcccctcctccaacattggggattacagtttgacatgagatttgggtgggaacacaaatccaaaccatatcaccctgcatacgtccagcaaccagctggctctgtctgccacttgggacaggtatcatatgtctgccttacctgccccaaacccacgtttgagaaattttgggaatgctgataatctcccagtggctgtcagattacagcgagtggcaaatgtggggggtgggggtggaagagagtggggaaaatacaggtaaaggagaataaactaaaaatactgaaaccaagcagaacctacatagcaaaatacttacttttacctctagaaaggaaaatgaaaaatatggctccatggtagaacttttactcccaaagctagactgaaaaaagatcgtgtttgtcctatggttggtctgcataatgtacaagcttacaaatggtaggctgtccccaactggcttttttctagtgtttaaatcacattttgtattttccttgcattgtgcctgggccatgtgagacagtttagataaaaaggactttatttggtaccacagttttcagtctttcacccaactcatctggaaagactgaacagaaatgagaccggggtctctgaagaggtcagcatccatactttttagtttagttgttcggtcagctactgaaactccaaaatagctctctgctgctcagcctgttttgcttctaaactgtggccttggcaaacaccttactgtatcaacacacactgggtgcagagacagaaagagcacgggtctgcctggcgtagtgcctgcctgtttgaatgaatgaatgcatgaatgaatgtaatttcaagtcttgtatctatcacctgccagccttgaccttcagcaggtttctttgcatctcattcattcacccaacagatatttattgattgcctcctgggtgccaggcacaaaattaagttatgaggatcacaaggtgaaaaagacagcatctgttcttaagaaattccagtctggtaaggagggatccttccaagagagtaactggctctgtatactgaggagcaaattataggtgtgctcactccctttatctcttgttttctcagactggtggcttgtggcttgcaggactgcccccctctgctttctgtcttagctaaagtggtaaggcctgttagatcacacactccattctgtgactattgccagagacctgtatcaaaagctttggtctttaccttctggaattccaagttttactttaaatgtatatgtatgtgtattttaacaaatcaggatattttcctgttgtcaggcttctggtagctttcctgctgttcacgtgttgcaaagactcctggaagtaacttttgatcacactggggagagtctcttagtgccctggggggtaattcttctagtcctgtattttttgtctctcttaaagctgacaggtggcttacattgttcttgatttttctgatgtttgttctcctttgtcatgttagaaatcacagcgggagtggaacagttatgtttaacttaaactatttctggcccacatgtctgtttgtgaatgcagggagtgttcagatttcttgggcagtaggccacatggtgtggacaagagtataaaattcaagtttgtcattcatgatagaagaaatgcagaaaaaagtccagtctcctgttgagtgtagtaaactaagcgtagaggctttctgctaactatagttccaaaatacagctagcatttattgagtacttactggatgctaggcatgcaccaaatgttctacaagggctgttttacttagtccttaggaaaaccctataagatggatattcgtattgatcccatttgcaggtgagaagcagagagttaagtatcttgcttgaggtcacacagcaagtagtgaagctaagattcaaacctcggcactagatgttactttgtatccacatctacctatcttatatttaggttggtgcaaaagttattgcagattttgcaattttaatggcaaaaaccacaattacttttgcaccaacctaatacttaggttaagatgttgcagtcagtgaagagatctccaactgatgattcatgcggctgttttcctcctcaaaactttgtaacaaaagtattttatttcattctaatgtttgtggggcatgtttcattgctaataattctcaaggaaaataaataatccaagtcctggcttagcatttttctgagcctgtgggaatcatgctgaccatcgtaacaaatggccagtctcaggtgtgtgttgtaatgaacaggaaaaataggaatgaaatctgacttttcaccctcaagaaatagctgcattagaaaaataaaatagcaatgaagcttgaaatatgttttggtgtaagatctgtaacaggtaacctggccagtttcatttattctgaatttattcccattacaagccttgaatgctccctgggctctctcttgctaaatcgatgttttcagaattctcagtggcttgaattttgtaatctgagaaatcaatcaagtgcctccggagaatgccatgtcttattctactctgaacctccaaacgcctcttgtaattaagtattagttggagttcattgcacttgaataatgaggtgatgtttgggtaggtttcctttgttgtttttttcttgaggagcacagcttctgtttttctggttagctgaatcacagttgtcacaaaaaaatgctatgtaaagcctccctaattataatagttagcatctccaaaaaccaaattcaatactttatggtcattagtgtgttgctgcagtcggcatgcatagccctggcatgtgtagcgtatgccctgtgattatggaattttacaattaagctttgacaatgagaaaagggctgaaggagttgaatttgttcctttttaaaatggtctgacttgcctgatgaccaaatgaatggctgcataactcttgttatagagcaaacagtgtggtcactagctctttctgcatttgctctgcactatataattttcttgccataccacagttgtttaacagggataattggttaacagtgaaatgtatgtacaaaatcatatagaaaaataatcattggcttaaatattatatttactattaaataataatattaataaatattaagtaataataaaaaaacagacctccatgtacccagcacttggtttaagaggttgaatttaactatacccttagaaatcctacattaccctcctggtggctgatccttctctctcttactgtggccattatcttgagattttcaaaattatttctttgcttttctagatagttttacatgtgcacacatacacatgtatacattcctaagcaaattattgcttagtttttcctgtttttgaactttacataaagggagtcacacagcatatgttttgtgatttgctaattttgctcattattattttttgagattcttctatttattgatgtatgtagcaggagtttattcattttcttttctttctttctttttttttttttttgagacggaattttgctctgtcactcagactggagtgcagtggtacaatctcaggtcactgcgacctgcaacctccacctcccaggttcaagctattctcctgcctgagcctcctgagtagctgggattacaggtgcccaccaccacacctggccaatgtttgtatttttagtaaagacgaggttgcaccatgttggccaggctggtctcgaagtcctcaccttaaagtgatccgcccaccttggcctcccaaagtgctgggattataggtgtgagccaccacgcccaggctaagtttattcactttcatttttatctgccactttaagccatgactatacctcaatttaaaaaaaatcattctaatgctcatggacatttgagtcatctctagtatggacctattataaagtgtcagcatgaattctttttgtgcttcttccaaatataactctcagataaattacttgcagtaaaatttttgggtcatttgcttatcttcagctttaataactaatgacaaactgtttttacactctcaccagcaagttatgaaaattcccattgccccacagtcttgtcggcacctaacatggtcagaatttagtttttgcttgtctgaaagatgtattggtagctcctggtagttgtgatatgtattttcctgatgactactgagctagatcattcattagtttaatggatcttagcttttctcttatataacatacctgttcatgccttttgaccatttttttcaattaggttgtcacttttttctcattaattattagggttttaaaaatattatggatattagttctttgttggtcatacttgtggcaaatatctccctttccttgcttgtcttttcatgttcatttttttttttgccttccacaaaaaagggagatgtttgtgtatttattatttatttttctttcgtggatttattaattcttttattttataatccttattaaagaaagagtacatacacattgtagaaagttaaaatatacagagaagcaaactttttaaaaagaactttacattcctactgccctgaagtcaccagaattagcatcttatgcaggatttcatattctgaatttcatacctgtatgtgtatgtatgtacagttgacccttgaacaacacaggtttgaactgtgagggtgcacttatatgtggattttttttttcaatgaatatattgaaaattttggggggatttgtgaaaatttgaaaaaactcatagaggaatcacaaagcctagaaatctaaaagaaaaatttaaaaagctatgtcatgaatgcataaaatatatgtagatactacatctacatgtatcatttactatcataaaatatacacaaatctattatgaaaagttaaaatttatcagaccttacacatacaaacataggtggtacgtggcatcattcgcagtcaataaacttgaagctgcagtattaaatcacagctgcgtaagattaactgtagaatgcgctgcacttctgtggtaattttatagccacctcccattgctattgtgtgagctcaagtgttttgaatatctacctaaaacaccgtgtggcgctgatcaccttcacgtgagcagttcgtgtctccacgaaattggcggtgggccacagtgaaagtgatttctcacagttgtcgcatatttcccattgtgtttggtgcaatgttgtaaaccttgaataacaccatgggacttatgaagtgtcactagtgatgctggaagtgctcccgagaagtggagaaaagtcatgacattacaaggaaaagtcaaactgtactgactatgcactataggttgaggtctgtaactgtggttgcccaccatttcaagatgaatgaatcgagcctaaggaccattgcaaaaaaaaaaaaaaagaaagaaaaaaatcatttgtgaagctgtcactgcagctgcaccagcagatgtgaacaccttatacattttctgaaatattaggttagtgcaaaataagttgtggtttttgacattaaaaataatggcagactgggcgcagtggctcacgcctgtaatcccagcactttgggaggccgaggcaggcacatcacctaaagtcaggagtttgagaccagactggccaacatagtgaaaccccatctctcctaaaaatacaaaaattagctggataccgtggtgtgcacctgtaatcccagctactcaggaggctgaggcaggagaatcatttgaacccatgaggcagaggttgcagtgagctgagattgcaccactgcactccaacctgggtggcggagtgagactctgtctcaaaaaaacaaaaataaaaaaatagtggtattaattttaatggtaaaaactgaaattatttttgcaccaacctgtacaaaatatgggttaattgaccatttgtgttatcagcaagccttctggtcaacaagtaggctagtagtaaaattttggggggagtcgaaagttatactcagattttcaattgcatggggtgtcggtgcccctatcccccacattattcaagggtcaactgtatatgtaatcaaaacaaattttcagtcaccaacctccaagttttcatttgagtagatttcctctcaccatataggtaaaccatcttcaaattttcccagttgaccagcagtcctttagcgctttggtcaaacaagtatccagtctaggacttattatgtatttggatgaaccaagttctcaatgttaaagtcagttttatcagtcctttgctttgtgattagtattttttatatctttttaaacacatgtctttcaatcccaagactgtattatcttctaacagtcctatagttttgctttctcctctaaattcataatccagaattgatttctgggtatagtagcagtccaattttttttccatatggataccggcaccatttattgatattcactgacctacaacatatcatgacccctgccatatttcatgttcatgtaaggatgggtctttttcttggcttttaaaattctgattcatgggtctgtttgcttattcctataccaatgctgcagtgtcctaatcattttacctttataatatgtcttgacataataaattttataataaggtttaaataagacaaatctccttggatagattaggataggttgggctgtctttgggtacaaatttcagtggcttaaaactcaaagggcttctttcttgctcatgctatgcatacagttgtggtcattcagggtcccaggcaaacagaggctgtgttactatctcaatatgttcttccacatgagagaagagagcatggagaatcacttgtcaacttgtaatgctttctcccagaagtgacacatgccagttatatttacatttcattggcagagctactcccatgaccacacctgatttcaagggtgcaagggagtgtaatccttgcataactggaagcagaggattctaccacatctctcccattgcttttcttcggaagtgtcttagctattctcagccttgagacccattttgtcaagttccatgaaaacccttactaagattttgattgggattttagtaaatctagggttcaatttggggagaagtgatatcttcctttctaagcatatggtatatttgtctatttatttaggtcttaatgtcttttagtggttttatccttctctctttaaaggatttgcacatcatttataagactaattctttggtgttttatattcttattgctattataaattttattttttaaattacatttcctagctaattattttctggtgtccagaaatgctggtgactttggtatattaattttattaatgcagaaattttgaaaaactctcctagtaattctaattacttatccataaattattttgagttttctacatagaaaatcataccacctgcaaataagtacagtttcatttttttcgtttctaattcctaaccctttttattgagttctcttgtcttctctaactagggcttcttgtgcaatgttctagaagtggggatagcaaacatttgtgtcttgttactgatcttaagggaatgctttaaacgtctgaccaataagtaggacttttttgctagatattctttatcaggttccttccatttctagtttgctaagaatgaacttcgaattttgtacatcaaaaaaaagtgatactttccctttgatgtgttaatgcggtcatttatagtaatcaatttaaaaaattttaaacctgctttaattcctggaattaacctaccttggctaagatgtattccccttttactcaatgctagatttggttgataatattctgtttaagacttttgtaaatatgttttgagtaatattggttggtaattctcatttcttgtaccatacctgtatggttttggaatcactgttactaaaataagacagatgtacaaaatagaaatatgagacctacaaaatccatgaaaattgtttaagatataaatatacatttcaggctgggcatggtgactcacgcctgtaatcctagcagtttgggaagccaaggcgggtggatcacctgaggtcaggagtttgagaccagcctggccaaatggagaaaccccacttctactaaaaatacaaaaattagccaggcatgttggcagatacctataatcccagctagttgagaggctgagtcaggagaatcgcttgaagccaggaggcagaggtcgcggtgtgcggagatcgcgccactgcactccagcctgggtaacaagagcgaaaccccatctcaaaaaccaaaccaaacaaacaaacaaacaaaaaagatgtaaagatacatttcagtgaatgatagatcaaacataaattggaaaatatataagacttgaatatcatagttaacaagcttcatagaataaatatcccctcatttttaattctttgtaaagagtctatgtgagttgatttattttttggagggatgcctggaaaatatgtccatgaaaatgtggtcctagatttcaaaatatagaatcagtttacctagagttataaaaatcttgaattttaggccgggcgcggtggctcacgcctgtaatcccagcactttgggaggccgaggcgggtggatcatgaggtcaggagatcgagaccatcctggctaacaaggtgaaaccccgtctctactaaaaatacaaaaaattagccgggcgcggtggcgggcgcctgtagtcccagctactcgggaggctgaggcaggagaatggcgtgaacccaggaagcggagcttgcagtgagccgagattgcgccactgcagtccgcagtccggcctgggcgacagagcgagactccgtctcaaaaaaaaaaaaaaaaaaaaaaaaaaaaaaatcttgaattttaaaatatttttgtcttgagatattttagtaatttttatttgtttttagaacttagtcatttcaatttatttcattggtcttttcaaagaactggtatttttgctttgagcctctttactgtatgtttgttttgcttttcattattttctttattatttttctctttcaattttgaatgtattctgctgttcttttaaacttattgttaatttaaatgcagtgcaataatgctcatcttgtttttctaacaaaaacaatttagctataaattttcctttaaatgttgcattagctatattctataagttttaatacatattattttcattaattttaattctggatatttctaattttcattgttttcttctgtgacccacagttgtttagtagagctttaaaaaaaatcccaaaagtaagatatttttcttgttatatcttcaaaatagtttataattcaattgcattatggtcagatagagatctatacagataaccagtccttagatctttgattagctttgagaattagcataaggtcagtttttataaatattctatatgactttaaaagaacgtgaattttaaaattgttggacacaaagttgttatatgtctattagaacaagattgttaatttggtgttcagatcttatatgtcctatctaatatttctgttttctgtttattcttaatttgtcaatagcaaagatgtgaattaaaattttccactattatggcaaatgttgtagttctagggtatttgtaatttcatcaatttttgattcatatatttggagtgatgtgtaaacagtttagaattgtaatacttcctattataccttctactacctgtgtaagtcatgatcatctttatctctaatattgcttcttaccataaagacaatcaaacattaatatttatacagaattgtattcattaatatttgtctcatttttctttcttttttgtgtgtgccctatattttatgtatgtatttaaaaaatttttaaatagggagcaaatttctattctatttcttataattactcacatatttaaagccttattcgtatattctttatatacttctttgtcctttcttatactgtttttatgtctgaattcattattttcctcttttagtttgaaagttctatcaaacctctagtttaacacacatagttaacgaagtctcaagttaataccttttcttccttctgagcaatgtaagaacattaaatgctttaactctgatcgataatatgttctaacctatttgacaatgttatctggtattttaattctagcttgattctttctccttcctcccaacaaaccaccaacctctgcatactttaacccacagatatgccagtatctttgcttagcattccctcgtgtatcagccttacaactttctgcctaaaacatatcccttacatttcctttgatttgtttgtgtggtgtgtgtgtgtgtgtgtgtgtgtgtgtgtgtgtgtgtgtgtgtgtgctgtatgctctgtgtttttgaatttcctaaattgtctttgatttcattcttggaagatggccttattcaatatggaattctagtttgacagttactctttctttctgaactttgatgatattatttcactggcttctagctttgattttttggatcttttgaagtcatctgtgagtcttaaactgctgctcctttgtaggtattcttttcttcctttctgcatgtctttaacaacttgcttctctttttgtgttgtaaagttttattaatactgtgtctaggtgtggagttccttttatgtatcttgtttgggattcattgggctttataaatctcaagtttgtgtctttcaatatcctgagataccctctgccattatctacttgaatatttcttcttctccattttctctattacttcctcctctaatttagaatttcacttagatatttgttaaggccttctcaccacatcatccatgtcacttatctttccttcattatttttcatatgtctttttaaatttttaactacattctggataaaatttgaatctatctttcaatttgctaattctctacttaggtttgttttacttgctatttaatccgtctactgagttttaaagtttaattactatatttttcatttatagaaattctatttggtctttttaaaactctattttattattcttttataatgtttgttttctgtccttagttttaagcttctctcaaatttcttcaagcatattgcaaatagttattttatattcatgtcttgtaactatactatctaaacttgttattagccagtttttcttataggttctcatttatgatgtcctaaatctttgtgtttcagttttcttactctgggcttttaatttttcctagaagtttattttttggaaatactttgatgtctgggttgaagttgaattcctctagagagatattttgccaattgcctgacagcactaactaccccaggaccactcaaaattaactccccacttaaggttttttggagaccatatgagaagcatgaattggatagcaaaaacctacgagagttggcttgtagttctaaaatctctccacatagcacaaagatggagacaggcaggtgtccttgccgtttccttctgaagggcagacttcttttcctacttattctttttttttttttttgtcagacggagtctcaccctgtcacccaggctggagtgcaatggtgcagtctcagcccactgtaacctccacctccacctccacctcccgagttcaagcaattatcccacctcagcctcctgagtagctaggattacaggtgcctgccaccacgcccggctaatttttgtatttttagtagagatggggtttcactatgttagccaggctggtcccgaactcctgacctcaggtgatccacctgccccagcctcccaaagtgctgggattacaggcgtgagccacggcacctggccttttcctacttaagcaggttatttagtctttggggtgcaagatttactcagggatcttctgtgacattttccaccacaggtagtcctgagactttgtttcttcgtcctcaaactggaagctcaaggtctgcagttccccacagacatgctcggggccaagtgtggatctctggctttcctgtgtccttgcaccctaggttttttctctcccttcatttttgggaaccttgtttttattaatttttctctgtgtcaacatagcggcatgtttaaaagattgttttaatatttcgtctaacatttaattatttcaaacaaaatatatagtctgctacactgctagaaatagaagccctaggtttgggaattattaggtattcttgtatttgaaaaggggaactaaactttggctaagaaatagacatgtctgggtgtgagaccagattctgtattcaatatttccagatatttgtttcctcagcttttctgataataacaccttttatttgtatgttgaatttctgtttacaaagtcctttcacacatatcaagtctttggagagttggctgaagcagatgttgttatgcctgttgagtgaatagatgagattgttgagggggacaccacactgatttggaacccaagtcttaatacctagaagagttctatttttgtttcaatgccatcttggattaaattatttcaaagaagttagcaagtggatctcaatttgttgtctggggcaagtcactgcttggacactatcttgagggagatccggagcccaaagctgggttttcttcatgttgttgctgtttgtttgtttgtttttttgataaagagttcattgatccagttagcagtgtctgcaaaagttacaagagatgaaaaatgcaacttatttgctttcccagatttaaaatggccttcctgactttaaaaaattcacagttctcatataaacataaaatatatctttctaaattcagatggcataagtaatggaaagacagactttgcttatttcaaataatgaggctactagttctatttatggtcagcttcctttgtggtgtgtgagatgagcatggaatggtctttcatgatagggaatttattgcaagaaaaactagaacatgaggaaatcttggaaagccacctcatcattgatacaatcacttggggcttctcatacggttgtgctacaatcttcttgagttacaaaaataaggacctggcttagctcgggacagtagcttgaagtcaatctgcttgcctttttccactcatacaatatttaatatctgattgggccatgtggccagcacccatcacagactgtccctattggtcagcatttaagccaaacatttcaggggtaacagatcttcttaatgcaaaggccatttatattcccttcctgtgctggctgagaccctcatgcaaggctgccagcagcaggttagaagggttcttcttctctagcaaaccctgagacaggttgtatgacatctcgtaaaaggcaggaggagttgaggctactcgtttagaagagagcaaggcagtaacaatcattacaacctaagggcttctcctgaagtccatgcaccccaattagaggatgatcagatgagcacactgggcaaatcaatgactactccttgttggtggtttcttaaatgtgcattactattcaaatatcttcatcaaatttatgctctgttaagtcctttgaaggtaaactaaaaaatcatttctcattaaaatatcatctttatttcaaacctgctcatgctcatatcagctcctctaatgtcattatggaaaaaggcaatttctttcttttgatggcttatttttatatttatgtttcagatcattgtggcatataatcaaaggaaaagttatcctggggatttagaccttctgtagattaagatgctcagatatgcaaaaccacttcccatccttgtgactgtcagtagttttctccagtgcaaggagtaacatttatgagttttcataagcatttttcatcaaggagtgtggggtggacagtggagccaaagcaccttctgtcattcaaaaatccttaatccccaaccaggtgcggtggctcacgactgtaatcctagcactttgggaggccaaggtgggtggatcacttgaggtcaggagttcaagaccagcctagccaacatggtgaaaccccaactctgccaaaaatacaaaaactagctgggcgtggtgatgggcacctgcaatcccagctactcaggaggctgaggcaggagaatcacttgaatccgggaggcggaggttgtagtgagctgagatcacaccactgcactgcagcctggggtaaagagtgagactccatctcaaaaaaaaaaaaaaattcttaatcctcctctgctgctactttccctccttgtatctgcccattcccaggatcagtgcctccagccagttgacaaaaggacagccaccttcctcccgctatcatttttcttcccaccactgttcttcctctgcacttcttgtgcgttgagcctgagttgattctttttctcagaacaaaatcttctttgaaaatgcaacatgaggtaagaaaaggagtttatagtctgcttttttctgtttgcatttcctgcctctgacatttgctttcagactaattaggagttttggagttccttttccttttccccattgctcattttcaaacaagactgtgcaaccctttccatcatgagatgaaaatctcacatggctcaggtagctcaggtatcaccctgcctagaaacaggggataaaggacatgacctttcatgtctttctgtccccaaggaccttggcctcttgccagaatccttaatagggtccaggtatatttgtaaaatgaatacatggtctctaccatttatattttcatttgggcattacatatcgggtgcctcctattgtcaggcagtgtgttcggtcctagagcttcaacagtgaccctgatgggcatgtccctaattgggggtgtgaaaacaaacaggcagttagcattgctctaactgcaataatgctaagaacatctgtgatttttgctctatttaaagagaacacatagtttctaaagagctgcatcacacctatataaatgatttgtactttctgagcctccatttctcattcatagaatggcctaatgactacatcattgtgttgttctggggatgaaatgaggcaacctaatgaaaagcttccagcacagtgcctggcccatgggaggtactcaacctctgatcacctggctgtccttctgatggaatgctcctctgcctgctctgcttggcatggtttcctcctgctgatgagggtgggcaggcattgaccaggcaggcttgtttcccacatcctttttttcaaatggtcttctggagatgcacttatatcctctgcaaaacacccttccacactaaggtttattaaactacccaacgttgcctttctccctcagagaagatcataccaactctctgaacatcccaaaatggaaagtttgtatagattgactcatcagagcacaattgtgtgttcagtgccagaaattatcagcttgtgtggaaaaatataattagcaaaagtaaaaaaatacaacataaaaagcaggacctgtcttcctgattcttatctcatttgttttttaagagttttcttttttggtgccagttttgtgtttcttgtaatcagtagggtccaaagattttccgcttggtttaagagtcaactggggatgaagttaaactataacattgcacctaagctagtgcaatgactagacctttctttacaaagggagagttttgaactcatctgggttgctggagagaagaattagtgattccttttcagtgtcaccaggcaggcagatagccctgttcatgggatggacctggtgttaccgcctatgtcagctccttttattgtaatgctttgcctatctaccctcattcgtaacagccagtgagcatcaccaagtgtcagaaacagggtgaaaagtcattatctttcgtcttcttcctagtttagaccatctttcctactcacagacagatcaacacataaatattaacaatcagctgctacaaataaagaaaacctactacaaggctttgaaagcgagggacatatgctcttcccacaggtcactatgcttacttccttcccatcagtagtaaaggggcgtgtgtgtgtgtgtgtgtgtgtgtgtgtgtgtgtgtgtggtctgtgtgtctccaactctggagagcaaatgaacaagtttgtccaggacaagtagactctgaatatcctctcatcccactggctcaggagttttctacttatatttctgttgttggtaatgttagcaggatatgagcacatttgtcctgtcttataatccccatgtttaaaaatgtttaatgccctaagtctttgaatgctcttgtctcagttttagttcttaatcaagcagaaagctaggactgtgcttaaagggaggatggaggtagggtgggggacagacactcacttggaatgcaggtcatttaacttgttccatgctagcaccctccccctcctcacagtgtgtaaaatgcttgttttctttgagaagagagtagcaagtcctatggctagagtcagaaaacatgtcttggacagccttcctggttttttgttgttgttgttttttcctcccagttgaacttgaatctgagccttgatgatttagagtcctaggatttcagagttgggtgggagatggctcatgggagagattgcaccttgatcccaaaccccttagctgccaggaagagtgtcagaaaaattatgaaatcatactaattcagtatgggttggtagagtctcattcttcctcaggtagttactggaaaaacaggagtgcagagaaccaaggcttcccatagctcagacatgcccttgggccagagggaatggcctcaaaagtcctttgtcaaaggatattatgttagttcaataacagtataaatatcagtaagaaagtgacaagcataaggtttagcatgaaattggagcctcattgtgtaacttaggaaagtaagggcacacagtgaagtttaaaaaaaatattcaaaggcccagtagcgtgtgggcaggaagactggctgctgctgggtgcccacaggatctaggcccttgcacattgcctataaagatgacttggaattcatcctctttttcaaagaggcagaggcttcaacattttggaggggtcacagtggtggtcctggctcccgccgtgtgggagagaatacattttacctacccttcaaagaatgagttagagcctggggtgccaatgctggccaaatacaagttcctgagacagagaaatcaggcggatgctgaggatctcacctcgaaccatttgcccaacagtggagggtttccacagcccttccccttctccatgccctggatgtgcccggaggtgctgtaggcagtattggttgcttgggctgatgacttatatgtcttaaagtctccaagtcattttttatggggacacataaaaattcctgctcaacagctgccctatgttcattgatttgtttgtttgtttgtttccctaagagatgccagtttggcaacacccaaggctgcctctcccctgattcagatcttggagactttcatccaaaaccatacaaagccccagggcagttttttttgtgtttccctgcatttagtgtaattaggtggataaacttgcaaagccacctgatttgaataaagtccattattcctcctgaaggagctcaggatgggatcaataccaatgggatccaactctccagcctcctctcccactggaatacctcaaggaagaatgtaaatgaatagaaggaacagagcaaaggggatgaggatagaatttaagaagtcgttgtgcttgctacgttggtggccagatagggccactttggaacatcatgtaaaccacttaataacctcccaccacagtatctagagcagggctgggccatgcagtttcttctcacatatttttactttaagcagaatacttaatatctattggcacggctctgatgttattcatcagacctaactctgaaatcctaggactctaaatcatcaaggctcaggttcaagttcaacggggaggagaaaaaacaacaacaaaaaaccaggaaggctgtccaagacatgttttctgactctagccatagaacttgctactctcttctcaaagaaaacaagcattttacacactgtgaggagggggagggtgctaatcattacgcagaagtgtttcaatgcacacaccactcacatttagatttactttcttttgctgcatctttatacctacgataaacctggtttaatattccattaaaatttttttttaaaccactgtaactttgtttaatttggttgctgaaaaaagttctactttggtataatcttgtgtttgtaaccgagatcgcttttaagaaggcacattcttatcagagataatttggaaaagctgcaggttgttcactgtttggtactatagtaatgattatcttgaacttacagtttagggtcctacttgtttcacttagcatgcatcctaagtattgtctatattgttacataatcatgtggttttcatggttgcatcatagtccattacaaggaaatgtcacagcttggttatctattcttctgtactgatcattttcagtttttcaatatttatcaataactttgagcagaaaatcttctagatttcccttacattttatattattttcttaagatggactttccaaggtctcttataaagacaatgaatgtattttaggccaaggcttctccaagtgcagtgtgtgcacagatcgctggtggatgttgtgaaatacagattctaactcagcaggtgtgggttggacctgaggatctgcatttgtcacaaatgcctgcatgatgcccagaccgtggctcagggctttgggcagtctcttaaagttgctggtgtattggcattgagagtatttataatactcgttttgccaagtcactgtgtgggctggttacctaggagctccatcccctcagaagtactttctaatcaagaagaaagtttggattagactggtgtccagagggatggggagctgtaacacctgccttcaataaaagcctctaagcttagttgtggccaccattagaatcatctggggagtacacacacacacacacacacacacacacacacacacacactctctctctctctctctctctctctctctctctctctctctctctctctctctcagctccctccagaccactacaaacagaatggctggcaatggaacctgggtatcagtattttttaaagcttcccaggtattagaggtgactctgtatagccagggttgaggaccattgttgtaagcgcttcccaacttaaatctcactgagctcccaactatgttttatacctgcttggatgtaaagcttggggcttatacatgctacactcagacctctacactttcgacaatggatttagcacagccatgagttgtctttgcaattcagaaaaaacaataaccattatttcggacagaaaacaaggtatttgtcatcgctgacttctccatcaaactcactcttttgtagcatttgctggtcccatcttactgaatgccaccattgtacactcagtctcccaagccaaaaacctggggctgatcctagcccctttactttcccatgcccttcagatctaagcagttctcacagtcctttgctctgtatgtacttgtttcttatagaatgtatcacattatattaaaattatctcttagcatggtatgtccttcaactagaccatgagcctcttgactccagagatagtatctgatgcatctttttattccccacatctagtgcagtgcctgtctagcacagagtggagactcctgaagtaactattgaatgaatggatgaaataaaataggttttgatcacatataaccctggaagattattcttatggttgaaagtttcatagcagcatggtgctagcaggagcacagattgcctagatagtgcctggtgccaacatggccttggccttgggggtgtgcaagacggcagacggaatgcccagcacgcactgagtccctgccactcaccacctgctagagtaacacctgctgtttctgtttggcagttgccttttcgggccttggcttcacgacgttctacttggcgggcaagctgcactgcttcaccgagagtgggcggggaaagagctggcggctctgtgctgccatcctgcccttgtactgcgccatgatgattgccctgtcccgcatgtgcgactacaagcatcactggcaaggtgagtccctgcccagggcctgactagtcctcactgtggttgcccctctcctccagggatgggtgtagaaatgcaccaattgtggggagctaagtgcccattgtccaaaaccagaggaggctgaaatgacagagcggataaaattttgaagcaaatatgctggttcaagtgaggtctggccttcctggggaaagaattggagctcttcttcctccttcatgctccaggagactgcttgagtcctgccagaatgtcaggccctttggtttagtgtcacccttggcctgagacccaaatgtgattttcctgctggatcacttgcctcagtcctcagagttggtgccaagtggtttttggcttcctttgcttatcaaatccagcctacaaggacgtatttgtcaccatggatgctcttccgaaaggtatatctagccagggattcattccagtaatgctccaagcagcagctgcaagcctggggtgaggtttgcctatatatatacatatatcagtcctggggtatttgttaaaaatcaaaataacacaaaacaagggaggggcttgttcctgaaatataactaaaccatgccatgtccttctgcagacaaactgcagctcacagtctgtctgaaagacaaccaccacctgccagagcacacagagagctgagacggaggtgatgtccatgggaggtgtggcctccaggaagcatggggtctagggaagggtttcccaagggcaatccttggatcaccttgatcaagctgccctgagctagaaattggactctctaggggtgcatctggagcagtggcctagaatcttcctggataataagcaagcctgtcattgctgatgaagtctaagaaacactggtaaagagctccaccatatgtgtcaattttaaccaaacaaaggaaagaaagtgtgcctgaatccagcttctttgaatgaatgggcttccatgataggtctgtgacccaaacctcctctccctttcttgttttccgactgttgctgggcattgttcacctccttcctctctctgtctttgcagccagctgccttgcaggactgccctcttcctaccttttccgggggtttgttgcagtggtaatgaggcaatggatggggacagggttgaggggaactcctagctgagagcccctccttcctcatcttctctggagaccttgtgctccttctagcactacacagcttctcctgttccttcctggtctcatccctaccccgtatcctcctggagctcatgctctgggtgtcctgtgaccccagcaggagctttgggctggaggatgaagggtatagggaaagagatgctgacatggtttggacaggtggatgcagcaagcatcaagtgctactaaggtctgaggccctcctgatgggggaggtcagaagagggtcacaggtctgaacctgcccttgttctgtttttatcaatgacttggatgaaattctggatgataagaagccgcatcatgagatggaaggatggacagagtcactgggccaacaaaaacagaggcacagccccccattggaactgggaatatgttcccgcagaattgtttcccacctatgtgagttagggcatttccccatgaagaatattacgggccaaatggccttttatggactgcttctcattgatcccttgtgagccagtttcctctttgagcacaggaactatccctaatatttcacagagcttttcatagattgaatgaaataatggatccaaatgttctttgtaaatggaaatttactacacacatgcaaagtggtatcattgttgcttagtacattttttctaaggaaggatgcattgtgtttcccaaacaactgacttggagacagactttttttttggaacatgatttatttgtaagctatgaatgccaggttttcacttttattcaaccactttggattcggggaatgattgggggtttcagaattgaatcaatttttcctttatcttggagtcaataagagcctttgcatagtactaacaacctaggatgtgaggctggcctgtcttcagcactctctggccctaccctgttttgttcctcatttcctagctgtggtagtgtaacatggccagagtaaaggaatgtggaatcacagctcttgtctttagggaatggtgaatttatgctgcagctggtgtacccaaggcctgttggcaactggggctttgaaaccgtactatccaacaggcacagaaaggaactatgagcagtcaagggagaatattcatcctgtgtgggctgttgggaaagcaaagcaagagaatttatgttcagtgatggttagaaccatatttgggaatcaaacaaaaactgcgtcatggtagacttctgcagcccaaactgaatgtgcatctcttggtacaggttattgatatagcctaaggaccagttcagctctgccattatgtgttcaacttatacccttggagtcagccaggagaggaacacaacttcccttggatgctctaaagggctctgagtcaggctcattttacctgagttccccttcatgaggctatctgccgctgtccacaccagttgttttcaatctctcaggggacatttagcaatgtctctagacatcttcttggttgtcacaactttgaggggtaggtgctactactgccatccaatgggtggagggttagagactagggatgctactaaatgtcctacaatcacaagacccctcgcccactaacaaggagttatgcagccccaaatgtcaatactgcccaggttgagaacccctgttctacatcataccccagctccatatttcttttccatgttacacgttaagaagcagcaatgttctgggagtgggaagttttgttcattcaatactcaattattaagggagaaatcaaggagacctcaaaggtttcccactgggaggagggatgcagagtgaggtcttcaactgcagtgtaggtggatgtttcaggcaggatgcctgattaagataaataacttgttttcctttggtgaactgagctgcccagtgactgtgggcgggggccatccatcatggtgagaattcacatggagccccattagcatcagcaaaactcaagtccccctcattatagactttagttaacagcattcatgttgtgagattttatgactccatttcaattttgatttaagcaactgtgcctaatgtggaaatacatccaattactcgattacacattcatatccaataaatagtctataatctctaatgactctctctctccattatcatggttattttctgctattgacactccctggtcttttctgcctccccagcccactccaaatatacaaatctattgttttattaagtgacgaaaatacagaggcacaggccatggcatagggaaggagacatgaaacatttagcagaacttccccagacacaaaaccggtgggatcaatactaaatctctgtgtggctgatgtggcctgtgtccttgtgacattctggcttgcaggtcaactggaagctggagagtttcacagatgatgctaactacaaagcccagtgccctctcaaacaggcttatctttgtgattaacaatgtgtttagcagcgctcaaacttgtggaatccccatactagagaaaataaatgcagagaaagagcagagcatgtcattaaactgactcctgcctctattcacgctcttatgtgattacgatttcttgtcaatggagggttacaactactagtggcaggaatgtggtgtttgctccatcactggacttaataatgagctcccctgacccctcaagtccctgcacctgaaaccagcctctcctcttgtgactttaggtttggaggtaacattttaaacacttgttcctctaatcataggtcattttaagcagccctgggtgcctgcgtggtgtttcattataagaaagaacatccccctctggatgtaatctagggaaacaggtctcaaagaatgaaacattcatttgttcccacccagactaaggttggaaagcgtctcggtcattcacagacacagttgtctaaccgggctgaagttttcaagatggccattattgcgttcgcctgctttcccagactgggctgtgaagggtctgtgatttgaaatgaactaaatatagttaccaagcttcaggagattactgaccctgcaaatgcaggtgttttggtagttggatattgtgctggactatttcatgtgccacaaaatacttctggcctcaagaagcccaggcagaagctattccctttggagaaacccttttttcaaagcctgatggcattctacaactcacaggactctcttgagttctccttccttttgttactgataaacccagtagtcccaaagatgggatccttccctgttccatgtgacagagccattacatgaaatcaaaagtgagcatcaagcagagtaagctttattccatggccaaagaatggagaagttggggccgggcgcggtggctcatgcctgtaatcccagcactttgggaggccgaggcgggcagatcacgaggtcaggagatagagaccatcctggctaacatggtgaaaccccgtctctactaaaaaaaaaaaaaaaaatacaaaaaaattagccagacttggtgatgggcacctgtagtcccagctactcgggaggctgaggcaggagaatggcgtgaacctgggaggcagagcttgcagcgagccgagatcatgccactgcactccagcctgcgcgacagagcgagactctcaaaaaaaaaaaaaaaaaaaaaaaaggaaagaaagaatggagaagtgggaacacagctctcagatgaacttctcagctagtgagcagtgaagggattaaaatatagggtttctctaatgaagaggtcaggtagtaaaatctaggggaggaataatcggatctttttctggaaatggatggtgaactcctgggaaccagagtgctgccttccttttatggcttcttccaattgttgtcatggcaattgtcaactgtcatggtgctagtgagagtgtcatttagcatggaaattagatgataatgaagcctgaggtcttcttgaagttgttctgtcagctgtcttggttttaaccagtttcaggtagtccagttacaaagggaactttttaccacaggggtctcatttcttaaagataaacagggaggggtgtaaatccagctatgtcatgtaagccttacgctgagtaacaccttccccttccctcccctctgtctctgtctccatctctctgtctgcctctgtctcttacacacacacacacacacacacacacacacacacacacggctgagggacatacactgttataagcaggcctcccttgtgctgtcagaagcaatctgtagattttctaaatgaagtgacttgaaaaagatcccttggaacaatatgattgtttctgccaaaaacctgccagccctgggtagaacaaaaacactgaaattctccctctaatatcctcagcccaagtgaattgatgtcacctcattttccctccacagttggctgctgtgtatggcagggcccacagtcacatttaccatcggctgccaacccccgcctctgtctgggaacctctgaaccttgactgcccatctaagtccacccgcctctgtgttggtgcctaggagagcgtaagaagcctcagcccctggctcacccctccctccggtcaaagtccactgcatatcctgctttcagcctcaagagaggcattctcagtcaggacttctgccctcttcctgcctccaggatagccctggtgtttccccgtgatgtaattcccagggaagatggacgttgattgctcccaagtctcactggcatccttcctttgttttactcaagggaacctgtctcttctcagctttctgtggtgttctgtggttcctcctgctcagcatatttatagactccaacttttccttcccactctggtctagtgatcctcagttgttgcctgaatcattgcagaagcctctcagcctggctccctccttccttctttggccctcaactgcatttggaatgtgcctttagagcctgcgttagcacatgtcacttttgcaaaaatcctccagtgattctcatttcactcagcatcacagcctgtgtcctgccatggtccataagatctgctccctccgtacttctttgatgctatgttcaagctacttgtcctcctcgttcacatgattgcatcgcttgagcttcttgctactccttgaacaggcccgtcccatcccacctcagagcctttccacaggctccaccttgtgcctggaatgctcttcttcagatgtgggcgtggcttgttctcctctccctcctaaactgggctcaagtgtcaccttctccgtctcgtgatgcccactccacttgaattgcagccccttccccacatgccatgtccctctccccttgcgcatttaccaccttctgacaaatgaagtcatttattatgtattgattattatctgtctctaaccaccagaacaggggttggcaaactttgtaaagggtcagatatcaatatcttaggctgtatgtggccatgagatctttgttgcacctattcagtttggccgtagtgcacagaagtggctatagacaatatgtaaaggaacgtgttcacttagtttgctggcgtctgcactagaatataatatccacgtgagcagggatttaggtctctgttgttggcatggcacatagtaggtacttgtatcagggtcctacggctgccatagcaaagtaccaaaaactgggtggcttagaacaacagaaagatattgtctcaccgttctggaggctggaagtctgaaatcaaagtgttggcaaagccaccctctctctgaaatcagtaaggggaggatccttctctgcctcttccagcttctagtagccccagatgtgcctttgctgatggcagcataattccagtctctgcctctctcttcccatggtgttttctctgtgtgtcctcacatcagcttccctctttgggtgtctgtctctgtgtccaaatttcccctctttataaggacaccagtcatattgcattagggcccaccctgattatcatattttaacttgattactcctgtaaaaccctatttctaaataaggtcacattctgaggtcctagggactaggacttcagcatatctttcaaaaggacacaattaaatttataacagtcttcaatacatatgtgctgaataaataaatgagtttgacttaatcatgttcctttcttactaatatcattttttctttgggctggttttactagtaacttattctctacaagttctttccttttaaaaataaacaaaaggttatactgtaaatattccctccctccctccctcccttcctccctccctccctccctccctccctcccttccttccttccttccttctctcctttcttcttgtcattgtgtctgtgtacccggcgtgttctccactgggctcagtactgagtaagatggacatagctgctgtcctctcagcttatactgtaccagggctattttgcatacttcctgctaggtaagctcttttgtagaaactcaaagtcacagaaacatgaagcttcacaagtagcagaatcactggaaagaataaaaagaacaacaaaaaaatcacatgcacttgttgagtttgccagagctgacttttgccctagtaccttgggtcatggagcccaaggcatacaaggtcccaagtcaagctagcttagtgatgttggaggctgccttggtgacagaagggatgatcttctggaggacctgacagcacatcttcagaagcctttctgcttgtttgtgccacaacagatgagggcagcctggcacctcagtatggcagaactcataaggtccttcctgtcctttgacctcatggcaagagggcagggttttgccaatgttataggtaaggattcagatccaggctgcctgattgaaagtcactctttccactaccattggagtttatctggctcatctggtgtcaattctctcctctctttttaaagaacagctttctttataattctcaattataaaattctcccttttaaagtacagaaacatttttatatatccagagttgtgcaaccattaccactatctaattctagaacattttcatcaccccaaagaaacccttatctctcagcaatcgcttctcatttctctgtgcctcaggctctggcaaccactgatctactttttatctctatgggtttgcctattctgcacattgcatataaatagaaccatacaatgtgtggccatttgtggctggtgatgttgattctttagtgcctcttgtagatgttgttcagctcatgtcagttccccatttactgaataaaagtcggctgagctctgggaaataaataggaatgaaacatcccagagtcctaggtaatgacatgtagttggggagatagattcagaaacaggaaacaccactggtggtaggtgtgaggccacagagtgcatagatggcaggccagagagagagcaggtcccctggtccatgctgagggctccacagagccacaaagggacatggaaaacattctgctccagcccataccagatgactggtcaatttgtgtcctgtagtcttacaaagacactacccctttcttaaaagatgggtctatcttcagtttctcagatttaccaagcctcctttgtcatcagcaccttctcacatacccttctctctgcctggaaaaccaccagtgccctcttttcctctacttctcaacctctcccggttaactcttgctcatccttcaggtcttagcctgagggtcatgtcctcagcaaaacctctgctccagaatagcccagatctctgtgctgggcgagctcacagaccctcacacgtttccttcatggtgcttaccatagctgcaaattgctgatacggctgtcattgtttagtgtctgtcttgcccctttgctggaaactctgggacagcagggacatgtcccattcgttcagcctgtgtcctaggcttggccatcatgcccgacccctgatacgtatgcagtgcatgtgtatgaatgaatggcatcagtgctacgtaaggagacagaagtattttgtattccaaagacactgagatccatttatttcccttttgagacttctagttgatttggggcaaagttaatcccaagtgtttttcccccaataagggctttcttgtcccctgcttgcctgtctatcaagaggatacaaatgtgattttatcaaaatagcaatagcccacttgaggcaattgatgacaagctccttcataaagtaagttattgtttggatcttgttcgccacctttgtaataaacacagccccaaaatgactttgctgagaagcagcttggatagacctttcattgcccttgttacttctcatagactcccatagcacctgtgatatcacttttcactcattccattaaatgggaaacagaattggcaggaattgtcatttccatgcatgctgctatgtcagtaaatctgggaaacattcttggaatggtttgatgtcttttggtcaatgatccacctaatgaaatgctgcttcagaaaatagaatgttgaatggtgttatttgtaggttttgctctttggtctgtttagtcagtggctcaactgcagatgttgtggatcgttttagatgctaatagaaatacctcatgggactgtttcctggggttagaggaaaaacaaaacaatagtgcaactctaagaccttgaactagtaaaaggcctgacacattttataggctggtggccataagctagtgaagagattcttcatttaagcaacttcatttaatcacgttaattacaccctgtggccctgctccagaattcacggtacatattgctttacaatttcttgggtgacaaacgtgtttttaagttccttagaagtttatttacgatgctatgaaaatgtagccatgccagagaggtgagatctgtaagcttctgagttgctgtgtgaggagaaggatggggcagaatgagaaagcctccggcagctctgaagtggaatgtgagaggaatggcaaaaggataacaaggatggatactatttttatgtcctattttggcatgctccatgaaataatcattagaagtaatatattattaaattatcatcacaacttaatgaggcggatactgagatccacatttgagagagaaggaaactcagagaggcaaagcaacttgccctggtagggcctgcaatgtcttagccttaggatttctcagcgtggaagattcttggatcgggggtgaggataagtggtggttaccttactgcagccccaggagcctccaaatggccaacagttcttctcttgggaatggatctgctgcctccttttcttcttcattcttgggaatgcctcttgctttccctgctgtcctccaatccccccgctaccctgatggctgctcaccaagtctgagcagacacgaacctgtattccttgcctttctcccagacagctactgctcagtcacactgtattcatcagttgttgaagtttgaactcgtatggggagaaagcagtgacaattatttggtctctcccattgactagttagaatgacttttgtttctaactgatattttatctgaaccaaagagaagatatgacctatttttttctcttttctttttctttttttcttttttttttttttaaagagatggagacttgctctgttgcctgggctggagcgcagtggtacgatcttggctcactgcaacctccacctcccgggttcaagcaattctccttcctcagcctccagagtagctgagattaaggcacatgccaacacacctggctattttttttttttttttgtagttttagtagagacagggtttcaccgtgttgcccaggctggtctcaaactcctgagctcagtcagttcgccctccttggtctcacaaagtgctaggggatatgacctattttctaaatgcaccttggtagagtctccaaataatctcaatgtgtggcctcagtaggctgactcaggatcacattcctggaacacttacataacaaggcctcttagccaccttgtacttgtggttccatgctaatatgttactgatgaggtcatcaggaggaccagaatgggaaaggggcatgcccaaaaacacacaggacagcaacccgacctaaccctgagttactatgtatccatttccctcaacaaacataattatgctgtgagcaagatgttggccaaggtgctgaaggaatcaacagccaaccctaatagagttttgagtccagcattaaacattaaacaatcgcacaatttgtcattgttcgccactctaattgcacagggagtggggagggactattaacatgtgtaactgggagacttggtctagtctggaggtcagatgaggctatgttgcacaatgatgttgagctctgaaatatgaatagaaatgacattgagctcagaaatatgaatagaaatgacattgagctctgaaatatgaatagaaatgacattgagccctgaaatatgactagaaatgatatcgagccctgaaatattaatagaaattgattaggggaaggcatgaggagaagggattcctgggaatccaggatcggaacagcacatgtggagccccaagaggagaagcagcacatgtatttgaggaactaaagggaagaccatggcttcggtaggaggagtgaaggggaaatggctgggatggttggcagggccagggatgcagccttgaatgacacaggggcttggctgttctgttacagcagtgggaaggagtcagccaagcaggagaatggctgcgcctatttgctcttgagagaacatcaccagctgctgtgtcccaagtccagttccagagcagcgtactgggcccctggtctacatgcactgaaacttatgctgccatcacggacatgtctaaaataaaagagcttttcttttatttgtacttcttttcctgctttgctattgtggattaataaaattacatgcatgaaattactaaatttgttttaaagaagataaagctattcattatagaacttttcatgtttaactattagcttcatagaaactgaaagtagaagcaattctatgaaagatactgaaatatgaaaatattgtccccgtcctcaaaaattatcccgttagatctagatagaaccaggatacctataacaggatcacaaaaagactgataggtgcaatgcacgtttctaagcattgagcagcttgttttcttgaaagatacatttctttaatgaccactcaaaatgtcacctacaggagatgcagggacattagtttgtgacttaaactgaagtctttatatagtgcgttgcttactgggaagcgttgggaaacttgccaccctgagcactgatccttcaggaaaaccattgcctcctacctgaatgcagatggacatacccttcagcccgtggggcctgctgcatcctgaaggctgggacctcagacagtcatgtggttatcaagcctggaatgaacccgccagggtgtggacacagcatcacggaccagtgcaactgcaggatcaggactccagggttcaagcccaattcttttggggaaaatggggctgatcctgcctgcctatgggaagtctgtacggttcaacaagagtttcaaatttttttgttaggggagattttccactggactagaatcttttcagcaaaaataacccatagacagttaaagtgaacacacacacagatactaagcgagagttgtttatgtgagctgcttttatgaggtctctattgagaactacctgaatgttctctttggcagggggctgcccttggggcggagggctggtattccctgcagatgcacccccctgcctcacctgctcccctcttgcctcccagctggtaagatctgtatctgttagagaattgagtccttcccgccagaggtctgctgagtttgccaacacaggcatatcttaaaatgttttattcactttgtctgtgactcagaaggttcatttcatccctgggaaaccacttaccatgaggcagagaccctggcatctgctggcttttctgcagcacaccagcaatactacaggactctgatgggaacttactaaagaaaaaaaaaattacagctcccaagatatttagatcctacagagatggcttgaattcttcttccagaatttagaattgatttcaaaaatcagaaatacaaatctgagtttatgcaatgctcaggtgtgagttaaagaaatacagggaagggctgggtgtggaggctcatgcctgtaatcccagcgctttgggaggccgaggtgtgcagatcacatgaggtcaggagttcgagaccagcctggccaacagggtgaaaccctgcctctactaaaaatacaaaaattagctgagagtggtggcatgtgcctgtaatcccagctacttgggaggctgaggcaggagaatcacttgaaccagggaggcagaggctgcagtgaggcgagattgcagcactgcactccagcctgggcaacagagcaagattccatcaaaaacaacaacaacaacccaaaacaaaacaaaaaaccgggaagaaagaatcaagtactcatttttaagtatttcagtaccagaaatgctggcagtttgcagaggccaccactgtggtttctttcctttagtctttcagggggtcctgtaagcaaaccaggtcctagaacaggaaggaaaagtgctttctggaaaatataattggccacatttgaacaaatggtaacccatttttcctgctctgctgtttcctgcctagattcctttgtgggtggagtcatcggcctcatttttgcatacatttgctacagacagcactatcctcctctggccaacacagcttgccataaaccctacgttagtctgcgagtcccagcctcactgaagaaagaggagaggcccacagctgacagcgcacccagcttgcctctggaggggatcaccgaaggcccggtatgaccagtgtcctgggaggatggacactaagccctgggcacatctgccaccctgacatcataacacaatagaaatggttttctgtagtgtatttttcatcagttgtttctcaaagtcatcgtacttctgcttctgtttcactgatggtgttcctgctactttaaatgtctacttccaacatccttgaatttgcaagtgaaggacaacaatctctgagagacgtgtggaagaggctgtgaaggtggggtttggggagcttggccgattcgtctatctgaaatgtttgctgtaacagccaccttcctatgttttcatggttgtaaaacataataaaacctcccacgtggaagacttgg

SEQ ID NO: 15 - DNA, 1048741 bp, Homo sapiens
cgccgcaagagcgcgagaggcgcggcgggaggagccggcggcgcgcgcctccctgggcccggactcggccgcctcccgccgcctcccgcgcggccatggactgagcgccgccggccaggccgcggggatggggccgccgctcccgctgctgctgctgctactgctgctgctgccgccacgcgtcctgcctgccgccccttcgtccgtcccccgcggccggcagctcccggggcgtctgggtgagtggggggcgccgggggaggggcgcctcaatgaattagttgggggcgttgtgagaggggcgcctccgtgagggggtctgggtggggagaggcgccaccctgaggggtcggggggagaggcgcctctgtgaggggttcgggggggaggggcggcgcctcagtgagggggttgcggggaggggcgcctctgagtgagggggcatgcagggaaggcgcctcaataaatgagtgggggcgttgggggaggggcgcctctgagaggttctgggggagggacgcctcaatgaatgagaggggggcgtggggggaggggcgcctcaatgaatgcggggcgtgggggaaggggcgcctcaatgaatgagtggggggtttaggggaggggcgtctcggtgagtgacggggcgggtggggaggggtgcctcagtgagtgagtggggagcgcgccttggcgagcgggtcgggggctccgggggtctcggggttccagcgcgacacccccaggctctgggtctcaagcccccggccacgggtcgcgcgcctctctgtcctcactgggggctcggagcaggtctcgcgcccctgcctcagtttcctccccggcgccgcctcctgcctctaccccggctcctgggcctcacgccccgagccccgccactcggcactcccctggccctggagcgcgcggccctggtccggcgtgggtgcgccccccgctcgtgttccgccgcgtgtgccgcgaggggccgggcctcggatgtcccgctgcacccgcttctacctgcgtcccccgcacccccccgcgggcagcgccgccgaaatcagaggacatttttcctccgtggcagccgcgggaggaaagggagggcggcagcttcacggcagcgagggagtggaagccgctgctttcccaggcggacgcccctgttttaaacccataaaacctccagtccccggcacctcctttcctgctaatcttgtttattaagaagatttaccataaagccaatgtttccaggcggcttcggggccagaattacacatgacaggttaggataatcggtgtccacggggtgcagaagcaaacgcaggcggggatggaggggggtccttcgccgttgcccagcgccgcctgcacccacctcagtgcagctgggctccggcaccttcctctcggcctctaggcccttctggtctccagtagtgctttatcgtcaaaatcccaaacaaacaaaaactgcagagaaccaggagtcttgacacagtctccctggactcctgagttgacgctcccctccctcaagccagagtcccctgaattcctcccttgccttgaggtttcctcacactccctaacctgcttgtctctgttagaaggaacacaggcgctgggaaaggaggtccttgctcacctgccttggagtcctgggagggagtgtctgtgctggtcccgcacctctgggatgtagcccagtcactgtgcccccagggcccaggtgaagccctcacccttccatgctggagcacgggggagtcctgcatgggaggcttgggggccttgctcactctgcctcctcctggtgccttgccccctatcaggaaagaaggcccagctgtgcaccagtggcctcttgctggggttgtattccttcctccagctggcttgacctggccagtcaccttatgggagagttgtttgctctgaggccaggtgccgcccttcacctacacatgaagcacacatgggcgtggagtgtcccagggaaggtaggtcattatggtgtgagctggaggctggtccttgactgctttccttgccattgcaatggctagttcacagcattcttccaaaatcacagagaaagtcagaaaggtggggggtagctgagagaggcagcaaaggaaaacccaaagatggaagtgcatgaagagaggaaagctgctaaactgaatgataatgcccaatgcagcagtgttattttggctaccagcaaagttgactcatataattaaaactggtgccatgtttccctcggctctgatcacggtgtcactggtaacagaaggctgtgtcataaagagacttatggacacacttattttgtgggaaaacattaaggatgcagacatcgttgaaattgtttcgaggactccaggtgaaaggcatcacctacattctcaggtaattggaaactgccccagtggtatagacaaagagtgagatgtatatgtggtcttcccattgcaggagccaccttggggcagaatgtggccatgtgtcagctacctatgtcccctccaccttgtaccatcctcactcagtgttgctgccattttgtcagaacacaatccacggagaatgcaaggagaagctttcttacctgtgccgggcaggtgctgctatttttctttctctcctgtctggatcttgtttggcaatggtcacgccaactacattgttccaaataatgaggctcgattaaagatgcacagagcggccttaaatccggcccagctgtgccatttgtaatctatttatttatttacctattaacattcaacttcacgttgaggcctccagaacacatgtggttcaaggagatccaagtttttgctcctctgttacgtcaaacagccttgtaggttagaactagaggttgatgttaacaagacctaaagaccaattctttttatataggatgccttgtcttgagcaaggggcctttctcatgttgacagtgaaggagctcttgatgaaacccagggtcgataactgctgtctctgagtttattctcgtggccttgagccgcactccacgatgctgacttatttccagaacagctgttggcagcaccctgtggtagtggaagtctcactgcttcctctcttttcccctgatttatttagtttcctgccctcccatcacccactctgcctgttcctttctggtcggaagggctcccttatggcattaattaattatctgtgagaccattatcgaagctgaacacaggggaacatggcatcctttctagtgacacgattcagctttgcttgtagccaaaataacattgctgtgttatgcagggctgttcagacagcctgatggtcttttcttcatatgcttcagtctttgagttttcctcccgaccggcccgcctttctctgtgatttcagggcatcctttgtgcaggtctcagtgctttttccttaagtttaacttgaacataagccctttgttaagggctttacgctgttcttcacttacatggaggctgacttgtgaacctgctcaggtggcccctatgtttaggggggcagttttataaaggcccccccttccttttgctaaagaagcacaactttcacttgccaatgatagagtcagcctttcatgcagattttgcttcgagaatccagattcagaaccagtgggtgcacctggctgtgaagacaggagattgttcattttgctcctttgttttggccttccgatttgcctacacagacttttcattcaccagggagcccacacagagccgagaggcagagccatcggagcaggactctgctggctttgtgaaggagatggcgtgattgtttatttttaaatcaaaggatccttactgccacaaaagcacaaatctatctttacttcttggggtccagagcctctgattccgtttggttggatggtaatgagcaacctgtcccttcccccaagaagagcctgctccttgcacatctgtgagcttctctgcctgttgttccctgtctctcctgctcggtctccatcagcctaagggctgatgttctgggcagaaggaatggggtgtgttgtaaccctaggcttctggaagaaggaggtgccagacaatgggttcactcatgaagctagattcaggaagcaggatgtagggtgtcaggctcagaagggatgggcagggaatggaagagcttttaaaatgacttcttctcagtgctgagcttagctgtgtgttagcgtctggcagctcttcttccaagctgatttgtttttgtacctggtgatcaaggtcagtggtgcctgccagggaggggaggtgggggtgggcaatcactttgtcatagtcctctctctgctttactccgagatggtgttgggccccatcatggtgcacagcgggaatctctgtgtgctatgaaacatgtcagcatgttgggtctccagcttcctgtgaagaatagggctatcgacacagggtacacgggacaaaggttagctggtgtgatgtgcagtccaaggctcaacatcccaaggccccatcttctgatgaactctgtggtaacactgatcattttatgtgacaataatttctgcattctgggtttgttttgtcctagtgttcatgcgggattacctaatttttggatgcagttactcatcgacttttctttagattttgaaagtgaggaatatgggactaggaaggggagtgaagcctcaaggagacataggggttcagctaagctgtcatcagacatggtctcattaagaaagttccactcaatgcaactggctttgcgggtgagccatgactactgcctcttggagggttaccttagaatttcaaattcctcatgaaaaagtgtttgcagccaaacatcacccaaactaataatagctccctggcattgggtgacagatatctaagatatgcctggatatgtgtaaatattactagtttaaggattctttttttttttttttttttttttttgagatggagtctcgctttgtcacccaggctggagtacaatggcgcaatcatggctcattgcagcctcgagctcctgggctcaagcaatccacccatcttagccttctgaatagctgggactacaggcacatgcctctgcaccaggctaatttaaaaaagttttgtcttagtttgggttcatgagtaaatataataactaaaaaatgaacaaaaaatattaaaaatgaatttttttttttttgagagaggacggtcttgctatgttgcccaggctggtcttgaactcctggcctcaagtgatcctcctgccttggcctctcaaagtgctgggattacgtgcatagccactgtgcccgaccaggtttaaggattctttgtgcgtggagcggtgaagaaaaagcttaataaatggcagaaagggttttcatccagccgaatcccaagagacgaaggccagatgagcctcggctgagaacctctcttatctttcctgacatgatgttccacttctcagagaaagcaaacagctaaattcatggcagataaccctccacaccacataaaagcacctggcagctctttccacattagtttaagttgaccttcataaatgtagacccagctggacttattttttaatcttagttgatagaaggccagaaaacctgagaagcagaaaacagttaatccacttttctgctgcttggaaacagtgtggaaacagtgtgttgaaggaagggcatttttttcttttaattcctgttatctctaagaactctgccacagccactatttaaatacctagaacaggaagtaaaaatgggtgaggctcccttggaaacacctgcttctgcacattttaaataccttttttgtttgtcactctacatcacgaggctggtaagtgggtggcttttgcaggcagctggaaaactggacctcggactaccgagctgcatttgtcttgaacggcttctgtgtgtgtaacacaaagaaacgagagatgatgagtgtttggtgacagttactcagtgttaactctcatctctggaagtggtaagagggcatttcacttcctttgtttttgtctgttccctctaatagtcctaactgggattcagaaaaccaagggcattccctgggtagtgccaggactaggactgtgtcttgtgagggtgattcaaggccatggcaggtgacaggggatgaactaatagttacaaaaccgattctggagctttctttttaaaatttaattttaaattatcataaagtaaaatggacttttcttttttggtgtactgtgttacatatagattcaggtggccacctcctctgtcagtgtacggatcattccatcacccccaaaacttcccagtgtgctcccttcacagtgacagcctctcccatccctgtacctctgggtacccccaaatcttgaacccctgagccttccatgttcactgacatgtattccccagaataacccgcataggtatttctatcttcaatttacagatagaaagactgagtcttggagtggttaaggaatgtaccacaggacacctggtgggtagtcctgggatggggtcctaggtctctggagcctcctttctctcccagtggtcatcccaggatgggccgaggattctacacgctgtcagaacatgtctctctggttgcacagaacaaggacgtctgtctcgttcttacaggagtggggaccatttcacttgtcaaactgcctttctcttagaagcttctcaacctcaggccacggagattttaaagtgctctttggcaccagcaggggattgattttctgagttgggttttgttttgggtgtcagattcaaatatttggtgtgccttctgagggaattttgatgtttggaaatgggcgacttatttttggagacttttgtccttcccataatggcagggaatgaaaatgccacccttaggattcactactcgatgtgtccataaaaattttatgttccgaatgctttctgggcttccgtcaggtttttaaaaacgtggtgacacaaacaccaaagaagtgagctctcatctcagacttgtcataacaaaaacccacttcagaataagggatgagagagggattactttcctaagaacatttatttaagagtaggttctgtttaggtttgatgtttagagtggcaagcaggcagggggttggttcagggactccctactcttttctgaactatgctggtggaaggaaagtgtagaattttctatcatgtgatgtgggtgctccgtcaccacgtggttctgaaaggtcattttgaaaaggcttctgatgcagtgttctgtatacagcacaaagggcatgtttagaaatggtttgtttggcggaaggaattttcagaaggaaggctgacctggtttctgaaaggaaaggacttcatattaatcatgcaagtgaattctggttccaaatgtgaaatacattcaacttgtaaatggatggagccgctaataaaattggcagtcagaggctgtgattttaatccagctcaaagcagcagttaatctgtggtacaatttgaggctgaccccacaatgtgtacattctctgaaatagccgctcttctagaggactcaactgtgcacaccagcgcaagctccatttcttagccggaggcaggggatggaacataggtaaagcagtggcaggagctgctgtctgatgacttcccacctcaagtccattttgtccctcacatctcttttactaagagttcttgaatctctttctctgcttttcctgaaaacaggccaaggttgagaccactggacttccatctgatttgagtgttctgcactgagatacagctgtggttagagctgctgtgggaagcacagccatcagttcctatggagcggcacccattcttgtggtagaagacttgcggcatccatgtgcctgctttgttatgctgttatggtccttgattctatgaaatagccaacatgaaattatgatcagttaaggtaacagaaatggggctttttcactgaaatagaaagaggattctagcagagtcagaaactgctggtgatttctgcaaatatggtagggaatagggaatatgtggctgtttcaagagcacaaattaaatgacagtactgcttccatgcagcgtgttgacagattgagaggtcaccttatctttccaatcagataatctttacagtttgcacttgcactcatattagaagtcaagagaaatggaaagacttcacctataatctctctggatttacaccttgagcaaaatacctggttcttcatgtttttgagaggattacctgagatgggtgggagagtccttggtaaccacagagtttctgataagtcatagtggttgttatttttggatgctccaggtttctacagttaatgttggaggtggtggctgacaggatggaatattgttattgttagaaacaatattactttagaaaatccaagtctcagatgaactgacaatagagattattgcaaaagcattgccattaccttttaaagagtaatatcatttatatttcttaataggcatatccaaacaggttacatcaataaggatgaggcctggttttgttgtgatgatgagagtaactgatggtgacagccctttggagtttatttcacatcatccctttgatgactgtaaagcccttgaataaaagaagtgggacttggccaggcgcagtggctcacgcctgtaatcccagcacttcgggaggctgaggtgggcagatcatctgaggtcaggagttcgagaccagcctggccaacatggtgaaaccccgtctctactaaaaatataaaaattagctggttgtagtggcaggtgcctgtaatcccagctacttggggggctgaggcaggagaatcacttgaacctggaagatggaggatgcagtgaaatgagattgtgccagtgcactgcagcctgggcaacagagggagactctgtctcaacaacaacaacaacaaaaaaaaaaagagaagaagtaggacttaagggaacaatagacactgggaatgcctaaagaagggagggaggaaggagccaagggtcaaaaaactacttatcaagtactgtgttcctcgtttgggtgacaggatcatcataaacccaacagtcggcatcactcaatacacccacgtaacaaacctgcgtatacatgtactctttgaatctatgattttttttttttttacagagacagggtctggctctgtagcccagactggagtgcagtggcatagtcatagttcactgcagccctgaactcctgggctcaagtgtttctccccactcagcctcctgagtagctgatactacaggtatgtgccaccatgcctggcttgaactcctggactcaagtgatcctccttccttgtcctcccaaactgctgagattataggcatgagccaccatgcctggcctctggaatctcaaaaaaaaaaaaaggtgacttaaataatattcatacaaatttcttacaagtttgagtagaaagtataataaaaagagatagtacatacactttttttagatatgctaaacactttcttttaaaatgttttattatgtaatatttgataaatgcaaaattcagagcacgttttttagtatacttggcatgtctaggttgcactgtttttaagtgcctgaattttggtcttgtcaacgagcttgccgggtgggtgttgttccctttgctcttctgaagcgaggtgagtgtctggctggcttgctttgccctctggcctgcagggtaagggtgggcagtcttgctgtgcccatcttcctggcctgtggggatggcaaggggagagggaggtggccgggcagtgcagggtctgtgttagggcccagtgcactattcagagtttgcacagggccctttcccttactccatccacttaggattgtgtcagagtccaaggggagacctgtgggccctggatgggccctgtccctgtcatcacatcccatacttggggatcggtggctctggtggaccccattcctgtggtcacatcctatcctttatctgtctgttttatcaggttacaacagtcttcctcttagaggaaatgaagacaaggtgagtgctcactttgctgtttgggctttcttaggagcccacagtgttgtgcaggccccatgctgtctgtggcattcgggagggctgggagccctcagtgttgtgcaggccccatgctgtttgtggcatcaggcagggtggggagccctcagtgttgtgcaggccccatgctgtctgtggcatcaggcagggtgggcagccctcagtgttgtgtaggccccatgttgtctgtggcatcaggcagggtggggagccctcagtgttgtgcaggccccatgctgtctgtggcatcaggcagggtgggcagccctcagtgttgtgcaggccccatgctgtctgtggcatcaggcagggtggggagccctcagtgttgtgcaggccccatgctgtctgtggcattcaggagggctgggagccctcagtgttgtgcaggccccatgctgtctgtggcatcaggcagggtggggagccctcagtgttgtgcaggccccatgctgtctgtggcattcaggagggctgggagccctcagtgttgtgtaggccccatgctgtctgtggcatcaggcagggtgggcagccctcagtgttgtgtaggccccatgctgtttgtggcatcaggcagggtggggagccctcagtgttgtgcaggccccatgctgtctgtggcatcaggcagggtgcgcagccctcagtgttgtgtaggccccatgttgtttgtggcatcaggcagggtggggagccctcagtgttgtgcaggccccatgctgtctgtggcatcaggcagggtgggcagccctcagtgttgtgtaggccccatgttgtttgtggcatcaggcagggtggggagccctcagtgttgtgtaggccccatgctgtttgtggtgtttgggagctctcagtgttgtgcaggccccatggtgtttgtggcatcgggcaggactgggagccagatgccctgtgcatttccatcttgctccagaacctctgtcttgaccactggctgtcagccatggctccccatgctgtgcttctgtgggacctttgtggtgtgttcctgttccttatgttcactcagatcagcagcatgttactccccggaggcctctgcgggagaggcaggcagaggtgctggtgggaggctccttagcagcccccatgtccctggtggtgcaggctgtgggccccggggcttgtcccgagagggcccctcatgttttcagccctttttctggctcacacttgtgcctggaatgtgcttaaaaaaggctttgaggcagagttgtgtggaatagagaaactgtgacgtcagaagcagaactttacagagatgttcgttcttgcaaaacgagtgtggtctgaaaacggcttcttctgcatgagcctgacagggttgctgtgcaggcagcccgggctggcagtgcctggctgtgagtgacttggtgtgtttgcagacacacagctctgtctgagtgaccacaccaggggacacacctcacccaggcctgggagttcctgcttgctgcttatttggggtaagaggcaggctcttccagcggggaaagtattgacagcatatggaatggggatgttgcaaactcagagaacattttttaaatgagtttttcattgctgtgagcttaacaagaaggaagcattttgatcacttgaaaaaggaaatgttttcaagtggaaaatatttttaaaaataaagattagattcttggtttagttttctataaaacaatctacttatttttaaatttttattataatttctagtaatactgaaattattattggttataactattttgtctctttgggaagtaagatgtagttctcaagagatgtgttgatttagtgcccttctgagaaaataaaaacatgcaactgtgtgaaaaatttggatacttatgtagttatgcctcttgtatcctccacaggttctgaggggttgaaatatagatgtaaaacctggccgggcacattggctcatgcctgtaatccaagcactttgggaggctgaggtgggaggactgattgaggccaagagtttgagaccagcctgggcaacacagtgagactctatctctacaaaaaatgtaaaaaattagctgggcctggtggcacacacctgtggtctcacttatttggaaggctgagacaggaggatcacttgagcccaggagtttgaggctacagtgagcagtgataaaaagtaaaacccatcttatggggctagccaactacattattgacaatatcagtcaatagcaaatgttaaaaagtgacgtgtttggtttattggtacttttaaataatatataacatttgtttaatgatttaatatttttcatagcactctgaaagaacgtcagatattcagggtaagtcaagcactatgaaaaaaaagaatgtcccagattgttacaggtgatttcacataagataacatgtttgacaaagattgtagataaaataagtacgaactccaaaatcaaagcctcattttgaaagattctaccatgtgtgggtatattgttagcatgttccaaatgttgaaatagttcttctagactattaaaagatgctactttcctgtgtaaaataaatgacaaaagggaagaaaaatatgtcctttgaagaaaggatggaagtctgttttaatttgcagcctgaaggagaagagggtgagtagtctggtggtggccagttctgccgtgtaaatcagtggctctcacctctgctgctgggactaggtggatggcggacagggacgttgttcgacatcctgcagtaggcaggacactccacggagccacccacccagtgtgccagcaaggcctgtccagcagcctgatgcatgtggaggaagctgccgggcatgcagtcctcacatgtagcagaggaagaatttggcctaaattatggcagaacaaactttaaaagaaagaaagaagtattggccccttccatgccaccttccagttctggctagagtaactgccacaactgaaaatctgatcctatcactcttctgccagagctgccccacatctaaccttaggaaggaagcccaagccctggacagggctcttgggccctcactggcaggaggcttctgcctcatcccccttgtggcccctcctctcagtgtctcagtgtctgatggcgccaccaacagaaatgtgcatttatttaccggatacatattcttatttacaagttatatatgtgctctactgaactcattgtatgtttataataaaaaattcaaaacaaatttaagagaatgagaaattaaacatcactaatgattaaaatattttgctgaagatacaaaaacttctttgtattcactaaaatttttattaatgtgattaataacattttagatacttagtttttaagtgtctaatctggagagcttcaatctatggttatttgctgtctcgatgcacaatatatgctgagaacagtgctcatcactactgaaaatatgcataaatctataattgagaaagtccgaacgatgatttttaatctttctggttgccttcttgtgggtctaactgtgatgctttccacttcaaaatgtgtctaaagaagagctcccattggaagtacagattttcttgtatttgtcttattaacaatccacgattcctttctaagaatcttttcaaatctctggattacgtatagttaaaatgggtcacctaatccataaatctcttcacaggcccatggaaattgcagcatagtttgagaatgacacaagggggcccactcttctggcaccagatcccaagaggccatttgctgtggggtctcgtggggctccagcattagcccatatatcaagcttaatttttaggacatctaagagtgggcatatgtcaatatatatgttcagtaatttttgctgaataaatgaatacatcaattacagactctcagagctggaaaagagtctctggtccagtttcatcgattcataagtaacttccacataaggacattcagacccaggcatggggagtgacttgctgttgaccttcctggacagagacccgagctcttggttggttgattttcaaggaaagaaccccagagacatgaagctgtggtgagcactggcagtcagaaaggagaagtggtcactcctccagaccgcttctagctctgctactctaggattggattgaagacccctatgctgactctttatttttaaaattgataccaacgaatgacttttcacaagtaacataatctttttctgaaaattgtttgactttatttaaaaatctattctggcctcctcagcacccaaagttgatgttttctgcatttctaggaagcagattccctttcccatcccccctccatttctctgaacatcttgaattgtttagctgggtatagtgttagtgacatacaaagaaatgttgatgatcagatgaggcatctgtaccagaggatgatcattaattcccattaagtatttttataaaagtaaaatgagggaagaaatacattactgtgtgcctcagaagactcttgtccattcatcatgcatcatgctaattactcttttaaatttagattcttagtctaagaacatttcaaaatgaattaacaactattcctcagcttagaaaatgtcatggagtgagatttatttatttagttggaataaaatgtaaatcattcagaaagtataaactcatacttgcaagcttactatactggcaaaatcagtgggctgataatatgtactatagtctcatctttatttagaaactgctgttcctatatcagcttaataattttttactgaagaacaaagtgtaaagcaatttaagtggcaaagatctctgagtgctgtgtccagtagtggtggactaagggagtcaatgaccctggcaccaaaaacagatctggacaaaatgtatgaaataatgaaggatcacagtgatgagtcagagggcagagacccaggagaagggtagggatgtggcacttagggtcagtgttttccagaggtgtcagccggtcctgatcaggagcctcggagagctgttgggcagaggtccctggtatgcctcagagactcgagttaggacccagcaggctgcacccagaaagggttcagcagacagctgtcttcgtaggcacagagctggctcagtgccctggtgggtcagggctgtcagggctgctggaatcctcagccgctagatggggcaaagtggatcttctctggaggaggtagcataactagagccttaagttaaccccacagttgttcacatcactacccagtaccaaacaaaacaacattttgaggggaattcatatgtttatccttttcaggttcctctatctcactgtgaacgaagaggatcagttttccacccaactagacagccagacagagaaacctcttttcagaacattgtactgaatacctactatgtgctagtcattggacttgcaaacacgagcaagacagagtccctgccctccagaaccttccctgctttccagaagctcctgaaccttttctgccttctagaaccttccctgcctttcagaaccttctgtgcttccagaagctcactagcacctttctctttccagtgcattcctagtgcttatcttatagtagaatttcatgaggttaattcacttaataactctagagaattttccatgttgtatatactgttcttggctcgggaagttcttattcatctccacgtgtgataagactttggtgaataaatgcaccattttattccgtggatatttatttagttgtgtttcctaatttttgccaagaaatggaaacagcagcaatgaaattggtttttatttttttggatccttaagaaataggtgctttttgaagaatcaggggagaagtaacgcaagaccccagaagtatgccaacatataaaaccccaagtcaaaaggtcaaaccacgcatttgatccctcaagtcccctgcttgaccctcttccaagtgtactttccttcctttcattcctgctctaaagctttttaatactttcactcctgctcaaaagaaaaaaaaaaaaaaaaaaaaagaaataggtgtgtgtttttttttgtttttttttgtttttgttttttttgagttggagtctcactctattacccaggctggagtgcagtggtgcaatctcagctcactgcaacctctgcctcccatgttcaagtgattctcctgcctcagcgtcccaagtagctgggattacaggcgcccactaccatgcttggctaatttttgtattttttaagtagagatggggtttcatcagactggtctcaaactcctgacctcaggtgatccacccacctcggcctcccaaagtgctgggattacaggcgtgagccactgtgcctggccagaaataggtgcttttcatgaagtgtgccaacacacggcataattaaaaaaaaataagcaaaaacaaaaacaaaaaatattccaagccttgccacagggcttggaaataaaatgaaataaaatcaaatgaaataaaacagaatggattaaaacctgaagagggactaggtggagtgtccggtgcggctcctgccagtgcgtcagccatggcggcggctgctgggaaggctcctgcgtatggctttgccatccgggacccgggctttgctctgcaggggtgggcttctgagcagaggaaggccagaggtaaccaggtccatgcacgtttgtgtctttccacaatgtcgggcttttatggatgcttttagtctcagtcacaaaagccatgagctccacagggttcctgaggaggcggttctccttggtgcttcccggtgagtccgtggtcggagacgggggctcacaggctcaagcttctccgcgggctctcggcgttgcaaaccgtacccagccgcgtgctgagccggtatacacgtgttacggcggagacacgccgcagcaagccgggtgacacttcacatcaaggagactgtgtgggagagcgggctagcaggccactcggggggcacggaggacacagggagaggcttcagtggcagagccggccgggggatcgggacccaccacggggagacgcgtcagttgaggggtcggagctgccgaagccgctttctcacggtgcagagtccgtctgtgaggatggatggtgggagagggtgctggagggcgctcggttctgtcctcatctggttggacgcagcctttattatgtattaatttatttattcagcaaaacaccttgtcccggttggcagagcgcggtggagtgtggggtggaggcctctgagggcgtcccttataccccggcgcgctgctcagggcgaggaccgagggcccatggccaaggagcggcctccagaaggacacggagcccggaaacgcgggctgtggctgcgcgctccccgcctggctgcccaggtcggcctgcaggggttggagacggctccgcggagagcctggggcccgatctcagcccggcgcggcggcttctcggggcttccccctgcctgggggaaacgggtggaggacgcgcctgagggaacgcgagggaggaaaggcctggcggccttggcgcgtgggctctgggctcccccgtctgcgagcggcacccgctggccagggcgcggggctgagggaggccgggagggcgccgccccgcgctcctgtcaggcggcctcgcgccccgagttcctgtcaggcggcctcgcgccccgcgttcctgtcagtcaggcggcctcgcgccccgcgttcctgtcagtcaggcggcctcgcgccccgcgttcctgtcagtcaggcggcctcgcgccccgcgttcctgtcagtcaggcggcctcgcgccccgcgttcctgtcagtcaggcggcctcgcgccccgcgttcctgtcaggcggcctcgcgccccgcgttcctgtcagttaggcggcctcgcgccccgcgttcttgttgggcagccttgtgccccgcgctcctgtcagtggcgccctcgaggccgctgggagctgctgcctccgtgtcccctcttcctggtgaggggcccagcaggaccctgagagcaggaccctgagagccggacccctcggccccacagcctggcgtgcgcgagctcctagccttcctccgctgtgacgtcccggggagggtgtcagggagtctcgtccgcccaagcgggcgcatctgggtctggccctcgtcctgtgaggcccacgtgatctttttcgaggtcgctcagtggtgattgagttctgggaattaagtccaaactccctggtttacaacccaaagccggtgcgttcgctcagggacacggggcctccctgggccaggagcctccagggcacggccagcgccagtcaacccgtggaaacgctgcattcctattgtcagatgtattccccttaaaatacctaaattcctgagatttcacatacatacatgtacagttagttatatgtgttttgaaacacattcttgctctgtcgcccaggctggagtgcagccaaatagtcacagctcactgtagcctcccatgccttgggctccagtgattctcctgtctcagcctccccaggagcggggaccacaggcctaatccctcacacctgcttaatttttgtattttttgtagagatggggtctcactatgttgaccagactgtcctcaaactcctgggctaaagtgttcctcccaccttagcctcctgaagtgttgggattacaggtgtaatcctgtgcctggaggaatattttttaatgttagtaatttttaaaagaagtgtgataggaaagtttttttttttatttaaacatttttagttacacacataaagatttggcaactttacatgtaggttaccccagtttgttaaaaaagattattagtctgtgaaattaaaaagatagaaaaaaatagaaaccactattttaaagaatatttctgtaaagtgtgataggtgaaagctgtttgctccaggagtagttgtttagagtatttgttataaatctcagctttgtgtaatacaagtcagtcatatgatttaccccagtatttgaagaccctcttttcctgcagatttcctcagtagttcaaaaaaagaaaatctactctaaaagctgttttttttttttcttctccaaaccaaggtctccaaaaggaagcatgtgatgttcctaccgcctctgggagtgacatataaaagtttggcttcgctatattgtgtgtgagcttgggcggttcatctcctttctctgcatctcagtttccccattcttgaaatgaggaagttgagctagatactgtttgcaggtataaaatttaaaacattattattattattagacagagtctcactcttgcccaggctggagtgcagtggtgtgatcttggctcactgcaacctttgcctccagggctcaagcgattctcctgcctcagcctcccaagtagctggaactacaggcatgtaccaccacacccagctaatttttatatttttagtagatacgaggtttcaccatgttggccaggctggtctcgaacttgtgacctcaagtgatctgcctgcatcagcctcccaaagtgttgggattacagatgtgagccactgcacctgggcaaaagagtttttaataaaggaaagataagagtctcatcagcttctgactgtcgttagcacgttggtcatttctgtgtccaggccagacttggagttgggatggcccgtgccccatcttgcacacctgggcagcaaggaagggtgggatgaggtgagatgggggttcaccatttggttttctctgcccctcatcaggtgtgggggggtgcagcccccagtgttcactgggcttgatgttctctccccttgcagagtccctgaccatgctgtctctacccctttcggcacgatgcccgtaccccttcagtccgcttgctcctcgagggccatgtccccgcccaagacagctttcccctgtgtttccaatcagttaattaacttggctgttaattggggacctacttgtgttgtccagggcccagcctgggcgtagcacgtggcaggaacttaatgagtgggagccggaggtctgcatagagcctgctgagtctcagccttgacatttcacatcactgtaatgaaaagccttcctaaaaataatctctgcttgcatcatgtctaatagattctgtttggagagtggaaaatgcaatcgcaggcacggctggcctcgtcaggcctgtttgtcacagtgacagaatggccagttctccagcccagcaaacgctgggataaacaccataaatatgtgggaagtgcacacaggtgtgtgccaggcaggtggcccgtgagggcaatggggctttctctaatgtttgatcagtcccacattctagcctttgttaaggattggctatgttaatggggacttgtgaaaatgtagatacttaaattagaagcacagggagctgttctccttaccttcctccccttcagaaaaaatgaagaagaaaatgaaaaatcctttctcctttggagacttttatttatttattttttaaactttaacaatcttttggttgggcatggtggctcatgcctataatctcagcactttgggaggctgaggtgggtggatcacttgaggtcaggagtttgagaccagcctggccaatatggtgaaaccatctctactaaaaatacaaaaatttgcttggtgtggtagcggctccctataatcccagctacttgggacattgaggcaggagagttgcttgaactcaggaggtagaggttgcagtgagcagagattgtgccactgcactccagcctgggtgacagagtgagactctgtctcaaacaaacaaaacaaaacaaaacaaaaaaaaccccactttaacaatcttttattaccaaaccccgcgaagggtggccaacagcaaaaatagcatctctaacaagatccaggatggagacctttagaggagggaattcagaaattgagaaaggacttcagtttcaagtgtccagggctccctagtcctttaaatgcccagtcacctgcagagtaccttttgtgcggtgcttgtggcaggatgcctggcccggggctgccaagtgcccgctatggggcctgtttcccaaagcttgtcctcgggaggctacagtcagctcgatggctgagtctcttctggaattgctcaggagctaaagcttggccacttctttttttttttttgagacagttttgctcttgtcacccaggctggagtgcaatggtgcgatcttggctcactgcaatttcctcctcctgggttcaagcaattctcctgcctcagtctcctgagtgcctgggataacaggtgcccgccaccacgcccagttaattttttgtatttttagtaaagacagggcttcaccatgttggtgaggctggtcttgaactcctaacctcaggtgatccacccaccttggcctcccaaagtgctgggattataggtgttagccactgcgcccggccaagcttggccacttctgatgtcagtggataaaaagagtaattttattgattctcaaagttatcaaaattatccataatctcagggagagatttttaaagggagagaaatggctgacacaaaggaaaatataggtgtcctaaatatttagaggacagtgttgtgggcttagtgtcaggtgacctgtggaaagttcctaagaagctccatgcctcggtttcctcatcagaatatcctgcatctggcagagacaataggcagatctgtgtttggagatgtgggacagtctctagacgtgcgggtaactacgggaacagtgcctgcctccagggttcctggggggcttgcatgagatggtttctatgtcttgtgtgtagaaagtaagttggagtcatgaagtaacagagggcgactcctggacccttggcgtctaccgtgcctttgcttactttcttcctggggattttcccgtgctttgacagttgttgaagcctgcagatcccagacgggaagtttgccgtccgagttaagatttctcaccattgagctgaggccctgtttggaattctgagcaaagctgctattttggggacacgtccacctttgtgctcagcagaggtggtgtccagatggcctgtggcacctggggttgagatgaccagccacagcccagagctggctctgtctcacctctcaggatgagaggtaatttgcaaagttcctgggaatttgcaaagttcccggtaatttgcaaagttccctttggtgtggttgtatttaaaagctgcatatttagttccattctgataatctatgtttatgtagccacaaatatgcctgtatagattgcagctctaaaagtcaaatacggctggatcctgatactcagatctgatgtagcacggactgtgtcatgttcctgggaacctcatagttttatagagcagaagcctccatgccttgtttgtttcatccttgccttcctccacaatacaattttctgaatggtgtcagcatccctgggtccatgcatggctgggatgactttttagagtttgtgtaaagccgttacgtggggcagggcctgcgcagggtctccctcaggagaatgcaactctcattaaagagcaggcacacaccacagggaaggcacgagccttgcacatttctccttagatttgcacacatttctctttagctcccagcagggcgtctgtgacccttcattttcctggctgatatgggccacagagccatttcctgggctgagaagggatctgtggtctgccgtgctgagctgcccgccctctggccttaccactggcattctttgcctgtgctttaaataaacatgtgtgggtgaagctgccatgctgagggaaagggtctagatggagctggagggtgcagtggaaggtgaggagtcaagccaggtattcctggggcatgaagggtgggcagggggcttgggggctggggccagggcctggcatgcacccgtctcctggctccctggcaactgcctagccccgtgctgcttcgtgttggttccatgcttcaggagcactgggatggcagccgcacagctggccttgctggtgttggtgatgggggtggtgcctggcagcctcacgtcctggtgatggaggtgggagtcagctcagctgctcacaggtcgattggctgtatccatcacaaaatgtacaattctattacccccaaatcccacttctaggaattttccttacaaacttacttgcacacatgtgcaaagatgtttgcataagcgtgttcattgctgcctttttttttgtcataatactcatttgaaacaacttgatttttcataagcaagaggttagttaaatatatcatattcacaccacagaatatcctgcagctgttggaaagaatgaggtaggtctttgtgtggaggtacgggacagtccctagacctgtgattaacaagacgtatggcaacagttaactcagatccagagctggctgtgccccccgcaagtgctgccctagccctttctttgtatcatctttgtataattttgtttaatcatcccagcagccccctgatgcaggagctgtcatgatgtgtgtttcgtagacatcccaggcactgtggcatcagagcccaagttctaaccacttactggagaacaaatccaggtgtaaggaatgaccccaatcttagaaatatatgctatgcatagatcctataaacagaaaagaccattccctaaaaaataggcatctaatcaaagacctcacttgtttcttcacaatctgagggataaggggaagggagggagactgtgcccctagatggaaggcccctctcttctcccctcacacatcagtgctcatgtactgccacgccacatgcctgtgagtctctgcagagggtgtgccctgagctaacaaggatgttcagatgtccccggcgagagctgcaggattcttcatccaacactcccatcggggtgggctgggagcatctgaatgctgtgtgattagctccactaagtgtttgttgtaatcaagttgcatttccacggccttatatcttggtcatttttttagcttgcaccagctgggttttggcaccgcctcacccaaacttcatattatgagacatcacggccaacttgcaaactgctgcagtaataagacttgcattttgtgatgcttttgttctcactgacgtgccgtatctgcgttccacttgggtacttcttgctttgaacgagaagcacaaggctattggcgaagttgatgctggggatcggtcagcaatttcatattttccaagaagccattttaggaccctggacaaggtctcgagctgcaaacttgtggtcctgccttgggagaaggcacaaatttccctgtgaggtttcaggtaggacctctcttcttcggtggcactgcaccagcagataccttctttgtccgtgcaaggcttcgagaggctctatgtggacgaggctgtggccgtggttgatttctctgaaaccaggaggaccacaccctgccccctcaatgtaggttttcctgggccaggaaacatttgctgtgggaaacactccgctctcggcctctgccatgcactaatgctggaacggatggggacacattctggtctttaaagggcctgcactcagcatgatgaaggctttgttgtttagttaattcacattgtccatacatgggattgttgagctgtgtcccattctgttgaggtatgtgcccctgggagcgtcattgatcctgacgtggcaaggcttcacgtatgattcaggccagcggtcttccaagagctttgccttcacgccattatcactcaacacactctccttcaggctcccaagcaagcacacagggcttcatgcacaatcagccttgtggctttcaagtgctaaatggactattaataataggaaactttaacataacactgggtttgtttgtgggaggtggaatgggtgtcttaatgctgacaggccctgggtttcgctgcattgatttgcatttcctctgctgctgttgccgcagttgattccacgattatatttttcatgtaaagggcagatggaggagtaaggctatttgccctcttcctgttctggtctgggtgtttgtccccgcaagtgcatgtgttgaaacctagctcctgacatgctggtgttaggagatgggggctttgggaggtgacaaggtctcaaaggtggatgctcctgatgggattcgagctcatcagtcactaataaggcagctccagagagcttcctcgcccccttcatggagtgagaccatggcgagaaggcgtcatctatgatccaggaagcaggaccttgggatgccgagtctcctggtgccctgctctccgacttcacagccttcagagctgtgagaaatcaaggtctgttgtttccaggccacccgacctgtggcattctgttacagttccagctaagacatttcctgacagagagacttctcttggaggtcatgagatctcaaaagacatgtgttcattggcccctttgtgaatctcttcgcacgagagagaggcaggtctgcagctcagtgtctcagccctcagtgagcttcctctcagtgttcctcttcttggggaccacgcttgctgggctgcaatgcttcacccaaattgtggtgttccagggccacgggcagtggggatgggaggtagggagagctgctgctactgtggggggtggcacggtcccccctagtgagagtttggtcctggtgttggcccgggccatctcccctgtcggaagtgtcttgtcttgcacagggactgtgcacagacctgtgctatgcttttgagtcattcaggattgttaaatgtcaaagtgcattttctgaggtatgttagacccaatattctgcatttctgaccagccctggggaggccaaagctgccagtcttgaggccacaattagagcatcaaggtctgagtcagtgcagaagccaatgaattatcagaaaaagtttatacttgctttaaaataaaaaaaattgaaatatcacccaaaccttctggtgtgtaacaccatttggtcttttctttaaaaaattccttgtatttggtgagaaaacatgcagttgctcaaggtcacccatgtcctgcagaagcggcattttcctctttacagaaggagccccacacccccgaagagctgtcagggggattttctcaggcaggggtttatctcttagacctggggagacttctaaggcaacgggtgttacagaattgtaattttcaaaaataccttgaagtagtaatgagaattactggggttattacttctagaatcattggaaattctgacttcaaggaactatgagaattaagtaatctaatgtcccgatctacgtaatctttcttaatctttgatatttattgacttgatcaagtattcatcaagatcaagggtggaagacttcactaaaattagaaacagggctcccgattcccaggccctgcccttcttgccacactaacagaataaccctgtgcacattctgacatgtgaatgggccttattgacatgcatggactacaaaaatcagattaatcaaccgatgcccagtcacacgtgaaggaacaacatatggacaagatttctcttcgatgcaaggctgcgttgctttaggttttttaacctgtaccctgctgggaggatgcaggttaggacagctgccttcttttaaagctgttcaagatgcagtgttctagtcatgtgtttttggcaaaccaaatatctttggctctaacttaaggagtaacattcacatggttgatgtctgttctcaaagggcttcatgaaaagtgccgcccatgtgcccctgctcatggtgggtttctgctgaaggtgaggcgatggccacacctgccttgtgagactgcctggggacacagtgaggaaccgccacacggtcccagcacagtcctgcgcgcggagcgcaagtggtcaccgttcttacacgttgtgttctctgcatgttgacacttagtagggtctcaaagaatatcagttccactttcacctagcagtccagcaattcatgtaaaataagcaaaccccccatttgtcccctagcgaggccaaaacatttgcctattactctaagtgttcgtgcacatgatcagaaactatatgaggtaagcgttaaaacacgcccacttctgggtacatacatacctgaaaccatcagaagtagggacctggacagatattggcacatccatgctcatagcagcactattcacaataaccgaaggttagaagccacccaagtgtccactgacggatgagtggtaagcaagatgtggtccatccatccacacggtggacttattacccagtcttcagcgtgctacaccatgggtggcctttgaatacattatgctgagtgaaagaagccggtcctaaaaggacaaatgctgtttgatacgaggtggttagaatcatcaagttcacaggaacagaaagtggaacggagcaggggaaaggggagtcagtgtttaatcgggacagagtttcagtttgggaaggtgagaaaattctggggatctgttggagaacaatgtgcatagttaacactagtgaactgaagatttagaaatgattaagatggtacattttattctatttttaccacaataaaaaaatatgtaagtggggagacaacagctgggaggattttgttctttgacatcgcctcacctctcagatgaccttctttgctccaggccttccagggtccctgggaccaaggaccccagtcatgagggaggcagcctgtgtccattctttactgacatcacttctgtgagagggagtggcagggaaggggccaaaaggtgatgcaggggtgattgcagcctcagagggggccctgaaaagctggctgggtgaggtatccccgcggtcacctcctgtggtcacatctcagaaagaggaactgctcaggctgagtgaacagcctatctcctctgcaccctgcgatgggacagtcgttatttgcattgggaacgaatattcggtaagagggaggcaggtgaacaagtggatgtgcctcatggtggagtcctgccaggctgggtattggcctggaaagatggaagtgtgtcattctgagaaagaaaaagtcaggtatcaaaaaagtacatatggtatgacctcatatggatcgttaaaatattacagtgttgagaagtatgagtaggatgtggtgaatgcattttattttcttcttttttgcttctctttaagaaaacattgtgtaatgagagcaatagaaattcatttttatacaaaatatttttcttattattcctttttaaatggggtgatgaagaacaaagaaaacatgagagaagaatctcctccaagcactggaagaattcctgctgggggctccgggagaaccatcactttgtggcctctgctctgtcgggatctggggccaggcagggcctcactgggtctgggtttgagagtcttcctgggcctctggaccccccagtgtggcccctccctgctgcctgcagacctcggggatccagctcctcctcattggaaacatgacatacagtcataattaacccctggtcagacctggggaggtgttaagaggtgagaggtctctgtcttctgggcctcatctcttggtgtgcagtctgagagcctcctgtccagagaagctgagtggcaccccagaggaaggactccagattactgcttttttttttttttttttttttttagtctagcactgatgtatccagaaggtgcaaggacctgcctggcttggcgtgaatactgaggagaatcctgctcctctctgtgccaaattatggagactctttccctgctcacctttgggtccctcattgctgcacctgttttttcacaggctccatttgtgaggacacacctgcctctaggtgcctggaaatattggctggaggtaccctgcctccgctgggctctgcaggtgccaggccttcatgtccctgggaccaactggtagctgggcagtgttcactgctcagcaccccctggggcagcaccccagggacagtttacaaatggaaagctgcaccctgcggcctcaggatctaaagaagagaacatggccataggctagagacaatccaacaatacatttggagtctactaatttagtatttgtgtctggactgaagttacctgttatgtaagaattattttaaaagacctgggtgcagtggctcaggcctgtaatcccagcactttgggaggctgaggtgggaggattgcttgaggccaggagttcaagaccaggctgggcaacatagcaagaccccgtctctccagaacaatgaaaaatttagtggggtgtggtggctcttgcctgtggtctcagctccttgggaggctgaggcaggaggatcccccaagcccagaagttcaaggctgcagtgagtaatgatgataccactgcactccagcctgggcaacagagtgagaccctgtctctaaaaacaaaaatacaaagaattatttaaaagggggtctatgaagttaaccaatagctactgctgggaagatggcgaggtgccttaccaggagagctttatcaatagtgctgctgggaatgctgggaagagggcgaggtgcctcactaggagagtggaccacgggggtttccatgcacagtcagtgtgagggtcccaagtcacccttccttcctgaccacattggccagcccacttctaggcgccatggtgctctggaaacgctgttttctttgagcacaaacatcccaggttgctcactagaggaggagctttagaaatctcagtgggttctaaaggtgtgagcccagaaatacagctacatgatgagaaagcgtaggccaggaggggcctgttctcagctcttcagagagagaggtgaggaaacacacccgagcacagccagccacgggttgagcggagcggcggccgtgacctttgtggactggctggcttgtacctgcagggccaagaagcgactgagtggaccatggcaccaggttggggaatcagagcccatgatggcagaaaagatgtctaacctgcacgggagctgcctgacctgcgcgggagctgcctaaactgcgtgggagccgcctgacctgcgtgggagccgtctgacctgcgcgggagccgcctgccctgcgcgggagcgacctgcccaggagcgacctgcacaggagccgcctgacctgcgcgggagccacctgcctgggagtgacctgcacgggagccctctgacctgcgtgggagcgacctgcgtgggagccgcctgacctgcgcgggagccgcctgacctgcgtgggagccgcctgccctgcccgggagccgcctgccctgcgcgggagcgacctgcccaggagcgacctgcacaggagccgcctgacctgcgcgggagccacctgcctgggagtgacctgcgcgggagccctctgacctgcgtgggagcgacctgcgtgggagcgacctgcgtgggagccgcctgacctgtgcgggagccacctgacctgcgtgggagtgacctgcgcgggagccgcctgacctgcgtgggagcgacctgcacgggagccccctgaccttcacgggagccgcctgacctgcccgggagctgtctgacctgcgcgggagctgcctgacctgcgtgggagcgacctgcgcgggagccgcctgacctgcgtgggagcgacctgcgtgggagcaacctgctcgggagccgcctgacctgcccgggagccgcctgacctgcccgggagccgtctgacctgcgcgggagctgcagtgttctctgaggggaggagaccaggttttgttctgtctatcctctacctatctacctttgaatcatctccattcacctatcaaacatctatttatataacttatctttctaatctatctttttttttttttttgaaacagagttttgctctgtcgcccaggctggagtgcagtggtgtggtctcggctcactgcaacttccgcctcccagttcaagtgattctcctgcctcagcctcctgagtagctgggattacaggcatgcgccaccatgcccggctaatttttgtatttttagtagagacgtagtttcactatgttgcccagactggtcttgaactcttgacctcaggtgatctgcccgcctcggcctcccaaaatgctgggattacaggtgtaagccaccatgcccagcccatctaatctgtctttacgtatcaatcatctctatctatctatctaatctatctttacctgtcaatcgtctacctatccatcatctatatccacctatcaatcacccatctatatctatcctctatcattatctatcatcatctatcaatagaacatagtctttcacatctaacaatgtctatcagctatttatcaatcatctatatctgtcatctagtctatcctattaggtatctatctatctatctatgacaaccatctgttgatctagtaaagaaggacattccaaggctgttttgattttgtaggagaaagccatttggtgccaactctgtacctagtgaagatttattttgggacgtgtgttgtgtgtgccatgttgtgattattgttcacagattttgttctctgcgagctgggtcctcgaagataggatgtgtcttcatcatcctgagcttgctggagcctgtctctgtggtctgccccatgtagatggcctgctaggcagtgggtggaacccgctgggaagcaacaccggccacctgttggcggaagagctccctttacccttcagattcctgactctgttgccagcttctgtgaagggttgacgggcggtgcttgtgcccctaaccctgccatgggagctgagggaggctgggtctgggggacagctggaagatgccagttgagtggaaatatattcttctgccaagggcacaatgggagagaacgaaagggcagcaggactgcccctgtgttgggatgggacatggcagcatgggcctcttcctgctcctgccccaccccggtgacgtcagtgttgggaggtttcagcgaggaaggcagggcagagcggtgggggcgaggggcaccactgagccgtggatgctgcttgtgaagggagaaggacctgcttcgttcgacgctgggcttggtgccgccttctcctggaaggacctgactggcgccctaaggcataagccccaacctcccccaaaaggcagctgtgggatcttgcagtcgtaagagctgctgaagatggaaaacttgtgatttcctctggcggagttggtggttgcgtcgggggtgatttgcagtagatcagtctgctgagcaccggagatccgtttgttctcacaggctttcctctcattccactgtgacgctctttgtaatgtgcatctggtgtgtgactctgtatcaggcttgctgtgggcagcctcagaattcagggcccaggcaggcatctccggtgaggggagttggtagtcgaggaggggccggataaattaaacgtgtccccgggtcgtgggtgaggatgggctcagcctccctgggaggatgctggggaggtgaggcggctgtctgtgctgctggcaggagcgaaaaccccatcatatagagggggctgctgtttggggcagagatggctatgtgcggcattccagacacagcccatggaggggctgtgctcctgcgctggatcgggggagccacatcctatagtcccaggccactgcgtcttggaagggcctggccagcagcaggcatgggccgaagaaccccacatcccactccccctccaccaaaaaggggggccagagccgcgactagcagagttggtcttttttcagttttgttcaaatctcaaatattccttaaatcctctgtgcccagaacaagctgagagcaatcaagaactttaaaacccagtattcaaggctctaccctcagaaaataaataatgggagagagagagagagagaacacagataaagcaatatgagacagatgatagatggcagatagacagatactgatcaaaattcttacgcacttttcacctcccagagcaattaccctctttaccatactggtaaagaatcatcagtgccctaaacaaccaaccaattgtctcctggtttcaggaccaaggacagaaaacaaagttgcacaaggaccctctctggtttcggtctctgtttttcttgttgttgttgtttgagacggagtctcactctttcgcccaggctggagtgcagtggcgcgatctcagctcactacaactccgcctcccaggttcaagcaattctcatgcctcagcctcctgagtagctgggactacaggcacatgccaccacatccggctaattttttgtatttttagaagagatggggtatataaggaaggttctgtagactcccaagcctgtgtgtgtgtagacagggaaggcaatgtagactcccaaacctgtgcctttacacagcaaaattggtgtagacccccaagtctatgaggaaatgtggtatagactcccaagcctgtgtgtgtttagacagggagggtggtgtagactcctaagcctatgtgtgtacatggggaagttgtgtacactgggttaggagctggagccctccaaatgcatgtgttagagcccccccgatgcaatgtgttaggagctgggatcccccaaatgcaggaagggtggtgtagactcccaagcctgtgtatagacaggaagggtgttatagactcccaagtctgcatatttagacagggaaggtggcgtagactcccaggcctgtctgcgtgtagacaggaagggtgatatagactcctaagcctgtgcgtatttagacagggaaggtggtgtagactcctaagcctctgtgtgtagacaaggagggtggtataaattcccaagcctgtgcatgtgtagacagggaaggcgatgtagacccccaagcctgtgtctgtacacagttaaggtggtgtagacaggaaaggtggtgtagactcccaagcctgtgtgtgtgtgtagacaaggagggtggtctagactcccaagcctgtgtgtgtataaggggaggctggtgtagactcctaagcctgtgcatatacacagggaaggtcgtgtagactcccaagcctacaggtgtagacagggagtgtggtatagactcccaagcctttgtgtgcttagggagtgtggtgtagactcccaagcctgtgtatatgcatggggaatgtggtgtagactccaaagcctattcatgtataggggaaggtagtgtagactcccaagcctgtatgtgtgtagacaggaagggtggtatagactcccaagcctgtgtgtgtacatggggaaggtggtgtagactcccaagcatgtgtgtgtacgcaggaaggtagtgtagactcccaagtctgtggaaatatacagggaaggtagcctaggctcccaaacctgcaggtgtagacaggaagggtggtgtagactctcaagcctgtgtgtgtacatgggaaagatgatgtagattcccaagcctgtttgtgtagacagggaggctggtgcagactcctaagcctgagtgtgtagacacggaggatagtgtccactctctagggtttctctggggtgtcaggagcccttggatgcacatgtcaagtgcacaaaacgtgtggtctttactggttgttgtcagtgtatgtagacacttttttgattatgaaagtatcgggccatgcacggtgtctcacacctgtaatcccagaactttgggaggctgaggtgggcagattgcttgaggtcaggagtttgagaccagcctggccaacatggtgaaaccccatctctaccaataatagaaaaattagcagggcatggtggtgggtgcctgtaatcctagctcaggaggctgaggcagaaaaatcgcttgaaccagagaggaagagattgtagtgagctgagattgcatcagtgcactccagcctacactccagcccgcactccagcctaggctacagagtaagacctagtctctagagaaaaattattttttaaaaaacagtatgtattgccagaatgtatggtcacctttctcactgatcttctcaggctgacttaggagctggggccccccaaatgcatgtactggagccccaccccaatggggtgtggttaggaggcggtggcgggggctcaaatgcatgcattagagacccaccttgatgcaatgggttaggaggcagggccccccaaatgcatgcattagaaccctacccctgatgtgatgggttaggagctggggccccccaaatgcatgtgttagagccccaccctgatgcaatgggttaggagctggggccccccaaatgcatgtgttagagctctacccccgatgtaatgggttaggaggcagggccccccaaatgcatgcattagaaccccacccctgatgtgatgggttaggagctggggcccccaaatgcatgtgttagagccccactccagatgcaatgggttaggagctggggccccccaaatgcatgtgttagagccccaccctgatgcaatgggttaggagctggggccccccaaatgcatgtgttagagctctacccccgatgtaatgggttaggaggcagggccccccaaatgcatgcattagaaccccacccctgatgtgatgggttaggagctggggcccccaaatgcatgtgttagagccccactccagatgcaatgggttaggagctggggccccccaaatgcatgtgttagagccccaccctgatgcaatgggttaggagctggggccccccaaatgcatgtgttagagctctacccccaatgtaatggattaggaggcagggccccccaaatgcatgcattagaaccccacccctgatgtgatgggttaggagctggggcccccaaatgcatgtgttagagccccactccagatgcaatgggttaggagctggggccccccaaatgcatgtgttagagccccactccagatgcaatgggttaggcagggccccccaagtgcatgcatgagaaccccacccctgatgggatgggttaggagctggggcccccaaatgcatgtgttagagccccaccctgatgggatgggttaggaggcggggccttccagaggtgattagggttgggtgaggtcacgagagtggctctgaggcaagaccatgagacagcatcatgagggagccggctgccctcctccttcccaccatgggaggacacagcaaggcagtgaccatccgcagtgggaatagggccctcaccagagcccagctgtgccagcaccctgatcttggacctccagtctcagagctgtgcaaagcgagtgtcggttgttgcagctgccctgccctggtgttctgccacagcagctggtgcggatgcctccctccttctccaagggccccgtgctcacggtcgctgctggtggacaggcctccttgctgctgtgtcctgtcacaaatgccagttctggaaatgtgctgtgtgggtcactcatggatgggatgagggccagatgtccgtggaggggtgaaggaaagcgtgaagggaagcgcgacggccgcctgatggagttaaaaaagcttcacgacatctccccagtgttggatttcagcagcaggatttaaaaactgaaaagggcacttaaagacgaggtaattacacttagtaggaagtcaggtcccagcccattaacgacgcctatgagagaaatagattagacattgaaaagaaaacaaagccacctcaagtaaaggggaagtaaaatgaataaacgaagaggctgaaagaattcccagagatgcaaaagtcaaaccacctgggaggcgtctgggagcctttggctgagtcccggggagcctcgggcaggcctgtgttctcagtcattgcagttagactccgtgggtggccacgccagccatgagtgggcctgtgggcctgcaagcccctctccctgcccagacctcagccctgtcttaggggaggcacctgaactgggtgttaaagcactcaggcctagtgccctggggccgagtgcatggcttccaaaagtgaccagtgggggatgtgggagcgtcctgctgccctccatcttggattcccaagtttgttctttcccagtggcagcctcaggagatgtcctgaggggcaggctggtggggagccgggcagcatccgtgacccttcctgcgagcgccccaggcttcctatcgggacgtgggctcagccggcgggcagtggcacccgctggggctccgaggagctcgaggagtcaatctccaccccgacgcctggtgcgcagccctcagagcacaggctatctccgtctttcattttcagaacgaggctggggggctctgaggatgtgtgctctcgtgtgaaagccccatgaggtccttcctgacgccgacctctcccagccccgagttccaggggaggacggcgaggcgcggcacagaccccaggacgagggcaagggggagggctcccaggcctgcttccctttcgtgctgggtctagtgaggtcacgtcatgcacacataatcaacccaagtcatttctaaactctggaagttcttaattgggctcttgggaggaagaaagaggaagaggaaaacttggaggccagttgccagccctctggggacacgcagtcccatctcacaggaggagtgaatcggtgttctcacggggttttccgaagccatctgtatttcagagctttgtgatggagcgaagttcttcactcccactcctgggctgatctcctctgggaggcggagcttccagcgtttggagcgagccctggctgcaggcccacagctgcttcctccaccctagcgagcgctcaggcgaagcccagcctccgcaggactttgcttttgcaaaggagaagacaaagccagcagaacctccgtagcttacgggaattttacctattcacggctgcccctttgcccttcgcggatccaatggactcagtgaggcgccatccctggggttcaggggttgggtctgagtctcgctgcaacaactgggggaccggtgtctgccagaatccgcccggtgaacacaaagctcgccagaggaggcagggcacggcgtccacgtggggtgaccagctccccgtggagaccctgtcccctgccgagtggatggtggggagaagccaccaccgtctgattcacttcgggagcttttatgtcaacttcagtttcaaaaataagattctttcattaaaaaaagcctgaatcatttatgcagacaatgctgatcacacactcccttctctcccaacattccagccccattctttcccgcttgtgctcgccttggatgacaagaacctgtggaaaaccagcttctcagtcctgctccctcggcccccctggggtggcactgctgtctgcatctcctctttggagggagctcaaggccaactcaagcgggggccgggcgttggccgtgcctgggctggggtggtcttgccaaggaggagatgggtggcaggtcccggaaggtctttcctgggaaaggctgttggcacggactgcggttcctctcctttgtggagttgtgcccactcaacacatcatcctgtagagccccctcctgcgctggctttggtggtcagggcggctcctgcctcccctctagaggccgcctgggttcacgctggtcccacactgggcttagagtcatgctgggggagtgtgaagtcacacggagaacccgtgttgttcttggagcatccagtgtatctgatgaaaaggaagaaaacacctttatcataaaaggcacacaggcatatgttacaaagaagagtgcaaaatttacactcatttttaagaaagagaaagtcatgaagaaatgtgcttgcagccagaggctttggtgtaggaagagccccctggtcatcgctgaggggtcaccaagagcgggcggagctcggtggagtggcaggtaggaacgggagcatggcagagcccatgtgcacccttgtgggtggtgctctctggggaagatgctggaaggcactcagtttgaccaatgccttgaaagagaaaaggaacaccagtgacctcggtggcagtgcatggactgcatctgctaacatttcctggtaaccaaagacaatcggggccggctgctcttggatcagggccgttcagagcagtgaggtttgcacacactcctcttcacagcgtctgatccactaggcacagatgaccttacattgtgacaggatcctgatctcctccagtgctggtcctgctcctcatccacatgaggagagcatggacaatgcagagtggatgtcgcctgctcctgctggccgctttgagtctgagccgagggtgctgcatcttgtgtgcagattcctgggaaacctgctggatgtctggcctggaggcagggatggcacagccccgggatccaggtcctcggccacccctgtgggtcggagtgggtgacccccatgggcaaggtcgtgcctgggagtcacagcttccctgggggaggtggcttttgattaatcttcacagtttttgctgcaaactgatactcgggccagcccatgtccttgagaagcgttgccttgatattgggacagagtagtgctcttgagtgcagtgtttcagcctcaaaggccaggtggacagggggtacggtggggggctgatgaggcattcctggaccctgcatggaaagtcccttgtttctagcatgaatcagcctctgctggacccactggaagacccaggagtgcctcccagggctccagtctccaccagcagggtccctgcctcttccgtcctccaacaggcccctttcccttgaagccagagctggtgttttatttaaaaatagacgcaaagagccctgacctctgcgacagcatgggtgcgccttgagaacattatatggaatggaataagccagacacggaaggacaagcactgtgagatcctacttatagcagcccctagtgttgtcagagtcagcgacagaaagtaggattggtgttgccgggggctggggagtcaacgtaggattgggggtgccaggggctggggagtcagcataggattgggggtgccaggggctggggagtcagcatttacagggaatgaagttcaattttgcaaaatgaaaggagtttgagagacagatggcagtggtggttgtatagtagtgaatgtaatgaatgccacagaattgtatattaaaactgataagatagtaaattttatttatgttatgtgcatcttaccacagttaaaaaaaagtttagttaaaaaaaacaaagcccccaaaatcaatacaaagagaaggccactttgcctgcacagaacccctgacatcggtggtgtggggtgagtgagtccgggggccttgcctggcaggagggcctgggtctgagcttctttctgtgccgctctgccgtgagctctgagctctgcatgggctggctgtggcctcacctggggccctgaagatggctgggctgtcccccagccctgccccaggtgcccaggctgcccagcatgcgtgagatgaaggcagccccagcgttaaccataagctgagcccctctggagtgcccatgccctgtgtgtgcatctgcatgttggtgcatacgtgagacgtgctcaactcacaagaacttggcaggcgctggccgtggggtgaccgggcctcccaggctggtggctggggtcttcaccaaggcaagcatggccagctctgcctaagaccctcagagcacctctgtagtcacccacctgctactcgggagaggtggcgtctgtcccgtggcctcccacgtcaaggtgtggcctgggagggcaacaggcgatgggcttcccagggtgcttcctggctgctggtagggattatcaggaggccccttcttcatggccctatagtcacttagacatcatggcgcctgggacactggggcttgcctccgccatgagccccttaacccggcggctgtgattccagcaccattccgggctgtggtgcccaaaggactctgagagctcagtccgtcctcccctgggagggattccctttgacagtgcaaagctggcacctcgcggaccccgtctccgggcaggcgtgaagctcaagctgctggaagcgctctgtacatccagtggaaggagccgtctctgtccctgtcaccaggagtgtgatgctgataccgaggctccctgatggttcctctcagggaggagacaggccgtgtccagccccttcccccttcctgtcctcatgctcacacccagtcctgcttttctgcatgacccttcacctggctcacgtgtttgtgggccgttggcccagtttttttggtctccagcccttgctggaggtaaattacctcctggaattttgaaagtcctgtaattaagatttgaatttttctttctttctttcttttttttgagacacccaggctggaatgcagtggcgtaatttcggctcactgcaacctctgtctcccaggttcaagcgatcctcttgcttcagcctcctgagtagctgggactacaggcgcgtgccaccgcacccagctaatttttgtattttgagtagagacagggttttgccgtgttggccagaccggtcttgaactcctgacctcaggtgatccgcccacctcagtctcccaaaatgctgggattacaggtgtgagccactgggcctggcaagatttgaaattttgaaggaaacagggacaggattgctgggggtgacagcaactccagagcctcagagaatgtgctggtcacttgctctgtgatttcaccaagacaagactagtggccctcagctcctcatcagccacacggagcggggtgtgaacagccccaccaacgatattccagaatagcgcaaaccctgaggcccgcagacggctgctcagggtggaaaagtgacccacatccatcctggaagggtgcagaaaaggaaaggaaatgtagggacagttctacttgagaatacgagaaaatggtaacaggaataagaaacaggtatttgcagctgctgaggaacgcatgtggcctcccactgcgtcggtctgcagcacaggactggtccctgcatgtgtgacgttctcatttggagggagcttcttacagcttagtggtgagagacacaggcaaactgaaagaatctgttatttgtgcttttctcagatgaagactgggtggatagaggctctgaggttttatatcttctagttccttttagcaaaaaagaaaaaatcagtgaaagccagctaagtccagaaaaacccggtggatgttgaggctggaagtgagagccagctcccaggtgtgtccgagcaggtgccttcctcgccgtgggtggggctgggctggagtcaggaaggacctggagcttccagagggggcctgggaggatgcagatcaccttcccatttctgggcaggagctccagatgcccctctgctccacgtggggctttccacaagaagaaagagtgggtgtgatcacgtgagtgtgagcaccagtgtgggcaggtgtaagtgttagcagaaaactgcaagggaagaaggtggcagcggctttgaaccccaggacaacaggtgccccagacagtgcttctgtgttcactctagagcaggggcacccaatcttttggtatccccgggttacactggaataagaattatcttggaccacacgtaaaatacactcacacagtgatagcttatgagctttaaaaaattgcaaaaaaatctcataattttttttttttttgagacagagtttggttcttgttgcccaggctggagtacaatggtgcgatcttggctcactgcaacctccacgtcccaggttcaagtgattctcctgcttcagcatcccaagtagctgtgattacaggcatgtgccaccacaccaggctaatttttttgtatttttattagagacagggtttcactatgttggccaggctggtctcaaactcctgacctcaagtgatccatccgccttggcctcccaaagtgctgggattacaggcatgagccaccgcacccggccaaaaaatctcataatgttttaagaaagtttatgaatttgtgttgggccacattcagagccatctcgtgggccgtggcctgtgggctggatacgcttgctttagagtcaacgttgccgttcctgtttttgggttcattggcccagtcacaccgggtaatgatagtctgttttggggagaggcagatcatgcgggcagagtgtggactgggttctggcccctcccaggcgggtgtacatatccccctccaccgggtgcactcctgagcgtggggcactcaccgcctcctctgcttccttgcacaactctggtgccgtgcagaggggcagagcccagaggagctttcccggccagttggggctgccctggtttttggaccctttggagggaggaatgcccagtggctcagtccacccacagtgcggagctgcttcttgagggttgccttgtgggcaggggcagcctggtgcagaggcagcttagccgggaggctgacccctttccttgtcctgggctccgagacccagacaagatccggtctcagtagatttttgtgaggaaagagattgactcaactgtgtgtgtattttgacaaactaattttagagggtagatgaaatgtctgatgaaaccttgacatggaattagccaattttaagaacatccacttactacatgttcaacgaggcctcacacataaatttaacgtggttttggaaaatgcagcacttaacataagatcacatttttatctgtatgtcccaaagtgcaaatataatttcaaatgttctgccatcttggtaacagtttttttacattatgcagttaccctcaatgctgtttttgaattacatgccagagtgtttttagttaccacaagaaggaaaacaaagtgcaaaactgaattgagctacgtgtgtggcagacaggcctcctagaaggctctgcaaaatccatccaaggactagaggggcacagccctgctgggaacagccggcggggcggccgttgtgggtggctgagctgatggcggcttccctccgggccttccttcttcccacccaccttcagagcctcggggtggggagggttggaggcaggtgtgtctggcgtattgaacccactaaggtgagctccgtgctcgggggtgctgtctgcagccacatcctcatttctttgggcctcagttttgttgtttgaaaagcgaatggactgaacaagagcagcctttttaaagcagaagaccttttcttcaaatgaaatctgataaaggcattcattaagaaaactgtggctagactattttgaaaataagagtttctaacctttccttattctgacccaacccggcgcatgacattccctgtctttggggtgcggtgaggacgtgggagctgagagctggggctttgtggtctctgcggctcccccatctcctgatgccctttggagctcagaagtccaggcattttgatgtccagtaatgggctggctgttccgtagacagtgggctttggaattccacagcattgccctgacagatgggaaaggaatcctcctctgcaaacagaacccagggacatggacttgctgttgacccacatcaatgtcgtagaaaacttcccttgtgagtatttgacaaactcagaaacaatttaatattagaaggagaggaaaaaattgcttgcagagtttttgacagagagggagctcacttgcttgggttgagcgttgctccgctgggagagggatggacgctgctgcagcctcttcagctacatttaaaaatggcgctgggcacatcccttctgcgctttggttccttctttcccataactgatgcactgaagaattttgcatagctttcttatgtcccagtaagagtaggaaatcaatttaaaaaggccaggcaccgtggctcacgcccgtaatcccatcactttgggaggccgaggtgggcggattgcctgaggttagaagttcgagaccagcctggccaacatggtgaaaccccaactctactaaaaatacaaaaaaattagctgggcatggtggcgtgcgcctgtaatcccatgtactcaggaggctgaggcaggggaattgcttgaacctgggaggcggaagttgcagtgagccgagattgcaccactgcactccaggctgggtgacagagcaagactccatctcaaacaaaaaacacaaaacaacaacaacaaaaaaagaaggggctggtttgaattaatgaaaaatctagaaaactcatggttttattttgttaaagactgtaactcaagccagatagtcacattgtctcttcttccttagggatcttatttgacaaatatatagaaatgttagtaattagcatatcaattggcagtctgttaattcatggttgtaataaagccttgctgttttctgaagtgagctaggccagtttacttcatgaacagacttaacaagcctcatgctagccagttctgagctccctgaattggaagcaggtgtgatgcgcatgcgtggtgctctgcagtctctcagcttccccagcggccttggccccttctcctctgatacttccccttttatgcgtccgcagcccttttgggttctgagctgcggcaagctttaagcaagtgttttaattttctttagttcacttagctaagtcttcaacagattaactaacgttcgtaccttggtagaattatagccagattttgcaaagagcttgtgaaatgacagccagatggctgtggaatctgaatattcactgctgagaaccgaagccagctttcctactatgaagatgttctgtgtgagccacaccttgcccagggtggaagtgatgtttgtttcaggtccacagacgagggagaggacggagccagtggaccctcggtggcagtgtctggtgcagatgtgggcaggtaaccgggtggaataatgcttgctttgctggcattttggccttaattttagaaaacaacaagttaggtttgtagggctcaggacaggtcaaaactcagtgcactaaatgccaccacagcccagagttctgagtgacagttccaagcacgtgctgatgatcaaagccctagagaaaccaaagaatttgaatgtccctttgaaatttacagcaaaaaatttaccctatgtcttcaagacaaacatgagaagcaccgatttatgaggtgccaggcacactagtgtttatgaatacttagatgatttgtggcaaatagaaaggccataggcttcagaatagacctggattcaaatcccagcattgccaattagcacctgtgcagccctgagcagctcacttaacctctccgagcctcagctgcccgtctgcaaaaaagtggattcctatcctgcaggtggtagtagggattaaagaaggtaacttgtgggcagcacctgtgtgcttggcgctcggtaaatactggacacgtggcacacgttgttaccagccactggggcacattggccttggtgacctaatggagaaagccaaaccgaagtgctaaccccacaggtcgatggaggccccgagaacttgttggttcttccacactgaaggaaaagctcatggaattttaagggcagaagagaccttggcggtgggaggtgttagagcttcctccatgcagacacacacggtgggccctggggcgaccccacccctgcccgaagccccagggtcccttgtggtctcgtctggatgtggggtggtgacgctctgctgtccctttggagggtacgcgtgttgggggcatgggtgggagcagagccacctccaaagaaacccccccttggccatgtgctttcctcccatggagcacaggtggggggcccagcctgggctcctcattgccccccgagacccagcacgtcacctccacatttatagactctctagctgggcccagccatggagccccagaggctgggggctgagcttgtgcagccccaggaaccttagctctccagggctcctctggcccgagggaggggctgacagccctttttgttaagggcattgacagtgacttctgggcaggagaccctaatacgcttggagtaaaaagggagggtgatgccttggtgggcccgaggctcctgggagcccccggctgcagagacaagaaccatgaggaaatgcagagtgaggcccttggctagccagggcatgggacccggtccctgcctgtgtgtgactgcaaaggccactcaggcacccgctgcagcagccacgtggggacactgaccagaccacacagcaccagcctgtcccagccagtcccagctccaggctcaccgtatgtccccagccgtcaccagctccaggctcacagtatgtccccagctgtcatcagctccaggttcacagtgcaccgtccggttccagccgtcaccaggtccaggctcacagtatgtccccagctgtcaccagctgcaggctcacagtgcaatgtctggttccagccgtcaccagctccaggctcacagtatgtctccagcagccaccagctccaggctcacagtatgtccccagccgtcaccagctccaggctcacagtgcaccgtccggttccagctgtcatcagctccaggctcacagtatgtccccagccgtcaccaactccaggctcacagtgtgtccctcaggacccgggactcggcgctagacccccagagtgagcatgctccagcgtaaggctccaggcctttccctctcggaagggccaccctttagaagtgcctgctctcatctgtcctggaggttatggctgaacccacaccaggaccgtcactcattcgagctccctgggtttgctccaaggctgtgctgttgagaccacatccaggacaggagtccggtgctgggccagggtcagatgttctgatttgcagggaggagccacttgcatgcatttctctgtggaaacaaaaggcttgtttttgaaggcagcaaccctaaggatgtttaaaaggcaagtggacagttttgggggtaaacctatttaatgaaatgcacacagccaatattgctgtcacttgtgtcttcaggtgcctagagggtgaatgtgatatatagcaactcaatatcttagtgcatttaaatatacattttaaaagattctctgactcattggaattcatagttccatttttagatgaaattgaagacatagttcagggaaaatgggacagttacttgtttgttaccagtgtggtcgttgcaggctgtgctggctgacacggggggcatggcttttccctgaaacaccttggaatctgcagttgtcgttccctccagagcgctgaggggtgaagggaaacccctccattttggatttggagagctgagccctggggggttcgtgctgcctcacttccagcaggtcctgggactgggctgggagtcagaccaccccctgcccacctgtgagtttgggtgggtcgtgtcttcgttccctcatctgtgaagtgggaataaaaagctgagctccggggcctgttgttggggttacgaggctgcgagaatcactggagtcagggccctgcacgaggcaggtgttcacggacctgagttcctcttcccgccccgtggtgccgcctgcttttgggatgaggtagtggctggggtgtccgtagtgcagtgcatgggaaagggctcaaggcagtggaggatgggaggccactgtcaggtgagcgcccacctattctcagtgcctagggcgctgggatgcgtctctgcaggtcccatgggtgggctggggcacttgagacgccatgtgtgacggctgggagaggcacacacgcattatagaagccacagaaatcacgacccacggaggctgcgctttttccttggaaacttgcagccatagccttggtggtaacagggacagaagcagcaagtagacacacgctggaggtcgcctgcgagtggattcccagagggacacgccgcgcaggggtgaggggcagtgctgggaggagaaccactggggttagtgtttgtgagggagcgcagcgtgcgccagtcaccggacgagcaggtctcgaaacactttccgagatgcggtgcacagacctggctgtgggctacgtcgagtatgaaaagtgtccccacattttccagaaacaaagccacttacagggggcccctaaaaaggggcactgattctaaaggtgcacgagctgtgctcttttccgccagcgtccggaagagagctccacagggggaccctctgtccctgtggtggtctactccttccgtgcttggaaagccagattttgcttccaaatctagaagaaatgagtaatgaaaaaaagtaatgttttctctcaccagctctaaagtgatggcttttcagcattttaaaatgcagttctgctactagaatttgaaacaacaaattacatttatgaggtcaaggtgaagctagcaaatattacagggaaaggaacattcataaataaagatgaagtcatttatcagagacctaaataagaaataggctgaaagcgctggtgagataaactggtaatgtaagggtcatttagcctaatgttcacatttatatgcaaggaatcgagtttgcagcacagtccaggctcgttgctgggctggcagatgaggccgggtgctctgcggggtgcccaccctccacgtcctgctctgtgtcccacaggtctgtgggtcctttgacctctgtcctgactcacctgcctctggcccctggtctgctggtcttctctggctgagtggaagggagcgcagcttcagagcaccttttccctgttctgaggcaggagaatggcagagggagctggagcttggatagagacggcatgtggactgcacttcctccctggcgacagcccccgctggcctgtccttgggctgcagctcactgtttcctgacagttgactctcatgcatgactctgcttcctcgtttgggccttgggtgctaacgacgacattactgctgaactagagagcctcttcctgtggttccttatgcctgacccttgcccttgtaagccatccctctccagttatcctaatttggctatgctattcatcatagtccgctcaggatgctataacaaatatgctgcagcctcgggcttaaacaatggatgtttatttttcacatttctggaggctggaagtgtggggtcaaggtgccagcagacttggtgtctgggagcgcctgcttctggtttgcagaggcctgtcttctcactgggacctcacaggggcgagcagagggtgggctcctgagtctcttcctataagggcactaatcccatcctgaggctccaccctgatggcccagtcatgtcccagagggccctcctaacaccatcacgtaggagttttgggaggactcacacattcagtccggggcacagtctgtctccacccgtgtcctactgacagatgtttgctcagttgttttcctgagtcccgtcttattgatggtgggctgggaaggcccttgtgtcttcctgagtcttgtctcagtgatggcaggctgggaaggtcattgtgtcttcctgagtctcgtcttgtcgatggtggactgggaaggcccttgtgtcttcctgagtctcatctcgtcaatggtgggctgggaaggcccttgtgtcttcctgagtcttgttttgtcaatggtgggctgggaaggcccttgtgtcttcctgagtcacatcctggtgatggctgcctgggaaggcccttgtgttttcctgagtcccgtctcggtgatggtgggctgggagggtccttgtgtcttcctgagtcccgtcttgttgatggtgggctgggaaggcccttgtgtcttcctgagtctcatcttgtcaatggcgggctggaaaggcccttgtggggtcttcctgagtcccatctgggttatagtgggctgggaaggcccttgtgtcttcatgtgtgcctggtgcacaatagacaaggcagggcagcacttacttaacttcttattgtttattttcttgaaaacatcatcaagtttatgaaaccaggcaaagtttcaaatctaagacaatcactttcattaggcaagcctctgtctagccctgtctggacccagaggaggaggtgatgattttcagcaaaatttaaagggcatttcagaccttctttattttagttttcatgttttatatttttgaattttaattgatgggcttaatgagatttggggcattgcatcgccaacatccacaacaaaactaaatggaaggtatgggctggagttgtggttgctttgtgtggttgttttgagtgttttgtgtggttatgtgtggggttctggttagtaaggtcccaaccttttggatgtgaactgaaattttatttttcttcatcttatctagtatggaaccagacttttagattactcatttttgaagtacttttgcagattttaaaaataaactggatggaaaacttagacattttatagaaaatgaaagaaaaaatcccaaatataatcaagtatagccgctatattaagatttactgtgtttccttccagtctttttttttaaacactttatgtaaaaacaatcatggttgaggacatatacacactctgtattctgctttgtgttgtgtacacagttgaccaactaactgaaaaaactttattgcctaatttctaatggttgcctattaattgtttttgtatgatttcaatagccacctgaatgctacaagaagtcctcagtgccatggtctgaccccagagaaagccccagccgctccccaggtgctctaacaggcagttgacaaatagtccagccgcagaaagcaggattctgacacagttctgtatcaggagaacgaaaacagcacagattaaatgcaggtaccctcccattgcaggttcttaccatgacccagtgaggtgggcattttaaatccccaatttacagaaaggaaaaacaaggctcagctcatgtaagaaacttacccgaattcacgcagctgaatggggagggagtgagcattgacattaggtgtggttggctcaaagcccacaacttcccttggtactgagtagttaagagtatctgagatcaaagctgctgttttcttcgaccagattgtggaaggaacaagatatgcctttgctacagggtaactcagaacttcaacacttccttagattacatgagtaacagccacagaaaagaataccccatggaatctgagaatctgacattcccaggctgggagatcatttgggaggcaatgcaggaggaacagaggctttggaggtggctggtctctaaagatgttgtgtgaagtgctcctttctgcgagggcatactgaggtgtagttctggggaacactgaaacgcctgcctgctgacgaggctcgaggcaggacttccagacccccacctcactgtctcccgctgcgtttcccaccccgccctccctggctgtgcaggctgcccaacgtgcaggcgtcgtctctgctgatctagcaggatgttatctgtcgatgagctgcctggagccaagaaacatatggagaatgtctcgtcttcagagggtctgcacagccgaggtgaaacatgcccgggcagatggccactgtgtgacgtggtaggctagctttggcctgggtgatggggggagcttcgcagagatgtgtcttcaggagggactgtggtggacaagctgagtggcagctccattgcaagatggatggaggctcttggggtacggcaatgagggcagcagttggggcagagtcgcagttcagacatccagccaggcctgatcccactgcgtttgggaaatgaagagcagcacacagctgtccctgatgaagcctgtggcatgggtggtcacaacctgcacccacagccatccctgacagagcccagggcatgggtggtcacaacctgcacccacagccatccctgacggagcccagggcgtgggtggccacaacctgcacccacagccatccctgacggagcccggggcgtgggtggtcacaacctgcacccacagccatccctgacggagcccggggcgtgggtggtcacaacctgcacccacagccatccctgatggagcccggggggtgggtggtcacaacctgcacccacagccatccctgacggagcccggggtgtgggtggtcacaacctgcacccacagccatccctgacggagcccagggcgtgggtggtcacaacctgcacccacagccatccctgatggagcccggggcatgggtggccacaacctgcacccacagccatccctgatggagcccggggggtgggtggtcacaacctgcactggccagtggaggcccagggagggtagcccctgcatcttcaggcaaggcatccccagcaaaggcagtggtggctggggagagagcagctgtgacggcggcacggagggcctgacgtgcgactttgggatgtacccggagtgggagctgtgttttcatggtgttcattctgcatccacatcttcagaggaaatccccgaggcattgtgagcatgtccatcagggcaccctggaaagcttggtaaatgctgtgtggtggcgaaaggatgtccgttataggtgagagcttcatcgattgatggaagattgacggctcggtgcctcaggctagagcttctgtggtgtccacctggtgcaatgcagagggctggggtcaggacggtctctgcgggacgtcccctctggcccctgggatagggactcctcgtgtgttgcagggagacccatcacgcaggacagggtcctggcggtgcctccgggagtggacataggtctgtctggctcctgatggcttcctagcactccacgttgggccactcagtggaaggcaaaggtgcgatctccttggatggtttgtgtctgggatttgcagccagatgcggagggtcctagaaatctccatttctgagcttcttgctcaacaagtgagtttggcaaagttttgttgggacttaaagtttgcacagattccatctgtgagaggctcactttggtgagtgcagatcttgggcgctgccctgtgagcgagggtgcactgaggaagatgatgttgctgtaattaggacaaatgcactcagcccagtatctccagggatttgagaatcagttcattctgcaagtaacaaaactagggaaggaagtggttttcaagctcccgtggttgttggaggtgagctaattctttgcgagttattaattgctggtctcttggaatggcttgggagcacaaagtgacaggaacccaagtcatttctgttctgtttgcttgtgtttgttttgctttaagttaatcctttggtggttctggggatgaggccttgtccctggcttggtagagagaggccagtcaggagggagcaggtgtggtggagcctggccgtccctgagccatcaagatggtctgcgcgtcagagtgcagcacgggccacattctctctgccatgtgcagagggctcctgcacggaagcctgcacgcatttaacaccagcacgctcaatgtagtcttgtaaggaacaggttgaagtgtgccgtggtgtgtctggaggaagcgcctgttgctggtttttgttgttttgttatgtattttttgccatgttccatgctgttcctctaatcacatcatgtcccgggtttttgaagtttagtgacgtttttggtcttttcttactttttacccatgttttttcctctttgtaggatcaaagtcacatacaatagcaactttattataacgcacggtccaccacgctccaacttccagtgtggaggcatcggtgggggtttgctgaaagtctgagcaaatctcatggctgtctctgctgtctccgtgatgactctgtggggcacgtgactggaatgctctgatgcctgtttgacatctggggcttctcagaagccacaggagccacgctgggggctgacagtttcctctcccaatgtcgcttttgggcatctaagagcctggtcatagagacgtgacgtggcttgagaatggacagaggccaagagcagataacaaagcaaggtcgtgcccgacgagctgaggatctttttacactgggggcatgggcaccacccaggtgctgggccaaccctgaagcggtctgcacctccctccggcacccccttctttagggagcctctgttaatgcaggattaaagtctgtggatggacacgcccctttctgactttgttgtttattcagttttcactgtggcaaaaacctattctaagaataaaataagccggtttatctgacccttcagagggaaggacccacgttgctttgggttttttgccttccgtgtccttgtcagtggaaaccccaaatgcctgggcttctcggcgcacctaagtgtttaggcacgtgtgagtgcagtgatgcgttcagcttccaggtgcctagtaggttggagccagcgtggctgggaggaggcatgtgtttgtgtaaaatatgctcctgttcaccacgttctttctatgagcagagggcaggtggtgggtgagggcgtcgagcctggtgtttggaggttgttttatgtgatacagatttcttaacctttttctctaaaggtgatggtccagtggtgcattggttttgttctttcctgcacttgcttcagcctcctcctctcagctggggtgtttgcatctgctgccttccaggaggctgcgcgtgagatgtgggcatctgtccaccacagcaaacacccgtctgcctcgtgaggaggcctcatggtgccttccccacaggtgggatgagctgagcctggagggggctttgccacagccctgggtcgttctctcagggaacacctgctgtttctgtgccacccctgggctcgcaggcctggatctggatggggttggggccttcctgtggcccccttccccatcagttcatggagggtggcagccgcgggcttgagctcgactctggagagggagatgtgaactgacagccttggcttcccttccctggagcgtttcttggatggcagcatgggacgtgggtaatggggcgtggctgggaagccgttacctgagcgctgtagggtgatgtgtctgtaaatttgctgtgtcaggcatggtttggggcagctgttggccgggctgtaacctaggacattaaattcagttccctcatcgcagcttagggatcctctcgctttgaacacagtctgttgtggtttgtttttgtttgtgtgcacatgctcacccacgcccatgcacatgttcacacacacacccccatgcacatgctcatatacatacatgtggccacacacatccgcatacagatacatccgtacacatgcttacacacacacacgtgtatgttttgagggcacttgatcactagctccccccagcctgccattcccctgctctgctgagtgaacgtccttcctggaacctgcatgggacccacatggcccgacacctcttgcctcgcccctcaggagcaggaaggagtgggttctgctgtgaaacagatcttgggagtgtgcatgtttcttttcctttgccaccagctctttgtggtctgggtctttgcaaccccagcactcactctgtttcatatgttagtgtaaacctgcacacatacacctcacatgggcacacatatatgcacacatgggtgctcacaggcacacgctctcacacgtgtgctgtagctggttccatcgtgggctttctcttcaccttgcccacatggaaccccccccgccttgctctatgtgtttaagtcgtggggtaccagagctccctgtcccagtgcatgaaacctgctccagggagcagagctgagtctgtggcacacggggaggccggcgtgggatgtccaggtccccagcattcccaggagctcctgcagagcctccgcaaattgccaccttccctcattcagtccaattatgcttgttctgttttcctcatgtaccagcatcagtattgaagagaaacaaaaaataattttggattcaatttcattgcttcacttaattattactgtaaagaccttgctttccattgctttttattgcaagcatgtggcatttaaattgtattttggatcgacaggctttgatggactagccagggaaccaaatcactaattccatgttctaaatatctgacgtaattctacttatttttggggtcagcctgtcctaggaatggatctcacttcttttgcattctctctgttttccctcttggttgtgacagaaacttggagctaggccttaagttaggggtgtgcatgtggcatgcgtgtggtgtgtatggcatgtgtggcgtgcatgcttgtgtgtggtatgtgagatacatgtgtgcatgtgtgtggtagcgtgcatatgtgtgctgtgtgtggcacgtgtgtggtgtgcatatgtgtggtgtgtggcatgtgtgatgtacacgtgtgtgtggtgtttgtccatgtgtgtagaggagatgctgagaactcatgctggctggggaggcctggggagactgtgagctggtcctgctcccgcctggccccttctggtgaccgcccctccccacagcccctggggctggtggacacagcccaggtgtggtgagtgtgtgctgtgtccgcagagggaagctgctgtcattcccacactgcatcttcgctgctgattggagcccagactcacacagttgccactctccccacatttgactcattttggtcaaaaatgcacaaaatatctaatacagagcactctgtggttccagaggcagcgatgtgagtttgcagctgtgtgtgagctgtcaccatggctcgtcgttgctggccgtggtcagcagcaccttccctgtccttgggggtgtcctggtgagtccgtcctcctgctggcctcccctgggccttcccaccttcctctgccgacacagccaatgcttgctctggggcgtgtcagcacctgcacagcagagatgccacgcattccaaagcaaaatggagatgattttaaaatgtgaaaatattcagaagtaaatatgcacgcagctgctcctcccatcagcgttagccccaggaccaacagcgacgggtgcttagtgcccaccaggtgctgtgtgagtgctgcgggcattctaatgtcctgtgtcccaggcatcattgttattattgtctgtctgcctgtctgagaaggggattgaggcatttgggtgacttttctcaggctgcagagctgagatttgcccctggctgtgtgatcccaaagccccttggtgggctcgaaggccaggctgactttcgtgagcacacgtttccctcacagggctggccccctgaggagctggtgtttccacccctcatcaccttagactcaggctgtgtaggaaatgttgtgtcttccaattccgggcactttaatccttgtttgcttcctgttgtggactcaccgaggccagtgtccatcgtgcacagttctttttttttttttttccgtttttgagacggagttttgctctgttgcccaggctggagtgcagtgcagtggtgtgatctcggcttactggaagctccgcctcccatgttcatgccactctcctgcctcagcctcccgagtagctggaagtacaggcacccgccaccacacctggctaattttttttttttttgtatttttagtagagacggggtttcaccgtgttagccaggatggtctcaatctcctgacctcttgatccgtccccctcagcctcccaaagtgctgggattacaggtgtgagccaccgagcctggcccagcatgcgtggttctaaatcagctgaaatgtaggcattcacaggtctgagacagcaagtgaacctgttcctgatacaccaggtgacgctttgtaaatgtgcatttcacagggcaagagacggctgaccggctctggggagtgattgagtggcctgttttgggacgtcacctggcgttcataccccatggcaaacctcagcagcatctggaggctgcccaggcgggtgcccccgcctgtcctgcacccaagcacgggtacccccaccacactgtatgagtgcaccttctcgggagcctcttgtttaggctgatgcctctggagctctgtggaaacatgatgtgttacttggcagctgttacacagccagttgctagcagcttcactgcttagtacacaccaacttcctccatgtgctcacacaacacaggaacacccaggagcagctcctcggctgtccctgcctgccccctaccctgtcgtttagactgagtgtcctgctgagtccctgctgtgtgtcgggcgggatcagagatgggctttaaaccaacagacatagcacaagcaacacaggtaggtggtccctgctacacaggaaggtggttgagacagcagcaccgaggcgcagcttgtggggcaggtgagatgtggctggtgctgatgaatctgggatacggggcaggaagaccaggggagcctggggtgagagctggcggaggacagcctggccccagccccatgtacacagacaattctactctctgcagaggtcacggtgagggaatggccagctctgtgtggctgctgtgagacccccccacagagtggagcccacacctcggagccctgccctgtgcacaacccccacatggctgagcagtgggccgccaggtgttaggaaggaccagcggcctgggagggacactgaccgtagtccctgtaaacaggcaaacacaatcccaactccacggtattctcagaaggaggaaatggagaggccagcccatggcctggggctggtgaggcctccatggcactgaagcaggaggtcagacatgttccttcacctgctcatcacatgtgtcttggcagacactcgctgaggatttagcacgtccaaggactggacacggagacgcaggctggccctgtcttcagggagctgtggccagggaaggcagtgaagtggctccggtggcggggggcatggccggggtcagggaggcccaggacgcgccttgtggggaggaggcctggggagctggtggagaagctgggtgtggggtggggggaggtgagggccaggcccacggtgcgggaaggacacagctgcatttgctccgaggacgggaaggctgtgggggatcctcggagggatgctcctcggagggatgctctcccaggcctgagccaggttggcttgtgcagtttctgcgcacgtctcgactctgcttggggcttctggtgatatttgtcacaaaccataacttgtgttgttacaagttatgcctttatgaaggtttgaggaggtcaccaactctatcttcattgtgttagaaagaaagtggcggaatccactgtatgaattggctcagtctccctaacaaacccccacaaaccaggcggcttagcaaacaacagacatttctgagtcctggaggccgaaagtccaagatgagagcacggcagggcaggttcccccagaggcctctccccttggctggcagatgccgtctcctccctgtgccccacagggttgtccatctgtgcgtgtctgtgtcctcacctcctcctccataaggacccagtcagcctggatccgggcccatccggcgacctcgttttactgaaatcacctctttcaagacccatctccaaatacagtcccattctgaggtcctgggggtcaggacttcagtgtatgaactttggggtgcacaactcagccatcacacccacaaacaggaaatgggatcaggaatggagaacaaccgagtcagtttcccaagccacagtccagcatgtcggaattccgaggccgtgaccagcggagagacctccagaccctgtgtttgtgggaacgtggttgcctgtgccccgtcctagctcagagtggctggtggttctcgtgagcgtggctctacctggttatctctgcagcgtcccacgggagagatgcagccctgccgagctcaccgggaaggagtggtgtcagttcccttcgccgccacaggtgggcagggagggcctgagcctgcacgaggggtgaccccttcgccacacaagtgaatcctgccctggattccgccggcaccctgccaacaccaggagccgtgtgtctgcctgatgtggctccccccagagcgggccctttcagaagctgtaggaagtcatcatctcctcagggactgggcagatagtcccccttcccacacagcgctgctgaggaaggaaggactgcacaatgccagccagaggggagagtaggggctgggctgcaggtctgcaggtctgcagagagccgagtcaatgggggggcattgtcggcttgggatgttgagaccctaaggcttcaggagagcttgggtcttcctgtcagggctctgggacaggtctgaggtctgtgaggggaggcgtcttcaccctgtatcatcggggctttcctcttgctgaagcgggagcttccacactgtgtgagcacagcagagagaggtggctgtggagcaggtgccgtggagagagaccagcagagatgtcctgggagatgggggcatctgcccccgagggctgcttgggaatgaggagggcacattagataaatactcattgtgcatgaaaggatctttaaaaatccccgtaatatgtgtgattatgctgaataataattaaacacggcactattaatactccatcccgtaggacctctcaggaggaagggaggagatacagtgagcgcctgttctgggccagggaggctggggtggccccagctcaggatttctgcagagcctgtgtccagctgtagagcgaggggtgcggagcggctcagccttggtcccactttccgtccttaagtctggatggggctggcaggctggaaacctggcccgtgcgtagcccatggcccctggggcctagcatcctgcccgtgctaccttctgctgcagcttctgctcgggtctcacggttttgttgcacattagggggccgtgtgttctccttggcagatgcccagtttccaaaatagagaaactttcacctctggactacttgccagaggtgcttttccttccagagcggtcagggcctgcctcacgctgtgctctgcagccggctccagagcctggagctgggaagtccagcactgtgcagggcctgggacgcagcatttcttcgcatggagggccagcttgagggttcagtcagagccttgcatcctgagccacagtcttccaagggctgtcttttcggagggtgcaggagaccgctgctggggccacacttcgaagggcagtgatgctggcacaggtggtgttggctgtgctggaggagcccccagtggcctcatcggaactacagtgggccctgggacaacatgggtctgaactcatttattcatggatctttccaaccaaatatggatcaaaaatgcagtatttgagggctgtgaaagccaagtgtacagaagctgactttttgtgtatgcagattccgtggggcagctgcaggacttcagtgtgtgaagattttggcgtaagtgggggtcctgggaccaatccccactccatgctgagggttaacgccaatttttcctgcaaaaacctgatttccaaacgcagtcaccttctgaggcactgggctggggacatccatctacgagttctggggcttgaccataacaaccaacagctttcctcgcactcctcagcgatctggcttcacttccctccactccagggcagactccactccagggcagactccactccagggcagacgactccactccagggcagactccgctccagggcagactccgctccagggcagactccgctccagggtagacgactccactccagggcagactccgctccagggcagacgactccactccagggcagactccactccagggcagatgactccactccagggtagacgactccactccagggcagactccactccagggccgactccactccagggcagacgactccacaccagggcagactccgctccagggcagatgactccactccagggcagactccactccagggtagacgactccactccagggtagacgactccactccagggtagacgactccactccagggcagactccactccagggcagatgactccactccagggcagactccactccagggtagacgactccactccagggtagatgactccactccagggcagacgactccactccagggcagactccactccagggcagacgactccactccagggtagacgactccactccagggcagactccactccagggccgactccactccagggcagacgactccacaccagggcagactccgctccagggcagatgactccactccagggcagactccactccagggtagacgactccactccagggtagacgactccactccagggtagacgactccactccagggcagactccactccagggcagacgactccactccagggcagactccactccagggtagacgactccactccagggcagacgactccactccagggcagactccactccagggcagacgactccactccagggcagacgactccgctccagggcagacgactccactccagggcagactccgctccagggcagatgactccactccagggcagactctgctccagggcagatgactccactccagggcagacgactccactccagggcagaggactccattccagggcagactctgctccagggcagacgactccactccagggcagacgactccactccagggcagaggactccactccagggcagacgactccgctccagggcagactccgcttcagggcagactccgctccagggcagatgactccgctccagggcagacgactccactccagggcagactccacttcagggcagactcgctgtcggcagcatggtggctgctcctttggctaatctcttgtccgcaccagccctcaccgtgggacgtgtctgcaccactctggctgctgaggctcacccaccacccccgcccctggtcacactggggctccccagaccccaacctggctgcaacccgtctggcccctccaacttgtgcttcctgtgatgtcccctcctggaccccaagagtcacaccctggcctcctgcgctcttatcttgttcttctgagaccccattttccagttttcaagatgtcagcagccacggtgatgctgacaatccctaaatctaagtgtcagctcatcctctgttgaagcccttggctattcttgaaattcccatttttgggtaacttttgttcatctcagtcccagcaagttctgggtgatctttgctgccctctcccttctcacggcaggtctgttctctccagctccacatctgccacacacagaagcaagtgtgtggaaatgaagacttgggctgttggaagaactcgtgatggtgagctgctctcaagacaaggaaagccaatgtccacgtgagaaccaggggagacgctgagccctgcagactgtgccaacccctgggctggctccggtggtccgagtgcctcacggactccagaccatgctgatgccctcacttcaccttaatctgtgtccacagactgcatctagccgcagcaaggtgcatgttgtaagtgcatctggtcaccaggggccaggttacagagagcgattcgctgtacacacacagtggtgccagaacacaccctgcacatgcaccatcctggacagtccattctgacgtggaccttcctcttaaaacagtccaccattctgacgtggacctttctcctaaacagtctaccattccgatgtggaccttccccctgagccagcacctggacagtccaccattgtgacgtggacctccctcccgagccagcacctggacagtccaccattgtgacgtggacctccctcccgagccactacccggacagtccaccattgtgacgtggacctccctcccgagccagcacctggacagtccaccattgtgacgtggacctccctcctgagccactacctggacagtccaccattgtgacgtggacctccctcccgagccagtacccggacagtccaccattgtgacgtggacctccctcctgagccagcacctggacagtccaccattgtgacgtggacctccctcctgagccagcacctggacagtccaccattgtgacgtggacctcccccctgagccactacccggacagtccaccattgtgacgtggacctccctcccgagccagcacccggacagtccaccattgtgacgtggacctccctcccgagccagtacccggacagtccaccattgtgacgtggacctccctcctgagccagtacctggacagtccaccattgtgacgtggacctccctcccgagccactacccggacagtccaccattgtgacgtggacctccctcccgagccagcacctggacagtccaccattgtgacgtggacctccctcccgagccactacccggacagtccaccattgtgacgtggacctccctcctgagccactacctggacagtccaccattgtgacgtggacctccctcccgagccagcacctggacagtccaccattgtgacgtggacctccctcctgagccactacctggacagtccaccattgtgacgtggacctcccccctgagccagtacctggacagtccaccattccgatgcggaccttcctcctgagccagcacccagcgtgctgctcctgagaaatcattcgtcaactgattttggagttactgcttcagcatcttgctgattactaatagatttcctcattgttaaatttagatgcagggagaaaaaacaatttccagaaataattcaccctgttgggaagccagacacctagtactgtctctaactcagcaactaactgtgtggtttcgggtgaatcacacagtcctgtgcgttggtctagatgttttctcaggtccctttgggcaagaatacagccagccctgcataccctcaggttctgcctgagtcgaccaacagaggattgaaagtactggggaaaaaaatataaaataacaatacaacaataaaaataatacaaataaaattatagtatgactacgcagacagcattccagctggggcaggaagtcactgcgtctgcaggactgagcgcctcgcacagagggaagtcatggaataaggtcctggctgcagcacttggaatcctgctgtgggagagataagagggacgtggctgaaatctcctgttccttggctggctgagatctcggccaggccctcatggcctgcagggtgcctgtggtttgcccagcgtatccatgtgtatcctcctgctgaatctttgctgcaccctcatgagagtgaagaggctggggttaccgatctggtgctcagacatggaaaccaggacgtgctcactgtgacctggctgggcatggctgaggcagggattaggattttctgataagcagccacccgatcgttcttcgtatgtttgtttctattggtaatatggttgaaaaaaatccaggagttatagtcttttctaaaaaaccatgtaagtgctactttaaatggaattatcaccacccacaaaacagtggaaggccgcccagagcttggaagtcggggttggagccactgttgctcctgacggaagggagccttctctggagatcctgctctggggagtgtttctccaggggcctcgagctgagctgaaggtggagaacctgcttcaaacatccaggaaagactcgtctagaaactgtctaccgaagggcatgaactgttttaaattgtagtggcagtaaacatagaaacaccatctagatggacataaataataattttcaggaaaaataagttctcagagtccgtttcattgctgaagggggaatttcacaatagtggaattttactctcctttccacaccttcctgctctagaagggacggtgtgagacccaggctgccaatgcaccttgttcaagatcccaaactctgtttttcttaggggatggaagtccttctgcctccgtgtcagggctccctcttggaaggggagctgaagggcccactctgtggccagaaaatgctttcctttcttggcattgccgttgttttgttaaaagaaatgacaagtttgagtgggggacatccctgggatttaaaaaatcattctgtgttgcactggaaaagctcattaaatcgaaatgtttcccatggcacatgtcctgttcagaacttgtgtgtttggcagagtagtcattgcactgaacaggaaagcttggtttcaggctaatgatagtaaagttggaaaatgtaaggagaacagatgggtgttgcttgcagagtgtgaccgtgctggcgttgtggggaaaatggagaatttccatgccatgggggaggcattgggtaacccttcttccctttttcttctttctgaggtgagtcacttctttcccttggctgcttgggatgggagaaagtccttatatgatgggaaacagcatcagcagcattggagaaaaagggcccctttctcccttggggatgttgtatggccactagattcttgagtatctttagaatgaaggtccagagtcacccagatcaacatggagagtgcaggagagtgctggagaatgtcagaaaatgccagagagtgctggagaatgccagcccattccatcaccttcagagccacccatgcaaagcaaaggctcaaacacagcttggtcccccatgccctgagagccacctgcagatcgggcagggaaggagcttgaggtggaatcggcacttctgactcagccctagcacctctttacttatttatagactaattctgttctcggtatgaaaaagtaatttaactgtcatggccaactgagtgtctcacacagatagctgggatgagtccgacttcataaaatgaggagatgtgctggctggcaggacagtgtcagcactaagggacttcttttaatgttttctccctcttcccacttagatgccaaaatagccccaaagtttgaaatgacttttcagccaaggaagttcttggaaacagtgacgacgcctgtgtactgtgtggcctgagatgctgcacggctgttctctgctgcagtgctttggggatcctgagcctgttggcataaagggagctcagtgcaaactgctgcaggatgatgggcatcctggagcccaagtattgtttttttgtttgtttgtttagagacagagttgttttgctttgtcacccaggctggagtgcagtggcgtaatctcagctcactgcaacctccacctcccagattcaagtgattctcctgcctcagcctcccgagtacctgggattacaggcacccagcaacatgcccagctaatttttgtactttttatagagacggggtttcgccatgttgcccaggctggtcttgaactcctgagctcaagcaattcacctgtttcagcctcccaaagtgctgggattacaggcatgaaccaccgcgcctggcctcaagtaacatttttaatcagctcgaatgtttgacccttagccttggggaaggttcgtccttccctcttgtcctgctgtggcctcctcaagtgggtccttcctctatggtcatgccgtcctggtaatctgtttatatcctctgttgatctcagtcctaccctcttttaaaggtggagcttgagccgtatcctttagcctctgtggacgttctggcccggcttggctgtgcattttcttcacttctggcttacttggcacctgagctactgagtatggcctttgctaagtccagaaaggacaagcgctgatgtccctgtgtgttcatatccttctcccaccccgtgaaatccgtatcatctctattaatgttcatatccttctcccaccccgtgaaatccgtatcgtctctattaatgttcatatccttctcccaccctgtgaaatccatatcgtctctattaatgttcatatcctcccaccccatgaaatccgtatcgtctctattaattaattgatagattgattcagtaagaactattgggctctaactattttatagacaccatggcagtaactgagataaacccactcttgccctcctggagtctattttcttttaagggaggagcaagttcttaagtaatcacaatgcagttggcgagagctgggccagggagagtccagggagctgggagaatgttgcaggggtgccccgcccggtcaggaattagggagccctcttggaggaagcaaggtgcaacttggtacctgaaaaatgagtggactctagtcagactgggggggagggaaggtttttctgcagtggcatgttagtgaaggcctggtgggaacaaaccggggtgtgtgggatgtgtgacgaaggggatggaggtgcctggggaggcctgcctggctgtggtggggatgagtctggaggcatctggaggcctgcctggctatggtggggatgagtctggaagcgcctggaggcctgcctggctatggtggggaagagtctggagacgctgtccatgaggctggcttggactccaccctaaaggcaggggactgcctgagggcattgcagctcaggagcaatatgacctttgcattttgtaaagatgatcctggcggctgttggaggagattgcagaggggcagcgaggccagtgaggaggtggaacggggctcaggctggggggcggtggggctgaggcagagtcaggccccttaagagatgtctgggaaggactgagggagacttgggaactgcagggatttaggtacagggtcacgttctggaattccccatatgtggcccaccccatcagcccacagtgcgcctgtggtgggcggtgataggtgtcgttgctgcggttctgtgagggggcgctgcccgcactctgcctcctccaaggctgtgggctgtttggtcttgcaggcttgcacccccgaagtgaggaggaagcctgtggggcagccctcaactgtgggacaggaatgggggtcaatgccacccgccctgtcttcagtgaggaccacactgtggaaccagcgttgtactgttctgtcctgctggcctttgtcaagtggtgtttggatgaatcgtgttgtgcccagtccaaaatcagtgaggcaccatgctggggcccaaggtgccccaggtctagtggtttggaaggaatcacaggactcacgagtggttctgctgggctacggtttactagagaggactttccatggtgtagtgtggagaaaagccttgcaggttacaggaatagcagaaacaccaagaacagcaccaggaacaataggcagaagcaccaagaacagcaccaagaacaataggcagaagcaccaagaacggcaccaagaacaataggcaagagcaccaagaaaagcaccaagagcaataggcaggagcaccaagaacagtaccaggaacaaaaggcagaagcaccaagaacagcaccaggaacaaaaggcagaagcaccaagaacagcaccaggaacaataggcaggagcaccaagaacagcaccaagaacaataggcaggagcaccaagaacagcaccaggaacaataggcaggagcaccaagaacagcacgaagaacaataggcaggagcaccaagaacagcaccaagaactataggcagaagcaccaagaacagcaccaagaacaataggcagaaagcaccaagaatgtggctgcctagggctgggtgcaaggcaggctgggagggggctggggagttgagggcatgggaaggaacaaggggaaagcacctttgtgccttgtaaggaagttttggcttcatacagaagaggctgcatgttattggaggattttcatttattttttaaaatttaaattatgtgttttttagaaacagggtctcactttgttgcccaggctggtctctaactcctgggctcaagtgatccttccacctcagccttccaaagccctgggattacaggtgtgtgagccactgcgctggctggaatgattcacttttaattgtaggagagaggagaatgaattggaaggtaaattacttaatgctatggagactccttaggaggcctttgaggcaagagatggccaggcggccggggcgtggggagaagcccagagaggcttctgtgaggtgcaatcaccagcgtgtctgtggatatcatggtaggtggggagggggacagtgaaaaggggctcagccttagagtatcaagtatgaaatgtttgtgtgatagaggttacaacgtccagaaagactggactatgaaggtggaactcttggaaaaagtgtggaaacgtatttaggaatcattcctgactacagccatggctgtggagagacgaccagacagaggatgaagcgtgggaggtgtcgatagtgaaaatttggtagacgctggtatttcagtggcacgtgggtgaaaacaagccaaggaaaggaatcaggagaggaggatggagagtagggaaacaggaaggaactgggaagagggattgcagaggccgatggggaagccttgagcatgtaacagatgatgtagaaaggcgagcatggaatgaggtggaaaaagcccctgggactcgcctcccattgggagcagtgggtgatgcagccaaattgagtgagaagggaaactggtctgtaaagttcttcctgatgttgagatgctggattttaaaaattacattcgcacggctgggcatggtggctcacgcttgtaatcccagcactttgggaggctgaggcgggctgatcacctgaggttgggagtttgagactagcctgaccaacatggagaaaccccatctctactgaaaataaaaaaattagccaggcatggtggcacgtgcctgtaatcccagctactcgggagactgaggcaggagaatcacttgaacccaggaggcagaggttgcggtgagcagagaacatgccattgcactccagcctgggcaacaagagggaaacactgcctcaaaaaaaaaaaaaaaatacactcactgagagggaaacaccagctggtgcacgcggccgctttgtgtgcccggggctgcccctttctctccgcatcccagttctcctcgccatagtgcaaccttgttctgcctgctgttttcggatcatcgtctttgtcatcgtaaatgttcggcacaaattaggcaagaaacagtactgtggagataaaataagagtggtcacggaatcctcttcttcagatgattttctttcctctggctctgcagaggcctcatgatgatgcccctgagagagcgggtccaggagcagcaaaccacacacgtgccagtgactttgaggcaggcggatggtgacagttctggaagtcagccatggctgttacatctgcgagatgttttcctgttaaccaaatggatggggcaggttcatcctcttatgttttattttcataaatatcttccaaatgacctcattagcttaagtaacgaaaaagcaaattccagtaaacagctgcatgcatgttgatggatgatgtgtttggaaagtaggtatccttcttttgtttctctttgacgcacccgtgagcactgaggaagaggtggggttgctgcacacatggatcctttttgccagtgggaggcatcgccatcacctggggtgcagggatgtgtcgtgtctcacagggacaccctaagtggacacagctgagatccttctctttcatggaccacagaggtttaattgcatcacaaacatctgaggaacacccctgccaggcccatgcttgttcagggactgggcagcccacgtcattctgaggaatgccctttgctgccatcctggggtcatctccatgcagctgtgcattctccgtcactccctctctccagccgctccccttcgtggccatccctcctcattgataaacgaggagaatgtactgctgtgttttcaggggctctccacaaacagccagaggtataccaggtatacctgtgatgaggtaagaccatcctcagcagacagaagagaaagattagggccccctgaataatccttctatgtcagtcctggacgaaacagcaagctgttactgattgagggttgtaggcttccatccgcctcatttgatgcccgtggtgttgatgcagagtgctgggtgctttagagctaagacagacctgtgcagtcatcgtgcgttgataaagcctgtagtgagagggcttcaaaatcacaccctttgaaatatcaacttagtgtatcagtggcttttactgagctttgaataacccataacttgtataatttttcataatgggttaaaaagatgttaacatgttccttgaagaaaatgtgaaacacagataagcagaaaaggaagatcaaaggccaaaacattcccgctgcccggcacaaatgaccactggtaagtttcggggctgccttttctatcttccacatttacatcttgttttttaaaacttaatgtagcataaacctatttctgtgttaagaagtattaacctatagcattttgatggcttcatatattctaccatgtggctatttctctctctgtctataataaactatttttcaggacagttttagatttactaaaataactgaaggtagaacagagagttctcatatcttcacatccagtttcccaattaacttcctacattagtacacagtttgtcataattaaggaaccaatgactgttatgtgactgttaactaaattccctactttatttagatttccttagttttcacctaatgaagtttctctgtcccaggatctcatccaggattctaccatacatttcgtggtcgtgtctcctggggtcctcttggctatcacattttctcagactttccttggctttgaggaccctgacagttttgaggaggcctggtcagtctgtagaatgtcccctggcctggatttgtctgatgtgtttgagttctggggaggaagattggggtgaagtgccttctcatcacatcagatcaaagccacacactcagtgtgcgccatcatggtggataccaactgtgctcagtggcttggtggggagggttgcggcttctccccctcaccccgcttccctctttccctgctgcactctctgagggaaggcacagtgtaaacccacactcgtgagtgacgcgtcatgctctgcttccttgaaggcagaggatagacagaaattgtttggaattctgcacaggagatttgtctctttcttcccatttatttattcaacactttatgttatattttgggctataacataacacttttcattttgtttgctcacattgttccagcttcggctgccggcagcccgttccgtggcctcacacaaactgtccctttgaatacgtccatctttatggctttttgaaaacacttccttcctttctgacactacaagaggctttaggctcatcttgtgtatttcctgtctcagtcttagaattagccatttctccaagcagtcccagtcccttctatctgagaatggttttggaaatcaagtgctgggcgtggtgtgtgctcattactgcggggatgtccttgcctgtaggacatgtcagctgacggagcgagaagatgtgtgtgtgtgtgtgtgactatgcatgtgtgtgagtgtgtgcatgtgggtgtgactgtgagatctaggaatatacacatatttataaatatttctgttaccatctgtatctataccaagctaaccatgagctcttattcacgtctccaactccaggctcttaccatgtggattattccagacgctgcctcctgcttacctgtaacctccactccaatagggagaacttcctcctgccacctgccagctgttaacctcattgttcactttgcatgcatgtgtggtagagtcagaattgctagctggtacctcttgggaaacaagtttatcagctagagcacagtgcttatagacaggatcttttcctttcagttttacaggctctgctcgtttccagagctatgtaggtcagcactttttctcctgccccgttggtgtcagtggcttcacacatctgtgatgctgcaggattctgtcatcaccgtctgcatggcattctgtcccgggatctgaagcatccttgattttttttgttaaacttgcataaattaaggctcctctttgtgctgtgaagttcagtgggctttgataaatgcatgtcatttatccacagttacagtaacatagaaatagcctcactgccctaaaaaaatcatctatttcacatactcacatctcccttcctctcccggaatccttgacaaccactgatcttttaaatgtctctatagttttgccttttccaggattttcagactggctgctttcacttagcaatgtgcatgtgggaaccctggctctttccggcctctgtgagaacaacccgtttgtacccaaggagctgtgagcatgctgcctcccaccgtgtcttgcactggtgcccaggggtgtgcggggacatgacgcttagccggaaacatgggtgaagctgatgtgtgcgattgtgtgagaggcaaagctgtgcggccagggttgcctggagaagtttccattttccaagcaaggcacagagcatgtctacagagacaggtatgggagggatggcaccagcctgtgtggatggcctcctttttcgtgttgggacccttgttctttgttctacaagatgtggatggtttaggagaactaggaggaaaaagcccctctgtgagccgtgggttctcccttccaagttctgcacaggttgatgtgatgtgcacgttcgcatttccatagtctctgtccgatccacttaataacatcacaaaccacactgctctttaggtcttggcccaggacccaggatagggggtaaaacttgaagtgcaaatagcattgcgtagccatcctgaccacaccagcgcatccagctgcctctcgacattttgaggtgaggagggaaaggaaaaggtaagagcatgaagggtagacacggaggaggtttcactgccatcttatctcagaggtgcagggtcaaaggtgccagaaaatttcatctggcatttcttgccgtcaactcctgaccaactgttttcaatattttaacttgagaaaaacaaattcaaatcacctattgatgatagttctattactcaaggaaggttctttgccaaccccatgtgacctcacatgggtggcaggaatcccctgtgggaggctgggaaggtacattccttgggcctcctcgacgacagccctcccactgctgggaactcgacacatgtcgtttcccagcaagcggccctgagaagaatgtgatcctgcaaaacgccctcagtgtcctgtcggcttattctttacattcacatccgacctgtcggcttattctttacattcacatccgacctactcatagttttctctttctcttcttttcctcagtttttaaagaacatggctgtttctcttacatggaattacagtattttttatcaaataggagaatttctgatatctgtgaattattttgtgattacaatatgaaaataaaagagaacagggttaggaatagaagagggagttcaaaaggatgcaaagaagggtagaatctttttaagaaatgaaatcttggaaaagataaaaactgaagagagtgagatggtcttagcctggactctgggtgagagagagagagagagagagagagagagagagagtaaacacacacacttagtgtgaatgaggtttttgtggggtgcgaatttgagaaagcgtcattaattcactcatttctttagcagctgtctatgagcacctggtgtgggtgccgtgggctgagttggtgaaatgtttcctcggagcaccctgggcttctaagttgttctgtcattggggctcccccagaacccaagagggagaagccgaggatgccaagttgtaacattgaaactatgttaaatattccctgatagaaccgggcccagctaaatgtgtccccgcacaccaggaaacaggtttaggggtgtggccttgaaatctggaaagtacaggctctgaggtgtctctctcagggtgtctccactgatccaagatctgcgaacactgtctccttagcagctctggggaatgggcagcttggttgtgtgtgcctgttcttctctgccgagagaatggctttttaaggcttgacttgtgtctcgtcctctatcttcgtgctcccctcatagcctggcctcaagtgtacatttgagggccatgaacatccttgagttggtgcttgccgggtggaatgactatctaagatgcaccaaatcacttacagccctctcggccatggaacagagcactgcaagtcaccatcctctgtgtgcatgccagccctccactgccactctgcccgtgtggcctcaggcctgggcaaaggacaggccctgctcccctgggccacctgcctgtgggcgctgacagacgtgtggtctcttctgctagtgtgttgtcagtagagcccatgacagagatggaaatgaggctgggggatcccggaacaaagcagatgggctttggggtgactacgcatctgtgctattctgattttggctgctaagctctggttctgtgtcaccttgatctttaacttgggtttctagaaagaagagatgaggactggacaccaagtcccagtgtggcctgaatggcagacttgatgccaggatgctgagctctttcctgcagggtgggtgcatggcttggagaggcctttagatgtgctgcctgagacagccccgctggccctgactgcagggtggaggggtctccggctccagccccgattgcacgttagggatcagggagcactattcattcttccgatgctgtgactgacgggccggcaaggaaaggaagtggatggtgcatttgctgccgcctttgagcaaggaccctgtgagctgcagcctgtccactggtcccgcctgctgggtggaggctgcgtggaggctgtgtgtggcgcctctctcttcaacagaagctcatccttctgctctctctctccctctcccctcccagtccccatcttcttcctccccttcttatctttagaaaccacccacctccacccgcatcagcttccacctctgaagagatcttgcaatccgaccccttgtgagctcagcttcctgcgtgctgaggccccctcctgagcatcccacgttgccctgacacccacaggagcagagccacttccgcacctgctccgagcgtcccacgttgccccgacacccacaggagcggagccacttccgcacctgctccgagcgtcccacgttgccccgacacccacaggagcagagccacttccgcacctgctccgagcgtcccacgttgccccgacacccacaggagcagagccacttccgcacctgctccgagcgtcccacgttgccccgacacccacaggagcagagccacttccgcacctgctccgagcgtcccacgttgccccgacacccacaggagcggagccacttccgcacctgctccgagcgtcccacgttgccccgacacccacaggagcggagccacttccgcacctgctcctctccagctccccacaggctgccttcaccacacccctggagctgggtagctcctgtgttctttcagttgctgagtcacggccacaccctcgtcctgaccctgacttcccctgttcctcctctgtcatcctggccctgatgatccatgcatcctcctcactcctgactctccttgttctaatcagcttggacaggtgccacatacaccttctcagatgtcccctcactgctcagcagcctgtggaagcccccgctgactggttcaattcatagtcctgccgaccatcgaaagctttcggatgaccacagtgtcatctcctgccccctgcccagcgtggggctgtcccctggacggtcctcactgacctccatgcctgtggtctcctgccgcctgcccacctgccttctgcccaccgtggggctgtcccttggatggtcctcactgacctccgtgtatgtgatttcctgcccagagcagggctgtcccctggatgttcctcactgaccttcgtaacactgtagcgctgtcccctggacggtcctcactgacctctgtgtatgcaatttcctgcctagcacggggctgttccccggatggtcctcactgacctccatgtgtgtgatttcctgcccagcgcagggctgtcccctggatggtcctcactgatcttcatgtgtgcagtctcctgcacactgcagcgctatcccctgggcagtcctcactgacctccgtgcatgcggtctcctgtccactgcctgttgcagaggctgttccctggatggtcctcactgacctctgtgtgtgcaatttcctgcctagcatggggctgtcccctggatattcctcactcaccttcatgtgtgtgatttcccgcccagcgcagggctgtcccctggatgttcctcactgaccttcatgtgtgtgatttcctgcccagagcagggctgtcccctggatgttcctcactgaccttcgtgtgtgcaatttcctgcctagcacggggctgtcccctggatattcctcactcaccttcatgtgtgtgatttcccgcccagcgcagggctgtcccctggatgttcctcactgaccttcatgtgtgtgatttcctgcccagcacagggctgtcccctggatggtcctcactgacctctgtttgtgcaatttcctgcctagtgcggggctgtcccctggatggtcctcactgacctccatgtgtgtgatttcctgcccagcgcagggctatcccctggatggtcctcactgaccttcttgtgtgcagtctcctgcacactgcagcgctatcccctggacagtcctcactgacctctctgtgtgcaatttcctgcctagtgcagggctgtcccctggacggtcctcactgacatccatgtgtgcagtccttgccccacatccaagccctgggtcctgagagatcctcatggatgcctgttctgacccatagcttacccacccctctccctgcctctccacccttcaaacctagctcagagcccattccccccagtaacctcctgatgttcctcagctgaccatgctggggcctctctagtcaggttggaatccctggtattggccagccatcaaaccaccccgaaccagagcggtgtccttcatgattggttgtggctgctccgggctgggctggccctagtgtctctgcccatgcacctgccatcctgctcttgcaaccatcgggctggcccaggtgtgtccttcctatggcgatggcggaggggcgggggagtgaggagacacccaggccttcggaggcccccggcatccgccttgtcatgtcacagctagccagtggccaagcctgggtggaggtggggttgggggaggatcggggcccttcctgccagtagccacactcctccgtggctgtcaccatcatcacaccactgccttggtggccaaaagtccactgttcatggggctcctgtagaccccgggcctgtagggctcccattcaaggagaagacggatgttaagcaaaataaatgaagtgtgggtattagatgcagtaggtgctaggcgggaggtggcctgggtgggttcctctcccgtgtgcttggctcaggaagcctctgaagtgctttgctctgcacaattgccaccacacctgtgtggccggtgtcacttagtcattctactgaaggaggacaaagctgggctcaaactcaggttcaatcctcagcctcactgtggagcccgcagccttggccatgttcttcatgattgctgccagtggcagccccacctgagtctggcacctccggggagaggggacttccttgtgtgtgtctcactttcctgtgttctcctaatggcccgcctgttccactggggttgtccgacgccgaagcctcccatggagcctctgctttctctgtgcttccccacagaactcgccctctcccagctgcacagtgtctcagcaccggccttgtgtgccctgtaccagagcacgtcccaagccctctggaaattccagctctttgccctcctcaccctctgcagccctgaggtggcccctcggccatcacatgtgaggacgcgcggtgggctctgtgcttcctgctgtacccggtgcagcgtctgacccactgtagctgccaggtggtactcagtgtgttgttaacagccaccacttgggattactggatgcctgcttatggcaggcactatttgggctcatgttatttagcaccacattgaaccccttaaggacgcagggcatggtgatggcatacacgtgtacggtggaagaatcagggttccaggagtgaggcgcgtgctcaggtcaccccacccccctcccaccccggctcctccgttccctcctacttcacactccttttcttcctcttcctctccccattccctcttctcactgtccagggcagaatgaagtcctctaaaccaaaaggcagaggcagaaatacatgctttcaaattaaatgtgcctttgtgttacagctcaggattttaaaactattgttatttaaccttaggagcctgttgacagccctgcattaatttttctctggtagtgaacgggggacttggacaccacacaggtgttccattgtgcatgattagatgtcacctttgtagagaaggaatggcctgggaaccagccaacagagagaattctgcacgctcatggagcacacacagctgcacatggaacgaaaagcttttactccgtcttggtggttctggaggtggcagcaaatcgcatcagcaggtcccaaagcatggccttgcctggaggcttcattttgccagaagtgtcccatgggtttatattattttatttcatttatgcatttttttgactaacagtggttcagacttatgcctcagtgatatagtgggaaaaaagaggcaggtccctgagtgatttatgatgcgatgataatcctacctgcatcagagttcatgttttaacttttgttagagccttggattttcccggcaaccctatagggtgaggaggggaacatagtttgcattttaacaaattaagaagctgaggtttcaaggttcactcatattctgttggtgacagggcaatttggcaagatattttgaaagtcttacatatatacctttaaaatatctagaattctttttatgggaatgtatcctaagaggaaaaaatcagagatctctccaaggacttacaatcaagattgcgtattgcagtattatttttaatgggaaatattggaaacaatgtaaagtttcttcaagagggaattggttagctagatgatgtgcatgtgtagaaatagttattaagcagtgattaaaattcatgatgagaaatactaaggacagggaattgttcacaatgtgttataagtaaaaagtgcaggttataaagttgtgtgtacacaacagcagagacatggaaccaacctaaatgcccatcagtgagggactggataaagaaagtgtggtacatacgtacacaccatggactactatgcagccgtagaaaagagtgagatcatgtcctttgcagggacatggatggagcgggaagctgttatcctcggcaaactaacacaggaacagaaaaccaaacactgcatgttctcacttataagtgggagctgaatgacgggagcacatggacacatggggggggaacgacacagactgggcacctgttgtgggggtgggcagggagagcacaggaataattgctaatggacgctggcctaaatacccaggtgaggggatgctctgtgcaggaaaccaccatggcacacacttacctatgtgacaaacctgcacatcctggacatggaccccaggatgtataagttggacaaaaattaaaggtgtgtgtacagtatgaccccaggtctttcatatatgcaaagaaaagtagctgaaaaccaaaatattaacaaggaatttatctctaggtaatgagttaactggtattgtattattctttgagattttctgcattttcttaattttctaggcttttatgatataaaacaattcccaataattttttttccatttttttttttttgagacagtctcactcttgtcccccaggctggagtgtggctcactgcaacctccgactcccgggttcaagcgattctcctgccttggccccccaagtagctgggattataggcacacaccaccacgcctggctaatttttgtatttttagtagagacagggtttctccacgttggccaggctggtctacaactcctgccctcaaatgatctgcctgcctcggcctcccaaagtgctgggattacaggcgtgagccaccgtggctggccagttcccaataatgtttcaagtgaacaggtgcagacagagtgagtgatttgtccatggtaacatgactaatatctgtaactttttgttcgtaaccaggagctctttccattctctcagtagaatcatcagtgttcggtactgttacttccaagtcctccattcttgtggtgccggctctgcctcttcagagatgtgcaatgaacggatgcttccagtttgggaaacctggtggggagacaggccgggggaggaaggggtgccatccttccatccacctcttctgctttcttttttcctacttgtttcagtgagtcagatgaagacatcaaggacctgttgattaaacctgcacatggtacacagctgtgagggtagagagaagctggtattgtgacattagagtccagaaaggtttagactgggtatctgagtcaaatgtgagtttggaattacacatggatgagaagagagtcccatcctggagtcaaggggccagtggtgaaagtcatatggacacagtggctgatggacacagtagttgatggacacagtggctgatggacacagtagttgatggacacagtggcttatggacacagtggctgatggacacagtagttgatggacacagtggctgatggacacagtagttgatggacacagtggctgatggacacagtagttgatggacacagtagttgatggacacagtggctgatggacacagtggctgatggacacagtggctgatggacacagtagttgatggacacagtggctgatggacacagtagttgatggacacagtggctgatggacacagtggctgatggacacagtagttgatggacacagtggctgatggacacagtggctgatggacacagtagttgatggacacagtagttgatggacacagtggctgatggacacagtagttgatggacacagtggctgggggtgagggaaaagtggctcagcgtgaatttgacaagaaaagaatctattttctattgtaaaatcaggctgtggaatcaacagcgtggtgtgtggtgacgtccaggtttgggtgtgtccacctagcctcgctgtgtgaactgggggatgtgagaccacttgacacagccttttccgtgctccaggggactcggcaagtgcagccgggaggaaggcgtcccgaggagcaggggtggggctggtggccatggacccctgaggggtggctgtgtccagggctggtccagatgtgatggtgctgtgtggttgtgacagtgttctggtgggcacctgtcttgtttcctgcccatttctccaagtcagttttctaaccttcttttgatcttgtgaagaacctgatctccttctaataaatcaagagttggctaagtttttttgtaaaaattgtttcctttcaggccagtctctgtcacaactattgaattattataggacaaaagtggccataggcaatctgtaagcaagtgggcgtggctgtgtttccataaaactttattaatacagaaacatatggcagtggcagaccatggtttgcctaccccagagcaagccagttcttcttgtgcttgaagctgctgagatcaatttctctcacttttctcccggccctgggatggaatcaagctctagggagaggagcagagagtcggaacgaggagaggatggtgcgttttactccgtgacggctttatcactcctgaggctttgtgttcagtgctgacactcgcctcaccttaaggcagttcggacatcgcaggcatccgcagagctaggaggatggtgacgcggttagaagccacgatgtgagctgggcgcggtgctggtggctcaggctgtctcactttcaggggtagaacttgactctatgacactaagtagatcgataatgaaagctccaggcgggtcaacatatcctcaataaataaaacttcaaaaaatccagggctgccgaaacacgcgttggcctccttggtgacttttctgcctggctacacagaaaaggccgctgtgacagcgcctttggtggtctctgactccaacacagggtggccggggctctggcactgcccctccctctgctgtgctgtctggaggcaggaggtccccccctgcgactgctgacagagctgtcttcttggatctgcctcccagactggggacagggttggaagattcacaagaaggcagcctcagcctcagcctggcgttgtgtcggggatgggaacagggcttcccagcagaaggcaggctgttctcccgttcaggattggcccattgatcacgtcctgggtgcaggaatgcgagcactggggcctcctgaactggggcgctccatctgctgaaatcggggggtacagaggctctgagacccttggagtccctgggcagtgctctgtttgcttggctgtagccccgggcggggagagggtctgaggataacttaaaacacaagagatgataaaactcatctttccttccaggaaggagtgatgatttcccctctgcggctccgcaagtgggttgttgctgctttgcctgggaaggcacgaaaatgtcatagttaaaaaagctttaacataatgaaaatagaaaagcaccagacttcataaagctgataacattcccattaccggaagggcgccctgagtgctccgagcctcacacatttggactccgagcgggaggcgggaagccgcagagcccagctcccagcggacgtggcccggagcctgtcacaccctcgcgtgtgcaagccgcttgcctgacccgccgcgtgaggagcgcggcccagcagcaccggccttgcctgggaactggttagatatgcaggttctctggcctgctccggacgcattaggtcagaaactcggggactgggccccgcagctttgttctaacaggccctgcaggggcttaagagcgaaaaccgttgggctggatggcgtttaacagccctggtcacgtctttcaacttcagttctgttgtctggtttgctgcgccccagtgagaggcagcgggtggacgtttttgtggctggggcgtttggcagcgtctgcaggatccttcctgggaagccagcgtggccctttggaatagtgaaggttcggagttccacagagaagagtgtgtgaaacttcaactcacatttttcaaatgtttttgagcccaagcctggttttgttaacgacccacagcacctgtgccctccagagctgccaccagctgagacttgctaattccctgggggacttttacagagttttaagtagtttttcttctttgttctgtgtcaattaacctgtatctacagtggacggtagtaattcccagcacactggaaatgtagcgagctcaagaggaagataaaaagaaattatttttcaaattcacctcagactatcctcctaaagtgtcagtcccatcctctgataaggtctcacgtggcatatccagttgcctgtagcaaatatcagggttaaaaggggaaactgtagtaacaattggatctaatttgtcttttcattattgtaagtgcagattcctctcacccacaatgcgagtggtgtttgtggacaggtgtctaaaggagcagaaggcaatattctttcctatctcatcacttaaaaataaagttttcaaaataaaccttttttttttttttttttagctcaagtgtaagagttctaatcatcagggccaggaagcagtttttgtcttttaaatcttaattaaattacaatgtatatttaaatatacatccagtcttaaaactgaacctaatacatttgtaaaaattagttgatgtatgattttccccacataattaatttaaaattatacacacacacacacacatacacacactggagggtgtgtgtatatatatatatacacacacacacacacacacacatacacacatatatttgagatggagtcttgctccgtcacccaggctggagtgcagtggcacattcttggctcactgaaacctccacctcccaggttcaagtgattctcctgcttcagcctcccaagtagctgggattataggcatgcaccaccatgcccagctaattttgtattttttagtagagactaaacaccatgttggccaagctggtcttgaactcctgacctctaggcctcccagtgtgttgggattatagacgtgagccactgggcctggcctaaaataatttgtataaggccaatcatttgttatccgggtgatgaagaatttggatccagaaaacaaattgtaaagagtttgttaaatttacttttaacaatttttataatgtgctgacccaagttttcaatttacggatgatttctacatgtgatgcccttgcttctcagtgtggtgggcagcccagcggacgagtcaccagggagtgctttggaaatgctgaatctttggctccgtcccaggcccagggaatagaaatactcatttaacagggcccagctggttcacatgcacatcaaagtgtgggagaggctgtttccatgatgatgatgatgatgataatgatgatataactcacatttcctaagggggtcttgagatgataaggtctttttgttagagggctttggtgctttaacaatgactgagaaactatgaactggatttttcctctttcatcagagactacaactaagtcagcccagtactgctaaaaagcttgtttaccttttaaattatgtgtctgaagtaccacatgtctaaagttcacgtttacagcagggtaggctgtgtggttcacgtgtgccatgtctcagcaatcctgagcaatacatctacctttcttcactttattctcacttttggtactgttctttcatgggtcatactatattttaatccagcacatgagagttaccggttgaagttctctgagattagcttaaccatttcatccccggcatagcctggctacctgcacctgcagtatttaatgttcaaggattttcatcagatactttttcaaagcttgtctttaactttttatctgtgaaagcaaggttagaaatgttttcttagtcccgaagaatgactcagcaaacatccttcttttgaaggtattatcccatttcaggaaatcgaggacaaaaaaccagagccgattaaaaaccaagagctgattaaaaccacgtgccatttagaataaatatagttgaggttgctgctcttaatgtcttcaaacgaatgaaggaggaatgtgtagcatggagagcgcggttcccaaaaagtaactcctggactttaaaaataaaacaaacaattctggtaggtatcctgaatttggtacaatttcttactcttaagagagtttaaataaatctgtgcaattaggaacctgaaataaggaaattaatcaaagtaagaggttttgtttttcctaaaaataaatgacaggacttgatggttgtcctggtacccagctcgctgcccttcttccagggtggagtgagctggttctttttctgtgggaagctgattttgtgaacaggaggatctgaaatcaggaactgccttagaattgtggccccagcttcaaacaagaactgactttacagaagccaaagacgtgaggaggaccttggccatttcagcctctgctgagcacacacatcaccgttgtgatggagcggactgaccaggcgtatggggtggaggtgaattggaggggcctgagccccaaggatccacctttgcagtaaggcacggtcactcatccatgtttgtgtgtgccctcccagctcctgctcatgtgtgacatctgtgcccggcagaacaggcccagcatggaaggagtgtgagcctcaggcccctcctcccagcacaggggacggacaggtgtccccgcaggaacagggcccagaggctgtgcagggggcaggccctcatgcctgcaggagaaaccttggcctgaacttgccagcggtcagctcccatcgttcatggcaattgagtgtgcagcggcgcagagaacatgccacttaataactgttttggggtcctgccttgtaggtctaagatccaggccaccgtgcagtcctcaggatggggcacccatcttcctgctctctgaggcattgaggctgaagtttccagaatcttctgggtgattatccctcctcctgctaccaatttggctgtggaccctcctctgcgaggaatgcagccatgtgtgtcaacctccagaaatgccctgcgctgagagtgtggccaaggcaaggaagggacgggtccccaaaacgctgggctggggctgtgattgaaagcctcagaattggggaggacttactggggggctccatactctggatcggcaggtgaaggggactgagcaacacccacccctacgtgcagtgggcagggtggggctgggtcacctggccaaggtggggctgcatgtcacccaacggagccccttgcttggcagcccagggaagggggaggggcgcagggaacaaggaaggggcacagggaagggggaaggggtacagggaagggggagggggctcagggaaggggagggggcgcagggaaggaggagagggagcagggaagggggagggggcgcagggaaggggagggggcgcagggaagggagagggggtgcagggaaggggagggggcacaaggaagggggagagggcgcagggaagggggagagggcgcagggaagggggagggggcgcagggaagggggagggggcgcagggaagggagaggctgcagagaaggggagggggtgcagggaagggggatgcttcagggaagggggaggcctgcaggaaagggggagggggcacagggaaggggagggggtgcagggaagagcaaggggtgcagggaaggggaggggaggctgcagggaagggggagggggcgtggggaaggggagcagggaaggggaggggggcacagggaaggtggagggggtgcaaggaaggggaggggaggctgcagggaagggggaggggtgcagggaagggggaagggggaaggggagcagggaaggggagggcggctcagggaaggtggagggggcgcagggaaggggaggggcgcagggaagggggatgctgcagggaagggggaggcctgcagggaaggggagggggcgcagggaagaggaaggggtgcagggaaggggaggggaggctgcagggaaggtggggcgcagggaagggggaaggggagcagggaaggggagggcggctcagggaaggtggagggggcgcagggaagggggaggctgcagggaaggggagggggctcagaaggggggcgcagggaagggggaaggggcgtggggaaggggcgcagggaagggggcacagggaaggggaggggccacaggaaagggggacgctgcagggaagggagagggggcacagggaaggggagggggtgcagggaagatgaaggggtgcagggaaggggagggaaggctgaagggaagggggaggctgcagggaagggggacactgcaggggttgtccccagactgggactgggctttcagggaagcagtcagtccctctcatgtggaggtgggctggcttccgtccaggccgctgccaggtcccttggtcataggctctcagcagaggggctgagcgctgtctcctgctgccccctgctgccccccaagccctgtccgcaagccacagtcagggatgggcaatcaggcctggcaggagctgccagggctgcctccctcttgtcagagacagatctgggaggagccttcctcctccctctctccctcttccttttgtctttgaaattgcaatcacagctttcatttgagccttgggccacagaagccagatgccctgaccgcagggctgcctgagatgagggtctgggggtctctgtcctcccacgcccagcctggcagaggcagccccgcctccgggctgaggcgctttaatctctcacttttcaggctgattcctagaataggggttcttaatgtggaaatggctttctattcctgcctggatgccgccctggtttaacacgttgttttcgatccgatggaaacatttagaaaacctcagtggggtgtggggactccttggtcccaagggtctgtgctgccaggaggggatgctgagattggggggtagctatggcccaggcaatgcccacctgccagcaggcaggcgcttcactcttaccccccctgcagtgggcagggcgcatcctcatttacatctgagaatgcaagggagaagggaggctttgccaggtgcatggctttgtgtttgctgcagaggaggtggggttggagcctgggcaccctgctctctctccagaatgttaaaaatgaggatgatgtttaaaaagagcatctcttcaaacactgcaccttccttttctatgatgatgcgttcgttcctaggaaaaaatgtgatttaacataaccccagagcctcaggctgtcgtaagccctagcgttttctgcagggagaggtgggaaacatggctttgacaggaatcacatctgggatgggctctggcattgaaacccacggtggtgagactgccactgctgcaggtgacatctgtcatcaaaggacctgctccaggcagtagggactggggttcctggggtgctggcatggttttttttaaggctgtagagggggacaggacaaagacacagagtgactgacagtaacagggtcggattgggcgtggagtctgtgagctctgaagagcgggggaggctggcggggccagggaggaaaaggctgggtatagattacttcactctgcttcgttatattttttagatgaggaaatctgtgtgtgttccttgtaccaagtgagtggtgctgacacaggtgaagcccccgcatccccttctcaggggctgtcccagttcaggttcagcaacttccccaacagacctgcatctccatgtttgcacagccacggggtcctggcgttcccgttgctgtgtgtgttggtgctgtctgggaagatgctttcctgtttgcagttggatcccagggccttggtcattccagcctcaaagcagggtcttcagtgagcccctctcaggaagggtgattagtgagtggccagcagctcacaggcttctgaggagtcctgtctgcagcttggaggcaacaggtgccggtgctgagcctgctgtccaggaacctcccctcctccctctttggttcctgctgtgggatgccagctcacatcagctggattttatgggcctcagtggaaagtgtagcacacatttcagaaggcgtgtgcatcctgctgctgatgacagcctttctctgccctcatggcagtcaggcgagaagcctgaacccaggaagggccttccacggtggtggtagagacagggttgggcaggggccatggatttttaggccatgtctgccttggccacagcgacgcccagagatgggaggaagcagagcaggtgcatgtggtacaggatgtgccgagcttcctcccagccagtgagagaggtggtgggctctgttcacatttactgtatttccacaatgaacaacaaactctccataaacatctcttaggagtgattggggtaagagaggcagatccagcctgactccttgcaaaactggatccattttcatcttgagaagggtaagaaaaaaggggcaccacaatggtgacaagatactgcttagagttctgaggacacagtagggaagcagaatcagaacaagatcagcatgcatgagtgtacccatgtacgtgtgcatacgtgcacccatgtacgtgcatgcatatgtgtacgtgtctgcaggtgtatgctcacatgtatgagtgtgtgcatgtgtgtatgcatgcaggtgtgcgtgtatgtgtgcaggcatgagtgtgcctgtgaatgggcatgactgcatgcatgcatgagtgtacccatgtacgtgtgtgcatacgtgtacgtgtctgcaggtgtatgctcacatgtatgagtgtgtgcatgtgtgtatgcatgcaggtgtgcgtgtgtgtatgtgtgcaggcatgagtgtgcctgtgaatgggcatgactgcatgcatgcatgagtgtacccatgtacgtgtgtgcatacgtgtacgtgtctgcaggtgtatgctcacatgtatgagtgtgtgcatgtgtgtatgcatgcaggtgtgcgtgtgtgtatgtgtgcaggcatgagtgtgcctgtgaatgggcatgactgcatgcatgcatgagtgtacccatgtacgtgtgtgcatacgtgtacgtgtctgcaggtgtatgctcacatgtatgagtgtgtgcatgtgtgtatgcatgcaggtgtgcgtgtgtgtatgtgtgcaggcatgagtgtgcctgtgaatgggcatgactgcatgcatgtatgagtgtgcatgtgtgtatgtatatgtgtgcacatgcttgtgggtgcatgtgtgtatatgtgtgcacatgcattcatgactggatgtgcttgtctctgtgctgaagcaggagggataccctgtgaatacagagtgaggaggaacccctgagcaccacagccctgctatagggttcagcagaggagcaatttgagaatttggggaatgtcacatgttttcatgcaaaagggtggataatacattgaagtgaaggaattccagttttaagtgctgggcacacaaggttaagggccccacaggccgctgttggctttccttgtggatttagcttcttggcctcagaatgacatctggaccttagtgtatgcagtctgtgagccgacagggtacacaagtccaggatgccacttgccgccacatggcgggtgtggagcccactcgaggaaggcgtgtgcccgaggcgcctgggctgggttgaaccagtgtctgccagagaaaatgtcttttctctggatgatttatggtcataattactattagtaggtggctgatacttaaaatgaaatttgctctttcgtaattttagaacaaataacttagcagtcaaattagcatatccactggctgggtgaaatatgcataacatttgcagctctggtaatcatgtgaaatgctgctgctgtgtttgcctctcaccaaggagtgctgcaggttttccactgtcacttctcatcagtcctctggagtaacgaatcaggttgggcacatgccagtaacaggtggttttccaaggtcaggatccaagagatcatttgatgcacatctcattcagatcacatctaactgtcagccacgattaaggcagagatgggaagaaaacaggggctttcttcccggtgcctctcctagcagagctccgtcatctgccatttccacgtgacaaacatggagttagaacgtgagctgtgtctgcagcatccctgcatctgccttcccccaaggtctctgttcctccacgctggagatgcaccctagaatcctgagcagagtcctgcagctcctgccagagccgggaccagggacgttccacgacatcggactaacctccagcacatctccggtgtggtcacatccttactgctcccagctccttctctgtgcgcctctgtgtgcctggggcgggaggggccctcacagctgaggctctccctctgggaggcagtgaggggagccttggaggtcactgcgtgaggatctgagaggacctctaacctccatgctgaccttttcaaggtcactgcttttgtggggagtggtgtctgcctctcctcctgctgttcaagtgccaggtgtgtgtctctcagaacgttccctgccacgctcctgtaggccgttcacctcctctgcctggctcagacacttgttgaatgaagaaataatgcagagaatgcagactgaatgtggggttagctgatgggtaaatgggattaagaaatgaaatgctggccaggcgcggtggctcacgcctgtaatcccagcactttgggaggccgaggcaggtggatcacttgaggtcaggagttcgagaccagcctggccaacatggtgaaatcccgtctctactaaaaatacaaaaattagttgggtatgctggcgcacgcctgtagtcccagccacttgggaggctgaggcagggggattgcttgaacctgggaggcagaggtcgcagtgagccaagatcactccattgcactccagcctgggtgataagagcaagactccatcaaaaaaaaaaatctgtttttcatgagattgttatttcaaaacaaaacaaacaaaaactcccccaaaccaaaaacaatctctgcttggattggaggctcccgtcaatgggtggggtgtccacccgcctgtgactgctggcaggcgatggtggtgggcactgggctgggcaggcactggctgggcaggccagggctgcacctaggccacctcctgggaggaagcagatcccagccaggggccgccctgcaactgtggaaggctcgtgaagctgttgtgagacgagcgaggctgcctcctcctgtgaactcccagcgttgggtcctgctaggctctgtgctgccttaggtctggaatgacgtttagttttaaagcctccgcacgtgctggtttaaggcaaccaagggcttcctctgtaagggttttaggccagctccctcatgaggaagtagtgactggaaactttaacgtgaccctgggggtgaatccctcagtaattcataactttctccagattcctcagtttctttgttcacccatttgctcctgggcacctgccctgtgccagacacacagagggcatgggaggaaacagtagagggtggaaacaggcgtgtgcccggctcctgaactccaggagagggaaatacacactcaatccacagtcactgcacagtgtggcgagtcccgaaaaggacgcctgggcagccccgggagagtctggggcttccacagggatcttagcggatgaacaggcgtttgtcggctggtgaagcagcattgaaggcactgtgctttgcaggaatgagtgaaagacactgcgcgttcacaccacacctggcctttgctggcggtgcgactcccgcctagtggccctggggccctcccggttctggtgtccagggtgctcacgccctcgcgggagccgctccctagcggggtggtgctttctggacccatctctctgtgtttaagacaggcgtggacgtggagccgaacgccaacctttgccagcctgctcggccgcgggggatgcgtggcttggggtcgcctggccacccaggcaccgcggagcttctggagccccttcctgggtggggactgaggcgctgcctctgccccgcgtctcctccagggcctggcccagccgcgctggcctttcctgcccgtcttcgtctctgctgcctccgctgcctcctttcctctcccgaccctctcctgcgtctcttgtctgtggccacggacgccacggtttgcttcccacgcagccgggctccccgcggagctcgttacctccctggaagcctccgctccccggcgcccggcagccttgcttccagggacgcggtgcgtgcggtgagcacccggtccaggggaggcgccgggcccaggggaggcctcaaggggaggccccggccccgctgctgctcccgcggccagagagtctcctgtgatgacgccggcttgaccctcagcccagagctgtgggcctggtccaggtgagagctgggctccgggactaggccaggaggcctcgcacgtggccgggtcaggggcgcagcgttctggcttcagaataatcggccccatctcggaaaagccgggtcggaggagcctgcttgaccggcggtttctctgaaattcaccagggggccaggaaggcagcctcgggggcacccccctcctcccctccagctgaccgcgtctcttctctgtttccccgcaggctgcctgctcgaggagggcctctgcggagcgtccgaggcctgtgtgaacggtgagtgtggggtcctggctgctgcgccctggtctgcccctctcctgcccgccgtgcgcagcgcccagcctggtgagccccgccgctggcctggagctggggccgcccggggcgcgctgccgagaggaggcggatggaaccccggagccatgggctgcggcctcggtgggtggggagaagaggttgcccgggttctgggcgcccatcgctcgcaccaacccttgctttctgattttgttttgctctgtccttcggcaagtttttcatccttttttaaaaaatttttttgagacagagtctcgctctgtcgcccaggctggagggcagcggggctatctcctctcactgcaaccttcgcctcctgggctcaagcgattctcctgcctcagcctcctgagtagctgggattacaggcgtgcgccactgcacccggctaattttttgtatttttagtagagacagggtttcaccatgttggccaggctggtctcgaactcctgacttcaggtgatccacccgcctcggcctcccaaactgctgggattacaggcgtgagtcaccgcgcccggccaggtttttcgtcctttaagccactgattttcctctcttatcaggcggataagaaaacagtgcaaacgctgtgttttcaggttgggctgaaagcccatgaggacggcagttattatgaaatacggcgagcagcgggtcctgcagagccccttccctccagcgcggtcaggcagagggcatctcccagggcagacgccacccgggcctgtcatgctggtgaactgggcgctgtgcgctctgaacgcgcaggggagggttaaactccagtatcctcagaaaagcgctgggcggagccgcctttctccaagtcaggggctgcgtgtgggcccggggcgcactgagcgaggccttctctttccccagctccctgcgcatctgtcctcagactgtgggcaggagcggatttaatcctagcgaggatggcggggcctgcccagaggcccctcgcacccactaatctctgcacagacgtgggtgccggcgggggactgaggtgcagggcagggcgctggcctggggtgccgccctcctggggcctttcaggacaggcctcccctgcactggtgcatccagggggagccgaggtgaatgcctctgagggtctgagaagcgaaaccgaggagctcgtgcgccctgaggtgggaccagccctgggttccggatggaattttggggctgggggcacctctgtgtctgtgcctaggcagcttctggggtcgggaagggaagccacggtggaggcgccaagaggagagcaggtcctcagcggcggcagcttctgctgttttctcttctttcgggagattcctgtgccgagtgtgacaagtgggaaccggcagctcgtggggtgcagtgtgggtggtgggtgaggttctggcccagcctaggaccccctggggctccctggcatctactccgtgcagctttaatttggaggcagccttaagaaaaatagcgatattgaaaatcctacgtcgtctgcctggactcaacagcttttgatgataatggaagcaggtgtgtgtgtttaatttaattggagccgtaagtagccccagcagaataaaagccgaggctgtctccccggctccttgacaaaggccggcctgggtgtccgactgtgatcattctcagacatttttctcctcaaccttgacttgcctcccagacatagagtcgtctcaacatcatatccagataatgactgtggattccttggaaaggaaaagcaatttaaatgtaaatacacatattcaggccttgatttgtagaaacagatgatatttgattttttttttttatgatgcactgaaggtctaggaaacagcgaagccagtggtgcccagtcttagaaaactgcgctttgcgaggctgacggggagcgataggagaagtggttcctgtgctggctcagatttatggttgccatggtgactggtttagcccgaggctggcgggccaggggtgcggcagcccagggtgcggtggggggcggctgcgagtctagaacattctgtcaccagccgcagggtctctttctctccctctggctcactctctctctttccccctctcttttcttaaggtacgtgtaggaatatataatcttatcaagcttggatatgttttttaaaagcccaacagaggttattaataaaaagaaagtcaaaagataaacataccacctcacacccattaggatggctagtattaaaaaacccctgaaaatcggtgttggtgagaatgtggagaaattgaacacttgtgcgctgctgatgggaatgtaaaatggcgtcgttgctgagggaaacagtatggtggtttcctaaaaaattaaaaatagagtttttaatttgcctcagcaaccccacttctgggtacgtaccccataacacaggaagcagagacttgaagagctgtttgcacacccatattcatagcagttaatgcacaacagccaaaggcgaaagcagcccagtgtccactgatgggcgaatggacaagtgaaacgtggtccatccacatgatggaatagtacgcagccttgaagaggaagtgagtgctgacactcgctgaaacatggggggagcttgaggctgttatgctgagtgaaataagccagtcacaaaaggacaaatactgaatgattccacgcatgtgacgtactaaagatagtcaagttcatagagacagaaggtagagtgatggggccaggggctgggggacagttggggtgtcagtgtttaattggtggagtttcagtttgggacgatggaagagttctgggaatagacggtggtgatgactgatcaacagtgtgaatgtaattaacaccaccgaactgtacacttaagaatggctaagatggtaaattttaatgtgacgtatattttaccacaatatgcaattggaactatgaaactgcagcctctgcacatgctcatttaacgtaatcgaatgcttcagctgtaagggttttaggccagctccctcaggaggaagtcgtgattggaaactttaaagtgaccctgggggtcaattccttggtaattcataactctggagtaactttggttattatagaaaaaactgtaagggttctggaagagaaagcttaagataaagcaatcacataatcctggaacagcttgtagaaaagagagtttagatgctgttacatgggcatcctaaatatgaggaaaacaggtttcaaagaatttttaaagcggatttgatttcatggttgataactttaaatgggacacatccaaacacaggtggtatgtcctaaacattctaaaggcataataatcaactactccacaatagaaaaaaggaaaacaaatctatgaagattaaaatagatcacgcttatgtcgggaagtgagctggtcgctttcacgccctgctggtgggagcatggcctgacgtgatcgtgatggacgctgactggccagcacgttcacgccacataagggaggtggcccgtgacccggcaatctgatgtgtgagaatatgccccaataaaataatccattacccaaaatactaaagaaaacttgaagcacaaagctgctctctgcagtggtgtttgtattaattttaaaacagtagacaaatcattaatattaaacaaaggagaatgcttctttaaagctatgttatggtcacatgattcaaatgttaagcagacattaaaagagaagtgttcaaaaagttgttaataacgtcggaaaatgcaggtgggagaaagtaaatgaaaaactcaggatccaaaactgagcatctaatacgatgacagccgtgcgaaaatgtggatagcagaaaaagctcaaagaaatacaccacactgtgaatagtggctctctctgggtagtgacttttattttcttcatatttctctggttttccagtttttcacgtgagcatgttcctgctaaaaggacaagagaggtgggaaggaggcacatgaaggaaccaccattccctttgagctcagaaaggaggagaggcctgtgcaggaggggtgcagagaggggtggccgagcaggcggggcgcagagaggggtggccgagcaggaggggcgcagagaggggtggccgagcaggaggggcgcagagaggggtggccgagcaggaggggcgcagagaggggtggccgagcaggaggggcgcagagaggggtggccgagcaggaggggcgcagagaggggtggccgagcaggagaggcgcagaggggtggccgagcaggaggggcgcagagaggggtggccgagcaggaggggcgcagagaggggtggccgagcaggaggggcgcagaggggtggccgagcttctaagagtgcgtcaggacgaccacaccatagcgctggagcccaggggcggaaatcccggacgtccaggagggcaagaggagcaagtcgcgctctccgtttggagggaggtggaagaatggtgactgacaggtgggggaggatggctcagctacacacctgtcggctccgtgtctcgtggctcaaggctgaattatgctgtgacgacccacaagccctgcgctcggtggcccaggtgacacgggcctgcgggccgttgcagggtgtctgccttccctccgcaggtgccctcccgggacgctggcggccggggccacagcaacagcggctgggaggggtgcccttgcgctcgtggctcactccgccggccacgctgatggtggggaggctcctcctgcagccgactccccgtggcggcgtcacagccacagccttcacgtctccaactgcagcttcttctattccaagccctttctccactgaagagggcagaaaaccaccaggaaccgaggacgtctgtgatggtggagtgctgtccggccgtggaaagggaggcaggaagcaccggcacactgacgcggaggaacctgggaatcgccgtgctcagaggaagaaaccgagtcacaaaagtcacgggggacatgatttcatttatacaaaatgtccaggaggccagggcggaggctcaccctgtaatcccagcacttcaggaggccgaggcgggcagatcacttgagatcaggagttcacggccagcctggccaacatggtgaaaccccgtctccactaaaaatacaaaaattagctgggcgtggtggcgcgtgcctgtgatcccagctactctggaggctgaggcaggagaatcgcttgaacctgggaggtggaggttacggtgagccgagttcacaccattgcactccagtctgagcaacagagtgagactctgtctctaaataaataaataagtaaataaataagtaaataagtccaggagaggtaagtcggtagagacagaaagtaggttgtggccgtgtagggctggggaaagtgttgggggcatgggaagtgatggcagaggggcaggttccctttggtggtactgagaggctctgaggtggacggtgaggtggtcacggaactctgaacattcagaaaaccgttgactcttacagttttttgttttttttaagacaagcacttgttctgtcgccaaggttggcgtgcagtggtgcaatcctagcctaacgcagccttgaactcctagtctcaagtaatcctctcacctcagcctccctagtagctgggactacaagcacacaccatcatgcctggctatttaaaaaaaattttttttttgcagtgatggagtctcactatgtttcccaggctagtcttgaactcgtgacctcaagtggtcctcccaccttgacctcccgaagtgctgggattacaggcatgagccattgcgcccggccaactcctatactttaaaaggctgagttatgtggtatatgaattatgtttcaataaagctgttttttaaaagaaagaaaaaagaactgaggatacagttaggcaaggaggtaagcatagtgaaggatatagccagagaattgcatttctttaataaggggttacttccctgaccccagacagatgggctccctcccaggacattcaacccaacacaaaacaagatggttgaaaatgctggctccaccatctgggcacaaagcagaacaataagcttgtccctctcagatttgggagtttttccagcaaacaatcacctcccattgcaacttaggtactaaaagcactagcgttgtccccaaagtggaagactttagaatattcaaatccagagtgtctccctaattctttgaagctatgtgattaaccctatttggattttcggccacagcaagcagcaaaggctatcagtgggaaattatttattgagtgagtggatacaagaataaatgaatcatgctttcatggcacaagagacacccccatagccctcaaataaaagatttatataccatagtggggaaaaagtaatttctcacccctctccaggttcatggctgagacttgtaacaaaagacagattaataagagaaaaccctacccacttatttaataccggttttctatgtcacatgggagccttcagaaatgaagacccaggaaacagggaagcctgtttttatggacagttgtgcagaagtgtgatcggagggcaaagggcgtgctctgatgtcataggctgaagggctcagcaaggcctgtctggagtcttctagctgcttctgtgtcttcggagataaggacattcccctctgggcatagggaggcccctctggaatgagggtcttatgacctgcctccgaggagaaggggctgggggaattctggtttctgtggtctgcttctgccgttttctcgagggccaccctgccatattttgaggtagcgtgttctgaatccagtctatataaacattgcatatcaattcccaaaagtgtgcttcagaaattgcccaagaaaaactagtgaatgggctcatttgtgaatataaaaaaaaccactgatttagcatctacaggcagacctcggagatattgtgggttcaattccagggcactgcaataaagcaaatatgacgataaagtgagtcacacagattttctagttttccagtgcatataaaagttacattttactaggctgtggtctattaagtgtgtaatagcactatgtctaaaaaacaatgtacaggccttcattaaaaatgtttttgctaaaaatgctaatgatcacctgagctttcagcaagttgtaatcttcctgcgggtggagggtcttgccgcagtgttaatggctgctgattgatcagggccgtggttgcttgaagcttggggcaactgtgttaatttcttaaaataagacaaataaaattgactgcatcagttgactcttccttcatgaaagatttctttgcagaacgcaatgctgtttggtagcattttacccgcagtagaacatttttcaaaattaagagtcaatcctttcaacccctgccactgccttatcaaataagttgatgtgatattctgaatcctttgttctgattttcacaatgctcacagcatcttcaccaggagtagattccatctccagaaaccactttctttgctcgtccctaggaagcaactcctcacctgttaaagttttatcatgagattgtggcaatttggtcacatcttcaggcagctctgctaatgctggttcccttgctgttcccaccacatctgcagttccttcctctactgaagtcctgaatccctgaaagtcatgcatgagggttggactcagcctcttccaaactcctgtgaatgttgctattttgacctccctccatgaatcgcaagtgttctcaatggcatctagaacggtgaattttttccaggaggttttcaatttactttacccagatcagtcagaggaatcactatctatggcagctgtcatcttacaaagtgtgtttctaaaatataagtcttggctgggtgcagtggctcatgtctgtaatcccagcactttgggaggccgacgcaggtggatcacaaggtcaggagttcaagaccagcctggccaagatggtgaaaccctgtctctactaaaaatacaaaaattagccgggcatggtggcatgtgcctgtaatcccagctatgcgggaggctgaggcaaggaattgcttgaacctgggaggcggaggttgtagtgagccgagatcgcaccactgcactccagcttgggcgacagagcaagactctacctcaaaatatttgtatatatgtcttgaaatggaaattattttttgatccctgggctgcagaatggacgaggtgtcagcaggcatggaaacaacacccacctccttgtacagctgcatcacagctcttgggtgactggtgcactgctgatgagcagccatattttgaaaggaatcttttttgagcagtaggtctcaatagtgggcttaaaatattcagtaaaccatgctgtaaacagatgtgctgtcatccagctttgttccagtgacagagcacaggcagccatagatttagcatgattcttaagggccctcggatgaacaagcattggctttgacttaaagtcctcagctgcatcagctcctcacaagagagccagcctgtgctttgaagctttgaagtcaggcgctgtcttctctctagctatggaagtcctagatggcatcttcttcaatgtaaggctgtttcatctacattgaaaatctgttgttagagcagccaccttcgtcactgatctcagccagatcttctggagagcttgctgcagcttctccatcagcacttgctgctgcaccttacactgttatgttatggagatgactcctttccttcaacctcatgaaccaacctctgcgagcttcagagttttcttctgcagcttcctcacttctctcagccttcatggaattgaagagtgagggccttgctctggattaggctctggcttaagggaatattgtggctggcttggtctatccagaccactcagactttctcaatatgagcagtaaggctgtttcactttctcgttttctggagtagcacttttaattttctccaagaacttttcctttacattcacaacttggctaactgttttacacgagaggcctcatttttggcctattcttggctttcggcatggcttcctcactaagtttaatcatttctagcttctgatttaaagtgagagaggtgcggctctttctttcacatgaacacttagaggccactgtagggttgctaattagcctaatttcaatattgttgtgtctcagggaatagggaggctggaggagagggagcgagatgggagaatggctggtcagttacgcagtcagaacacacacagcattgatcagttatgctcactgtcttctatgggcacggttcatggtgccccaaaacaatgacagtaacaccaaagatcacggatcacagctcagggatccaacactgtggaaattaccaaaaggtagcacagagacaggcgatgagcacgtgctgctgggaaaatggtgccgatggactcctccatagggttgccacaaggcttcagggtgagacgcaacccccgcgacgtggaacaaagctggaacgtgctcctaggaaggtcgtgctcctcagactctttatttaggtttgatcaagcagtgaattcaatttgtgctgcagaaacagttgccagaccctaccttcttggaatctagaatcccaattgggaaattcctgccaagtagagaaccagtggctcagttgttgcatggtgctgctgtcattacccaaacagcagtcgatctccagagcaggagcccccgctcccacagcagcgaggatgacgcccactgcgccgcagagctggcttgcgcccgccaccccgtagtaccctgtgagctctccgagaatcagccttcgggcactggagggtccgggaatgcaaggctcattctgcccacccccacaggcagcagccaggacctggtctctccgccatgtggcctcagcatttccaggctctctgagtggtttgtgattcacagagcgtagatctctcagttgctacctcatctgtttttcaaacccattgtgcttttccgcagcctcccaggtgtcaaaagttattattctattttttgccagttccataaaacagaacagctctgcgtctcagagttgctgctgcactctgggtgtcccccagatcacagcaggagctggcagacgcagcctgtgattgctaatcatgaaaatggagaggaaaaaaagttctgagctcatccaacggaagcgttcactctgcttcctccagacttcaagaaggctttagtcaggaaagaagagcggaggagagagggagggaggctgtcggcgagtgggtcaccattcgggagctccaggccgcttgcagcaacgtccaggctgttttgtattgagcgctcacagaaagtccaggctgagtacctcctgtgccacgccgccccactcacattgagtaacatgagccccattcacagccttagggtgaggaaattggaattcagaagagttcggtgacttgttctaggccgcagctctcaggcagccactttgcacctcggtctgtctgcatctccggcctctgttctttacctcttctgcccccgaaacactcactcgtgggtcctgtcctgtggcatgtccacagctgagaaacacgggagccactgcccccaacaatgtgggtattgttagatgtgtgtttccccagtgactgtcgcggtgacacgtgttttcatgtcctgtggggccactttcacctctgcttctgtaagttactgctcccatctttgccccattcccactgagttttgtctttttcttggactgtgtaggagctccttgtcattgagaatatgaacgtgtctgccacacaagttgctaattaaacagccactgaattacatctctgtacggcgtgtacacaagtcagagcccacttttataagttgtgtttctcgtctgccccccacagtcatcctgatatgaaaccttcagtggctccctctttcccacagaatcaagtcaaaactgaagggcagccttggggtgtgtggtccttctccatgtgggtccagctcagggatgcgttgaaagcagcttccttatcaggttaattttggcgttattcccactccactttctttcccatgcccttgtcacggctccgcatcccacccgttctttgagacgcagagcgggcctctgcctcctcattcgttaccgacgtgctgagccttcctttcccactcttccccagtggcgtccattgctcaccctacgcacagcaccgaatgccaggagaatgatcaagaccttgtgctttcacgccccttccagtctgcagttttccgagtgtctgtacggcgctgctttccctcctctagccgtccactgcagtgcacctgcaggagtgctggctgatttctggacagtttgggtcctggggaccagacgtagcagtcatgggctgagccttcttcattcaagcagcacctggggccgcggctcccgtgctgtgtgatgacccactcagcccactctctttgccgccgtgcctgtcccacgctccgtggtgactctgcagcatggcctgcctaccaccccttggctcttcccactcggtttcctgccccacaggctctcggtcctgtccctgctccgctgaccagcgctctctccccttctctgtcttcaggtgcctccctctttcctggccaagggtggatgtgtggaggcagagttgtggacaccgcctgtgcttcctgcctgttggggcagcttggtccccatgggggctgaaaagagcaacctggccgtggcttggctgagctttcagttgctttttccagaaaggcagcagggggcctatccacatcccaggccaggctgaaaacctggggtgaggggtgggtgatgctgccttggaaatagacatggatttcttgaacttacaggaagcatacactattggggtgtcaaagagttttttgctttaatagaaaattcagcacattctttaaaatcaaattctcggttgcctctcttgacccacttcggtattattttaatagtggatgatggcagcaaagtctgattttatgaaaagggaagatgttggccattacagtattacccacttttctctttcaggtgtgtcaattaaaatcaattaaaaaatgaattatacgtatatggatatattcaaaatgaacagtttggaactatctagaataaaaagtaaaaattccttttgtgtcccttcaccaaatctcactcccactcggaggtaacagacatttcctgtttgctgtgtgccctgttttctgtgcgtgttaaaatgtcagacaggactgcatgatatgtgcttaatgaagaaaatctagcagccagggccctgaaatggtctaaccatctttgcattattggttagtaatgaaccggaccatctaagatgtcccagccaccttgtgggcagggccccgccccttcatcctctcagaggggctgaggcaacgggaagacccacagctgtgagacacgagaccgcatcactccgtgtgactggcagtctcattgcactcccaaattccaatgaataaaacctaaaaggagatggaaacgaatgactgaattgaactatgtgaagctcagccttatttggtgtattaacagaaaaagtgacgtgatattgagacttcagattagtgacttgaggtgagttaaaatcagttcagctcagtttgggtctcacacacatgtgagctcagatgtatgcatgtgaccccacccaatggctctgaagatgcggttcgctcctcaaactttccagacttttctctcctcagaagtttgctgggaggaaggagaagcgggaggaacagaaccagattgacgttctcgcgtctcttcttacttgggcgtatttatagcatccccgctaaggacgccctcgttttagaggaacatgttttacattttttttccagcctccaggctgcctggcagcctcaggcggagaagcagattgactcggtgtcagggtcacactctcaggccccttggcggcacagacagggtgagggtgcctgctggggcccctctctctcctctccctcccgagcggcgtctgtgctgtgaattttcacggagacacaggctgatccttcgtgcgtccttggctggcagttgttggtgacttacagtcattcatgtgctggcaacggatggccctgctgtcttgtgttgggacagctgtgcgcatcggcgtcattgatatgatttgaatttggtgctatctggtgtggctttgtaactaaagtcataaatagtggagaaacgatgtgtctggttctaaattaacagtgggactgggtgcagtggctcacgcctgtaatcccagcactgtgggaggccaaggcaggcgaattgcttgagctcaggagttcaagaccagcctggcaacatggtgaaaccccttctctacaaaaagtacaaaaatcagccaggtgtggtggcatgtgcctgtggtctcagctactcgggaggctgaggtgggaggatcacttgagcccaggaagaggaggttgcagtgattaagcctttgcactccagcctgggcaacagagccagactctgtctcaaaaacaaaccaacaaacaaatggcgggaggaacacaaatcgtagtaagtatgatatgcaggtttccgagcccagatgtgcagccctggattttcaagtcttccctcaagtcaggactttaaggaaagaactctgggttttgtgtttctgcacaatgaagttctaatatctgactcccaaacttcttccccgtgagactgccttaatgatgcttatgtagactggactggaatccccactaagagaataaattacccgttaaccaagacggtctccaggtgtgtgtgtgccttggcttggaagttcaatttcacagtagttagaatagctgcttgaccccacaggcctgagaggggaggtaggattcaaggaagctggagagtgagcccagcaggggcatgtcctaaaaaccccgagaaggtattggagtgcccggctggggtgtgggtgtcagctgggggtggaggcgggcgtgccctcccgagggtgttttgctgggggttcctctgctgagtgggcccgtccttggtgattgtccctggtgcacggctggcttgttaagcaggggcgaagcgtgcacaaggtcacctttctccagcatcctcatcttcatggtctcgctgggagagtggccgggggtgcctgaatcaagggaactagaacaggtgctgaagctgttcccactcgcaggaggaagagcagcatctggccccagacagggggagctggggagtcctcagggcccttcggggcctccctagacaggggaagccggggagtcctcggggcccttcggggcctccccagaactgtgctcgttggtggcatccacaggctgctcctctgggagcttgttgcttttcgggtcctgagccctcccgcctgccaccgtggcgtcagggaaactggtgcctcccaagcacccccagctcttctgcatgagaaggttggagactgtgctgcagccggggttcttatgatcaccttcctccctcgccagcatctgccctggagctgaacgaggaccaccaggctcctcagggcctgtctccgtggggcaccaggaggcgcaaatgccagtttgcatcattgccctgttttcagctgtccaggatgcccatgtctgcagaacgcagtgtgcacagtcccacagggcaccccgtggcatcacccggcctctctctttgacttctctcccgctgaacagcgagtgcttccccaaagccatgggcagccccactcccgactccctcagtggtcagacggtcacccgcctcttagccgaccttgggaagagggtccctctcagatgggcacccgcctcttagctgaccttgggaaaagggtccctctcagacgggcacccgcctcttagctgaccttgggaagagggtccctctcggaggaggggtgcccacattctgctgggcggttgactctggtggaggtggcccgtagtttgggcgggcacatgggcatgctctgtgcaacctgcagcatttactaagatgctcttgaaagaccgttttcccttttatctgctgggttgactttcccatttatcaaattaactttctaaacccttaaatttcagagatttgagaggataaggaattgtttagtagatgaaactcattttcatatttccagaggcatgtccaaaaactaaatggggttgagcatttctcagggaaaagttgactcggggtgccagttacacgcagtgttttccagaggtcctggggtccaaggccttcccatggctgaatctcccggtttactccgctttttgatgaaggagcaagttttgaatgtggagtcctgtagagttcgctgtgcctcttgggttggcctggcttagctgtggctgatgaccagctgtgaggggacacagtggggccgcacgggggctgggccagtgctgcacccgcccagcgccagggctgacctcatttgcttatagcctgcttttgcttttggtctcctaagcgcgagatcttgatgtctacctagaaatgtcactgacgtaggagaaagggattttttttttgcttttaccatgaagggttgtcatgggcctgtgtgaaagacattaagtaaattagatatcagccccaaggaatgttaatatctgagatttatactggagtagttttcgcttcccaatttattttcttttaaatacttaaaacatttggtttttaagctatttatagccaacctttttttaaaaattaatgtttaaaatgtttttttccccccaatctatcatggttgactgttagacagttggatggctgtgtggttttcaaagctgaggtcaagtttgaatgagctcatttcagatcactctagattttctgaggctgacagtgtccttgggacaccatgtttggggaatgtgtttttgcagtttacgaagcacccgctgctcagagagccgggaaacctttccttctcttttcttggagtctagttgccatggagattgtcactaaattatggacgagggagaggcgagccggcacttggaggtctctgatacgcaggcttctcaatcagggtgcacagacacagcagaggccgtgcagaggctgcagcttgccctcccggctgtcctgggcgtggatgtagcctcccgaaacagctcgtcagaggggtttattcagagaacggaagtgtgcttatggcaggaagagcttcaagggttctcacatatgtttacagctgctctttctccttagcaggactctgagtggctgcagtgtttagagaaatctgccaaatcctgatttaattttggttcatttgctaacaggattggaggagataggaaattgatcttggggaccgtgaagctgctgaggttcagccacgaccaggagtttggagggataatgtctgtgcgtggccataccattttgaaaagcacaaaaccttttatcattaaagcagaaatatcgaaccaaacgtggattctaaagattatgcatacaacaaacacatgtctttcggtgcgtgggtaaaacccataactaatttcaggcctaatctcagtggctcagcagtgcagtgtgggcaaatgcttaaccaccagcatttgcagcatttgggacctgatttgcagccgggttctctagtgtaaggcccccgccccgccgccactgctgcctcccagttactgacgcagtgtcactgaaggtggagttgggaggaaatgtggacggccagctctcgggcccttgcatgcaacggccttgttattttagaggcgccgtctaatcattcttgggacgttggtctgctctgtcttttgaggcagtttccatagaggtggggtctgtgttaagagtgcattgaagggtgagtgatttccctctaactgatgggtgatgttcatggtctgagtctgtgtgcaaagcttagcctggggctgctttggaacctgctctctctattccaggcctgggtgctttgagatattcttgagctggaataacacccagcacctgctcttgtgactgaaatggcgtaaagtaataatagtgcactgcatgggggttaatgcctttctgagtgttttatatgttatcgtgttagatttctgcaccgtcactgacaataacagggcatgtatttttgttctcatttaacagatgacaaacttggtcccttagtgttaaatgtgggtgacacacaggcagaatctgatctggaaccacactgatcgggcgtcttcccatccttcctccaatcagctcacccttcggcttctcaaaggcccacggaatttatggtggttcatcgttctttgccttaagatgcaggttctagatttgctactgggacccacggtgactttgatttgtctcttgtgaactctctatgatgctggcaaaagagaggaaatggtcacgtattggtcagatgaatgttgcagggaagaataattgcattacatgaaatgcctgcaggaaccgtggtgggaatggaaccgtggtggggcaggaaccgtggcgaggccggaaccgtggcggggccggaaccgtggcggggccggaagcatgattggagtcaggtgggccacatttcctggctgtcccatgtcttctctttgccctgacagtggtctcagccgacagaacgggcaacagacacgcacccagcctgagaggggccctggggccggggcgcccgccaattgtcagagtcttcttggttgcttttcaattcagaaatcagagaaatgatttgtagagagttttccttttctttattcatttagcttgaaatcaattttgttagtaaggttttttttttgtttgtttgtttttgtttttttgagacggagtctcgctctgtcccccaggctggagtgcagtggcgcaatctcagctcgccacaacttctgactcccgggttcaagcgattctcctgcctcagcctccctagtagctgggactacaggcacctgccaccacacccagctaatttttgtatttttagtagagacagggtttcaccatgttggccaggttggtctcgatctcctgaccttgtgatccacccgcgtcggcctcccaaagtgctgggattacaggtgtgagccactgcgcccagccattagtaaggttttaaacttgtcctcagaattagaagaaatcccagagactggagaccagcagtgctgtgtgtgggtgagaccctgttgaagatcccttggtaagtccagtgggcgtggtccataggagggggaggcgggaggggagctggctcaggagaggctggctttgcctccaaagaagagccccaccctcttgtgctggcctctcgtgctggccttttcctattgtccttcagagaggaggaagctttgctcagcttctcaccaattaaaagagcactgtgaggttggacaggagtgcaatttatgaaaacaaaacaaaaaaaacctttgacatggtgaaaccccgtctccactaaaaatatggtgaaaccctgtctccactaaaaatataaaaatacagaattagtcgggcatggtggtgcacgcacgtaatcccagctacttgggaggttgaggcaggagaatcgcttgaaccttggaggcagagtttgcagtgagctgagatctcaccaccgcactccagcctgggtgacagagcaagacctcatctaaaaaaaaaaaaaatccatgtgatctataaaatctcacggaaacacacacctaaggtcacgcatttcactgtaacatgagcgggaagatgtactgagcctgttctccacctcggtgaatgctccgaccccctcttgcctcacctcccactgtatacatttgttcctttttaattttttgaagactggtcaagtgcagtagagagaaggcggaaagggtacaacaaggagctagattgggaactgactgagcagccggtcggggtgacgcaacgctaccttcctacccccaccctttgctcctgttgtcgctgagtcgtgctccgtcgagggacacaccacgtcttgcttgtacccacacaggttgttcccagcatttggctgctgtgagcatcctcgcgtgaaccttttcaggagctgagctcttagaggagaaggcagcgctgtgttgagcacccaccgggagaagttccgtcaaatccagggtacttgagattctggaaagatgcagaaatgtaaaaaataaaaacaagcaacaagcggtttatcccacaagtcactaggaaaatgtattgttgtctctctaacagtcaaatcctattggtcggccttagtttttctgcaaaacagaataaattttatgtttttttccccagttgttgaaataaaatgctataaccatatttgcttataaactatgtccaaatgagattcttttatttctacttgacgattttccaccatgtcaggccctgttatgatggcagcccgttgtgatgcactaggacagatcccagctcccaattcttttatgaggcactaggacaaatcccagctcccaattcttttatgaggcactaggacaaattccagctcccaattcttttatgatgcactaggacaaatcccagctcctgttatggcaacagcccgttatgatgcaataggacaaatcccagctcccaattcttttatgatgcactaggacaaatcccagctcctgttatggcgacagcccattgtgatgcaataggacagatcccagctcccaattcttttatgatggcactagaacaaatcccagctcccaattctttgcatttttttttttttttttttggccaggttttctctctcacttgctggggcacgaacagatgctctttggtgtttttaatgattgaggagcatcttgctgttgtcgttctcatttgttttcaaggaacagaaacgctctcgagcgagtgctcggtggagctgggcaagctgctgaccacaggggaagatgactcaacaattgggattttgcttcttctttctttaaaaagatgcaaaagaactagacccacactttacacatttttttggtgtgttcattgtggactagtgttgttgttgttgttgttgagacaggggagatggtctccctctgttgcccaggctggagtgcagtggtgctatcttggctcactgcaacctccccctcctggggttcaaacgattctgctccctcagcttcctgagtagctgggattacaagtgcctgccaccaccactggctcatttttgtattttagtagagacaggatttcaccatgttggccaggctggtctcaaactcctgacctcaaatgatccacctgccttggcctccctaagtgctggggttacaggtgtgagccactgtgcacagccaaaaacagtgttttcctttcctcagtctgaaagcctgacactgttgatccaccaggagtgtgcatgggtgtgcatagtgttgatccaccaggagtgtgtgtgggtgtgcatagtgttgatccacccggagtgtgtgtgggtgtgcatagtgttgatccaccgggagtgtgcatgggtgtgcatagtgttgatccacccggagtgtgtgtgggtgtgcctactgttgatccaccaggagtgtgcctgggtgtgcacactgttgattgaccaggagtgtgtgtgggtgtgcatactcttgatcgattgggagtgtgtgggtgtgcacattgttgatcgggagtgtgcgtgggtgtgcacgctgttgctccaccgggagtgtgtgtgggtggggggtgtgcatgcctgtatgcacaatagagtctcgatctttgtgggacaagcataggggactgggcatcagtcaggaagcttgggcttgtcttgccctgccaccaccctgcgcacccctctctattcaagccacagctctgtgcacgttggatttcttacgtgcaaaacaagggggtcagccatgccggtggtaacacctggaaacacctggaagctttgaaaaatagtgatgcccagacataaactggcgccagtgaatcagaatgtcagctgagggcggcgaggggcggggtgggggcgggacccaggctttgccgtcctttctttttctctgaagcttcccgaggtgactgtaatgtgctatcagagttgaggatctctgggcaagacgatcctgatgaaaccctcccaccctgaaacgccagctgtgctttgtgtaacaaagccaaaggtgcggtgagggaattcagtttcctcattattacttctatggtttgttagcaaaaacataattagcatgaaagatatttctctgtggacatgcaaatcaatgcaaatgactaatttgccatttaagaatttgcaaattgcaatgcaaaattgtcttaggtaaataaccctagtctaattgagtgacaatattctgtgttttgttattaaggctattagctgaagatgtaggaagactgtaaaaatgccacaatttttgcttatacatgcagtgtgagttataatttacgggagattttatgcacattgtttcacttgagccccacaattccagttgcatcctagactagctactgtaaagtagcacagggtaaatgggtggcggtgaaagcaagaatttgaacagcttgccacagtgtaacaaacgcaacagcaacagaaacatcaacagggccttccccgggggctcccaggtctttggcagcagaattacccaagttttggccagtgacttaaacacacgccatgtaaaaggatgagatgggaacagaacaaagagcccagaaataaacctgaccatatatggtcaactaggtgtgaagcagactctggggtaagagccgtctctttaaatggtttcggggaaactggacatccacactcaaaagaatgaaatgggaccttaccttacaccgttctcaaaaatctgcccaaaattggttaaagacccaaacacaagatctgaaactgtaaaactctgaaaacatacaggaagagctccttgacattggtctcggcaagaagttttggacaagacccaaaaacacaggcaacaaaagcaaaataaatgagtgggactatatcaaactgaaaagctgccgtgcggtaaaggaaaccatcaaaatgaaaaggcagcctacagggcgggagaaaatgttgaaaaaccatagatctataaggtgttaatatctaaaatatataaggaactcactcaactcaatagcaaaacaaacaaacaaacaacacacaaaaaaaacccaaaagccaaaaaacccccaaaccctccaattttaaaaagggcaaagaacctgaatagaacatttttccaaagaggacatacagatggctgacaggtatgggaaaggtgctgagcatcactaatcattggaaacgcacatcagagccccagtgacttaccctctcacacctgtgagaatggcttttatcaaaaagacagaagataacaagtgttggcaagtgtgtagagaaaagggacacttggatgctttgtttgagacagtctcgctctgtcctacagtggcacgatctcagctcactgcaacctctgcctcctgggttcaagtgattctcctgcctcagcctcccgagtagctgggattacagacatgtgccaccatgcctagctaatttttatatttttagtagagatggggtttcaccgtgttggccaggctggtcttgagctcctgacctcaagtgatccacccgcctcagcctcccaaaattctgggattacaggcgtgagccactgcacctggccaacttgcacactgtttatggaaacagtgtgtaggttcctcaagaaattaaaaacagtgctaccatcaacgcctcttttggttatagatccagaagaaattaaatgggcagaagaggtgtctgcaccctgatgctcattgcagcactattcaccagggcatggagacagtacaggtgtttctgatggatgaatggatagagcaattgtggtatacatacacaatggatactattcagccttaaaaaaggagatcctgtcattttcaaaacatggatgaacctggaggacatgatgttgtaaatagtgtgaagtaagtgaaataagccaggcacagaaaggcagatactgcatgatctcacacatatgtagaatcttaaaaaaaaaagttgactacatagaaacagagagtggaaagctggttatggtttggggggtgggagtggcgaggaatgagaagatgtggatgagagggtaggaagctgcagttttgtgggaggagtgagcccaggggcctaatgcacagcgtgaggactgtatgtagtaacaacattggattgtttactggtaatttgcccagagggtgcctctaggagagggtggaggcagaggtgttaactcttgaccacagtggccacctcagtatgcatgtatgtatccaacatcatgttgcacgcctcaaatgtacatccaaaaattttacaaaatgatgagttggattttgttatctgctttaaggatgtccattttattactgcatggatgcatcatgcaacaggaagtggggtgtgtgaggcgtgaggcagggatctgggttcaaggcctgaaagtatgtaaagctgctcagcacgtgtgactgcgggtccccaggcaaagtagcttagcccacatgactgcacccataactgctggctttctgggttctaggcttacgtgatcagagaccaggtttgtttttgcccagcccaagtccagcacacatgtggcaggtagctggcttttcccaagcatccactggaggcccctggatcaatgcattcagggcagtgtcttgggaaggatataaactgtgcagtggttaaacagctggtacttggactgtgagagctgagcctttcagtgcttccaagtactgactctttctaagcctcagtttgcttgtctctaaagtaagcatagcaataatgccttctttgtagtaagatttaatgtgatactgcaaataaaatatttagtacagtatctactaaagattagatggcatagattagatgctcaggaatgttagtgaaaacagttatcataatgaaaaaatgccctcatgagcttctgtctactgcagggataaagtggtaaataaatgatgtgtacaggagatacagtaagggagtaaggggtgtggtatgaatgaagaaccaagaaagcattttaagaattcaaaggggtcacggggtgggaaagaagagacatccagtgggagaatcaagacagtctctgggggagtaatcatgatggatcttgataggactggatttgaaggctggagagccaccagagtgtcacttcgcacaaactctgcaagatgggcactcttagtatctccacatacaaggcccaggagaggaggcccagcatgctttaggaaatgtccacagccacacagctgattggtgctggaatctggacttgtatctcagcagcttagctccagtctgcgataagaacaccatagcctctgtaactagctgtgttatcctaagaaaattacttagcctttctgaacttcaactcccttatctctaaaatggggataatacattgatctgaaggtcaatgataatgagcataagggtgtagcacagaatctggcactggtgatatttactcattggcatggcaatgatagcgatggtaaggatgatgatggtgatgatgaagtgattgtttactaaatggcatgccaatgatggcgatggtaaggatgatgatggtgatgatgaaggattatttactaaatggcatggcaatgatggcgatggtaaggatgatgacggtggtgatgaaggattatttactaaatggcatggcaatgatggtgatggtaaggatgatgatggtgacgatgaagtgattgtttactaaatggcatggcaatgatggtgacggtatggatgatgacggtgatgatgaagtgattacttactaaatggcatggcaatgatggcgatggtaaggatgatgatggtgatgatgaaggattatttattaaatggcatggcaatgatggcgatggtaaggatgatgacggtggtgatgaaggattatttactaaatggcatggcaatgatggcgatggtaaggatgatgatggtgatgatgaaggattatttactaaatggcatggcaatgatggcgatggtaaggatgatgacggtggtgatgaaggattatttactaaatggcatggcaatgatggcgatggtaaggatgatgatggtgatgatgaaggattatttactaaatggcatggcaatgatggcgatggtaaggatgatgatggtgatgatgaaggattatttactaaatggcatggcaatgatggtgatggtaaggatgatgacggtggtgatgaaggattatttactaaatggcatggcaatgatggcgatggtaaggatgatgacggtggtgatgaaggattatttactaaatggcatggcaatgatggcgatggtaaggatgatgatggtgatgatgaaggattatttactaaatggcatggcaatgatggcgatggtaaggatgatgacggtgatgatgaagtgattacttactaaatggcatggcaatgatggcgatggtaaggatgatgacggtgatgatgaagtgattacttactaaatggcatggcaatgatggtgatggtaaggatgatgatggtgatgatgaaggattatttattaaatggcatggcaatgatggcgatggtaaggatgatgacggtgatgatgaagtgattgtttactaaatggcatggcaatgatggcgatggtaaggatgatgatggtgatgatgatggtgaagatagtgatgatatggtgatgacgatgatggtgatgatgatgatggtgttgatgataacaatgatggtgataacaatgatgatggtgacggtgatattgacaacaatgatgatgacaatgaggatggtgataacaatgatgatgatatggtgatgacaatgatggtgatgatggtggtgatggtaatggtaatgatgatggtgatgatggtggtaatgataatgacaacatgatggtgatgacaatgatggtgatggtgatgatgacaacaatgatggtcgtgatggtaatgataatgatgatgagatgctgatggtgatggtgatgatagtaatgatgctgatggtgatggtgatgatagtaatgatgatgatggtgacaatggtgatgatttggggtgggggacagaaatgagaaaagatggagttaggggatgatgggctcacctgcccttttggccctccagttctgtacttgcatattgaggggcttggtctacctggtgttgcccaaatgactagaaccatgtaggaagcttataaaagtacacagatccagatcctataccagactgaccaagtcggcatctcccatctggggctttggggtttatggttttagtacagttgactgtaatgtgcagccaggctggggaaacatgaaactaatgatctgagttcaaatcatcactgctaaaatgagcacaagggaatagaaccagttattcgtgctgaataaaataaatgtaacccccaagttgttgcactgctatttgaaataatttatgttattgattttcttcaataaaactgagctgtgtgtggatttgcctgaaggggtctgtgtcccaaccttcaactcatcctctgttttcctggatccccacacaatcgtaggcagcttagcttgtagttttgcggactgtgagctggacatccttcctgtgtttgaaaatgaacctgtcatcagcacaggttttacgtgagaaacacagggcctgaggcagctatatgacacgtctcagggtggaaggaggggagaggaattcattgaggaaccactcctttttgtcttagttttaaggcagtaaatgacttgtcatcctcaggaaagctaacaggcaggtgttccctctttctctaccaccattttcatggccgagacaggaccaggcaccccttaattttcacatatcatctctaggactctgtgtgttttctgtcaaatgcaagtacggtatcgcatcatgtgagagcagaaggtgtgacagaggccgggtgtggtatagatgatgccagcacaccagacaaatgccagatagtagaagccacaggggcctccggtgcatggcgtctgagggtctttatgggcctgctgggagggaggtggtcaggagcatcagcccgctgtatgaggatctgcactgcctttgagaagtgacatcctgggataaacaagctcacccaaactcctccagaaagaacccaacaatttatttttatttggagatatagggcgagtgttgggatcaaagcctggggcaagatggtcccagagaggggccctggtgtgtggacctagaaagcagagcagcacagggcgtgggcggaagcacagggggtctgaaagcatggaaggagaagtacgaaccgaagcacccaggcggttctatccaaggacgggaggcgttcacccaagcgccggctcctgcagcaaggcagggattctctgccatggggtgagtatgggttgtttccttggaagtcacaaatatgccagtgtctttaggctcagtaactcagactgtaggaacccacactaaagacgtgtttttaaaatgtgggtgaaaaataattgaaagcacgtttgttacagctttatttataatgttgaaaaactttaaaacaacccatatgaccaagcatagcagggaacagtgcagtcagcctctacagcaggtggccaagaggctctttccatggttccgggaaatgctcgcgtgtagtacccagtgggagtggcaggagacagccccgaggctacagaatgaatttgagtgctttggaaaaagtacgtaattatgctttggaaaacactggaagaaaatgcacctagaatgatattttttttcaccattttctgtatgcttcagtttttatgctgtaagatttttttttttttttgagacggagtctcgctctgttgcccaggctggagtgcagtggcaccatctcagctcactgcaagctctgcctcccgggtttatgccattctcctgcctcagcctcccgagtagctgggactacaggcgcctgccaccacgcccggttaatttttttgtatttttagtagagacggggtttcactgtgttagccaggatggtcttgatctcttgacctcgtgatccacccccttcggcctcccaaagtgctgggattacaggcatgagccaccgcgcccggcctttatgctgtaagattttattgttcatagaaccaagaaaaaaatgaaagactgggaatttggaaatttgaggtttcttctatgcttcttgaccaggtcacttctgatcttaagtgaagccacatgactgtcgggcagaatcctccatagtagaaaggaagagctgttatttctctgcagtgtgtcttgggtttgaggatgttgtagtttgtgcaatgatggtctgcatctctagaagatttttcctaaccaactttatgtggatcagctgacttttcagctagctgccagcgtgcacacgtttctctctgtaatgtcttctattttgaggtactctgtgctttactggaactactatctgttcttgtatatttctaggcaggctttgccagccaaaggtgggtggaacatttcttgcatcaacatcagaataagctcgatcatgaacgatggttgaggaagggagctggggccatggcttgactttcccatgggaccgtgcaggacagagcagatgaattctcatcagatggcactgcgtatgcttggtgactgtgagttttcatttccggacagctggatgaccctcctgtgctgacggcacacagcccccgtagcaggaacatgtagatagagtcccatcctggagctggatgaccctcctgtggtctcggcacacagcccccgtaggaggagcatgtagatagagtcccattctgcagctggatgaccctcctgtggtcttggcacacagaccctctagcaggaacttgtagatagagtcccatcctgtagctggatgaccctcctgtgctcatggcacacagcccctgtagcaggaacatgtagatagagtccgatcctacagttgaatgaccctcctgtgctcttggcacacagaccctgtagcaggaacttgtagatagagtcccattctgcagctggatgaccctcctgtgctgacggcacacaggcactgtagcaggaacttgtagatagagtcccatcctgcagctggatgaccctcctgtgctcacggcacacagcccctctaggaggagcatgtagatagagtcccatcctgcagctggatgaccctcctgtgctgacggcacacaggcactgtagcaggaacttgtagatagagtcccatcctgcagctggatgaccctcctgtgctcacggcacacagcccctctaggaggagcatgtagatagagtcccatcctgcagctggatgaccctcctgtgctgacggcacacaggcactgtagcaggaacttgtagatagagtcccatcctgtagctggatgaccctcctgtgctctcggcacacagaccctctagcaggaacttgtagatagagtcccatcctgtagctggatgaccctcctgtgctcacggtacacagcccctctaggaggagcatgtagatagggccccatcctggagactgtggatgttgccatgctcctgggtttctcggttgcctcttggtggttctatgatggagaaacggcagggcccagcaccatgatgtgggcagccacagcggctggacaggggccactggacatttagggagatcctgtgacacacaggctgtggcctttctccgagtcatgtgtgtgtggccctcagggtagtgggagaaagagaagctatgacatttggactgaggcgtgcatgggtttgcggctcagtatagagtaataggtaggggtggtgcagagccgacgtccttttgcgggcccctggagcccgttcgtcccaggcaggggctctggattctggatcccgttcgtcccaggcgagggctctggattctggagcccgttcgtcccaagcggggcctctggattctggagcctgttcgtcccaggcgggtgctctggattctggagcccattcatcccaggcagtgggggctctggattctggagcccattcatcccaggcagtgggggctctggattctcatctgggtgttgtggtgcagcatgcatgtgtgcttgtgcaactgtgtgcacttggagccacagcctcaagccttggtgtcttcctctggacagtggagacatcagcacgtgtggtcccaaagtcctcgtggccctgtgtgtgcagcaagtccagcccagggcagccacaccaaggctccggtgtcaccctgtgatggccgcggcaccctgtcctctctctcctgtgcccccacagatgttgccgtctcctgcctctcgtgtcttccccacatgtgtcctttgccagtgctccctgcagtttcccttgtctggcctgtgctgcgtggagggtgcacctctgaagatcacgcagtcctcagggggccctgggatcaaaggtgtgtccacggttagtgtgctgaggtctcactctgtgcttgttgctgggactagaaggggaaatgaggcagagtctctgctcttaggcagcgtggagcccgcccagcctggtgttatgggggtaccggcttcacagtaggatttggatttgaatcccaaatctactcagtaaataactgtgcaactttcagctctccgaggtgtgcagtggggacgatcatggttctggctctgcagggctgttgggagaccgcacgagagggtgatgctggtgtcagggctccggcggtcgacttcgtgggacatcatggggctgttgggtgggggcgtggttttgcattttgctgactattagagcttttaaaaaccgggggagctttaaaagatccgggtggtcaggccacacctcttgacaaatcagaattcagggaatgaggccagtgtcaatatttctaagacatggcagcttttcccccaggtggccgtggtaagctttgggagctgggggccgagcttctcagcctgtgtcagcatctcctggacatcccgatggactgcagatcactcgcccggcccacttcctggtgcactggtctgagcattgtcctttgaaaaccaccagatgtcggggaaataacgtttgctgtggcgtctggggcaggaaaggaggaagcggagcacaggccaagctcggaggatgggggattttgctagaagggtatttaataaggtttgctgtgtttcacactgagggacgcataatggaaccctgggcactgcagagctgtgaagtgcccaggagacaccaaattaactttctcttagagctttcacctcagttttcaaccacgtcttctcactcccaatttctaaaactcccaggagacccggaacccttccaaatggatgaaaattcagtcagaggtgtgaagttttggccctgctgagaacactcagggtgtaaataatgaacttggaaggagttttgacggtggctttactgcgactctccccaggccaggctcgccctggagggggaggtctggtgttaacgcccctcaccgtgcgctgactggggccgcgcatccgctgtgttcccgcaggccgaggtagcacctttgctaatgaacttggaaggagttttgacggtggctttactgtgactccccccaggccaggctcgccctggagcgggagttttggtgttaacgcccctcaccgtgtgctgactggggccgcgcatccgctgtggtcccgcaggccgaggtagcacctttgctaatgaacttggaaggagttttgacggtggctttactgtgactccccccaggccaggctcgccctggagagggaggtttggtggtaacgcccctcaccgtgtgctgactggggccgcgcatccgctgtggtcccgcaggccgaggtagcacctttgctttcagggctagtggtgtctgcttatcaaggccagggtagacacctgcccgctggaagtgtccagagacattgcacccgagatgctgaggagccctgggagggacacggtttcttctcattggggattctggggatgttcattggagttaggaggaatgcagagcgtggatactgtgcaaacagataaggacgctttcaggaaataagcatcaggaaaggggtcagaagactcagcctggattcttggtggctcatcagattcatagcaaaccacaaacactgaatccaccctgcgtgcgccattgctgtgtagacgtatgatggaccctccttggatattaattcaaacaaattaactacaagatgactttttttttaattaatggaatttagcactgaccggatactagaacattattaaagaccagttgctgttaactaatgttgctggtgtgatactgggtttgtgatgacattttttaaagccctcatgtgggtgagttgtggtgatcctggtgctgtgggagatggaggcgggggaatcattgagcccaggaggtggaggctgcagtgagtcgtgattgtgtcaccgccgtccagcctgggcaacagagtaagaccccgtctcccctaaataaaataaaatgagataagtcctcatttgctagagatacacagaatatggtgtagtagattttctctaactgactccaccctcaaccctggaaaacagggaggggtggcaggggagacggatggagtgaaacatgagccactgcagagtgatgggtggccatggccgatggcgtccgtgccgttatcttctctgcggagcaatggggggccgtggccgatggcatccgtgccgttatgttctccgcagagcgatggggggccatggccgatggcatccgtgccgttatgttctctgcagagcaatggggggccattgccgatggcgtccgtgccattatgttctctgcagagcgatggggggccgtggccgatggcgtccgtgctgttatgttctctgcagagcaatgggtggctgtggccaatggcgtccatgctgttatcttctctgcagagcgatgggtggctgtggctgatggcatccgtgccattatcttctctgtggagcaatggggggccgtggccgatggcatccgtgccgttacgttctctgcagagcgatggggggccattgccaatggcgtccgtgccattatgttctctgcagagtgatggggggctgtggctgatggcgtccatgccgttatcttctctgaagagtgatgggtggctgttgtcttctccgcagattgatggggggccgtggccgatggcgtccatgtcgttgtcttctctgcagagcgatggggggctgtggctgatggcgtccatgctgttatgttctctgcagagcaatgggtggccgtggccgatggcgtccatgccgttatcttctttgtagagcgatgggtggccatggccaatggcgtccatgctgttatgttctctgcagagcaatgggtggccatggccgatggcatccgtgctgttatgttctctgcagagcaatgggtggccgtggccgatggcatctgtgccgttatgttctctgcagagtaatgggtggccatggccgatggcgtccatgccgttgtcttctctgcagagcgatgggtggccatggccgatggcgtccatgccgttgtcttctctgcagagcgatgggtggccgtggccgatggcgtccgtgccgttgtcttctctgcagagcgatgggtggccgtggccgatggcgtccgtgccgttgtcttctctgcagagcgatgggtggccgtggccgatggcgtccgtgccgttgtcttctctgcagagcgatgggtggccgtggccgatggcgtccgtgccgttgtcttctctgcagagcgatgggtggccgtggccgatggcgtccgtgccgttgtcttctctgcagagcgatgggtggccgtggccgatggcgtccgtgccgttgtcttctctgcagagcgatgggtggccgtggccgatggcgtccgtgccgttgtcttctctgcagagcgatgggtggccgtggccgatggcgtccgtgccgttgtcttctctgcagagcgatgggtggccgtggccgatggcgtccgtgccgttgtcttctctgcagagcgatgggtggccgtggccgatggcgtccgtgccgttatcttctctgctttcgtgtatgtttgaacatttctataataaaaacttaagtgaaaagcttactgtgctggctgcctggaggtgtggtgtttctgttcattttgtttttagggtgggaagtagtgggattgggggtccatgggggccatttcttgggttttcctgaagtgggttctgtgcttggcatcatgaagcaagtggagcgtgtgtttgctccatgcctgtgggctgcgtggaggcagcctgacaaacacatttcgaggggcccccggggggtcgctgaggctgtgtatgtctgttccatgcaacagccgtcatctctgtttttgaacacattgacagtgtgtagtctgcttggggggatgttcgaggtcaacagagtggccaaaagaggctctctcgtcattgcaatgatccacactccactctgctgtcactgaacctgcccccaagcctgcaccctcttcatctcttctttgtctatagcaaccatccccaatcctgacatcagtgattgtgtgtgttgtgtcttgtctgtcctccatagcaaccatccccaatcctgacattggtgattgtgtgcgttgtgtcttgtctgtcctctgtagcaaccgtccccaatcctcacatcagtgattgtgtgtgttgtgtcttgtctgtcctccataacaactgtccccaatcctcacatcagtgattgtgtgtgttgtatcttgtctgtcctctgtagcaaccgtccccaatcctcacatcagtgattgtgtgtgttgtgtcttgtctgtcctccataacaactgtccccaatcctcacatcagtgattgtgtgtgttgtgtcttgtctgtcctctgtagcaaccgtccccaatcctcacatcagtgattgtgtgtgttgtgtcttgtctgtcctccataacaactgtccccaatcctcacatcagtgattgtgtgcgttgtgtcttgtctgtcctctgtagcaaccatccccaatcctcacatcagtgattgtgtgcgttgtgtcttgtctgtcctccatagcaaccatccccaatcctgacatcggtgattgtgtgcgttgtgtcttgtctgtcctccatagcaaccatccccaatcctgacatcggtgattgtgtgcgttgtgtcttgtctgtcctccatagcaaccatccccaatcctgacatcggtgattgtgtgcgttgtgtcttgtctgtcctccatagcaaccgtccccagtcctgacatcggtgattgtgtgtgtcttgtctgtcctccatagcaaccgtccccaatcctgacatcggtgattgtgtgcattgtgtcttgtctgtccccacctagaatgtgagtttcataggaggagacttgtctgctttgctgagtttctaagtgtctccgtcggttccctgcacatggtcagtgcacaacaaatgtcagttgaatgcttagtacttaggagacatgaggctttcaattttcctcagttaatttgtgtgacagtaatgcatatatatggttcacttaaaagccgagtaatatagggcttaaaataagaagcaacagatcctgcccctctttcctgagctcacccaggggcaacagtagcctctcccacgttgaggtcctgcggcagctgccacttttccatatggttccacaccatctcatcaggagttgactcagtcctcctctgtgtagcccctgtggtgccccctgcactgtagggtgaggactgttctctttcaattcccctatgtccaggctgtgttagccaaccctgtggtgccccctgcaccgtacggtgaggactgtcctctttcaattcccctacatccaggctgtgttagccaaccctgtggtgccccctgcaccatacggtgaggactgtcctctttcaattcccctacgtccaggctgtgttagccaaccctgtggtgccccctgcaccgtacggtgaggactgtcctctttcaattcccctacgtccaggctgtgttagccaaccctgtggtgccccctgcaccgtacggtgaggactgtcctctttcaattcccctatgtccaggctgtgttagccaaccctgtggtgccccctgcaccgtacggtgaggactgtcctctttcaattcccctacgtccaggctgtgttagccaacatttagttttcacactgtcaagttaaaagcatcatgcccagccctgcagctgcagtgatgggtggatcctcggggtgctccctgtgttgcagctgtaccagcgttgattgcagacaagccgagtggggccctctgtgcccctgagccacggggcaacagagtaagaccccgtgttactctggaggagaagactctttgtgcagttccaagagatgctcctgcttcatcctgcaacagccgccccaaatgtgccacttctaactgtggtgttgggactttctcttcttgcatagtttttctttgtgtttcccaaaggttctggtcacttcctttcctttgtgtctccctcctcatcccctcctgacctcactcactccacctgtcttatcgagccccccaagcccagaggtgtccgctggaatcctggctctccagcccaaggtcaccttgagatgccacagtctgtgagtgggaggggaaatcggtggggtggcaggaggccgcccgggacaaggttgcaggggcaggtgcgtggcgtgctcagagctcctgggtgaaccagggagaatggggaaggccttgaggagcctggcgacggtgaacccggcaggtccatggtctccactgggagatggggaggacccgctgggcaggggagacagtgcttctgggtgagaaggtttaattctgtaaggatatgaattctctctgaataaacctatacatgtaagttatcacaacagcatattaacaattttttttgaaattaaacgaactagctttaaagtccaggttcagacacaaacatgagactaaacagaaaagttatgaaaaagaaagttgtgtgtggggcgttgagtcttgcacactcagtgctttgcagtgatgggacacttaagccagagtggggaacagacgggcagattgaagggaaagaatagaaagtctagaaatagacccaaatgcgtatgggtatttggtatatgataatgatgacattttaaatcggtggggaaaagatgtattattcagtaatgatttggggacaactggccagacatttggaaaatacatagctgggtccctcccaaactccttaccccaaaataaaatccagatggcacagagacttaaaaatataatggaattttacaagtactggaagaaaacgtgggggaatttttaataattttgcgatggaattaatttttttaaggaagacagcccaatatctaaggaaattaaaattcacataactttaactcaccagcctgactcctgggaagttatgtgatggatgttcaggcctgggtgtaaagaaccaaatgcgcaatgattctgtgaaacattatcataggaaaaaaccgcgagcgttctaaacacccttcaagttgtggttcatcttcaagacggagttaggtagatgggctgacacagaaggacctcaagacattttgaaataaaaaaggaagatgagaacagctggaatccatattagaagaagatgaacctggaccgaatttctttcggagacaccaactcctgtgctcatgggtgtgaaaggcaagactataaaggttttcaactgagaatataatgtttcatgactttagggcggagaggaaggttttgagacaggacacaaagagtgctaattgcaaaggaaattactgataatttcaactatattaaaatcaagaataactcttagtaaaaaagacaccgtaaagagaattaattaaaagacaagccacagaatgggagacaatattttcaacacatgtaaatgacatgtaaccgacaaagatctcacgttcaaaacagagaggaccctgacaaatcactgagaacaaggcaacgaaggaaacatttgcaaaacatttcagaagttctaaggagaaaattcaaatgactgagaaatacgtaaaatggtcttcaacctaattattaaattggagtgatgaagacggaagccgtatgaaattcagcagctcccctactagacgggcaaaaaccggaagcaccagctccaggtgcagctgcgacgtggggcggggagttcctggaagcacctggctgtgatacacaacctctgagctcctcgggggcttggacagcaggtgggcaggtgtgctggaatgtggagaggtgtgtttgctgcggctgaggtttcgctccttgccctccacgcagcagaagcacacgtacgcctggtcagggagatgcgcaaggaagcgcgtaggtggcatcgtttacagtctccccaggctggacgtgacccacatgcactttggtggtggaggagaggaagattattttattttcatacaatggaacagtggaatttagccatgacggggcgactcggatcatctcacagacatgaagctgagtgaaagaaggaaggtgtgaaagacgacaggccctgtgaatctggtgcagaggcaggcgcggccgtgagcacagcttccatcaagtcggcggtggctccccatgaaggtgcagcaggggtgggggttccagctgctggcgggactatttcttgagtgctgtttggatgaatattcacttaatattgtttgctatacgatgcgtttttgtgcgcatttctctattatatctatgaggttaaaaaaagcaagaatgaatctcagttgtgtttcaccagtgtgtgtgtatgtgtccttgtgtgtgggaagacattctctgaggcagcggttatggactgaatgtgtctcattgaactcagtgtgtagaaggccaaacccccaggggatggtgctgggaggagaggcctttgggccgtgattgagttagatcacccgtgagggtggggctcccacgatgggataggtggcctttgggcggtgattgggttagatggggtcttgagggcagggcttccgtgaagggaccagtgctctcgtaagaagaggaagagtcctctctcctccatgtaaggacgcggtgagaagccaggcggaggccatcaccagagcagactgtgctggcacccccatcccagacttccagcctccagaccatgaggacgtttctgtgtgagtcacccagtctgtggcaccacggcatcctcaccaggttcatctgtgctgtggccaccttggattcgtctgtactacagcaacgttttgtgttgtagctttgcctttgcttaactttgtaaaccaaatattttaggaagaaaaagaggtttagtgttcctgtttgccaggaaaatcacaagggattatgcgattgtgaatgaactaagggtcaccagtgcaggggctgcgggaaactgatgtgtgacatgctctccactcatcctggctccattaccacactgaagtggcatccatgagtttggaaatcactaaggcaaagaagtaagggctgaactcctccaaatgttcctgactatgaattaagcctcacgggttcacttctgcctgttggtgtttggtctcggcccgcgctatgtgtcttgcttctgcctgttggtgtttgtttggactcggcccgcgctgtgtgtcttgcttctgcctattggtgtttgtttggactcagactgcgctgtgtgtcttgctgttgtgggaatctgtgcatcgtcctctcttggtgactcctgagccaaggctgacactccactcttcgagcaaactgaactatagcatgattgtatctgctgctgctccgggagggccctgtgggccgaccaccctcacctgcccttgggccagcccttgcttcctctggaagcttcttgagcttgagttgtgggattgacatgtacctggaattgttggttttggtatctgtcattggagacaccatccctaccccacgcatgacctgggagaaaacggactttgacgtttgattgttttcagtgttcactgggagggaagagaagtcaggattacttttcctctggtgtgaaagtccctggaccctaaacacaccctgttgtccacaggtggtgccgagtcccacaaaggaacctggaatccagctgagtgggcacgtgctgcctgtcacggcccttcatgtcctgaacatctgttgagaggaggcgggggtgtcaccttaattccatcttggacaccacagtgacacaaagtgcaaagtgccgtgcccctcatccccacagatatgtggcatcccactggtctcctaaccacccaacgccgttgctcctgaccattggaaacgctggtggggctggagcacctggacagtccagtctcgttctagtggctggactggagtggggttgccttgaacccgtcttaggctggaaatgcccccagcagcagtgccaggggaactctcactggggcctgccctgggagccccggggaacacttgtcagttcagctctgaccttaaggtgggactgccccatgcccttggcccaggagtgggagctgcaggaggagcccctcatgctacggccctcccgctgaggggctcccctgggggcctcaaattcagcatcaggcgccagtgaagactcagctcctctggaggggaccccctccccaccccaccctcctgcactgcagcgctgcccagacctgggtctgcggagacttctgtttgcctctggcctgatgaaagcagtgtggaaaccaacctccctcctcctccccagatctcttctctttttggggggttttcatgctaacttactattttctctaattaagaagcaatacatggctattatgaaacatttagaaaatgtataataaatactaaaataatgttaccgttctgatttatatccttccaagtccacttctctctgtgttctaaggatgattctcagacacccagcctgctcctgtgtctgggccactctgctgggggcatgttgttgccgacctggcctgtggccttccctgtgagattcatcctgggagtggtcccagaaagcagccctggcggtggagtggctggagtggggcacgccatgctgggcttggcttcaccctcagcagtgaggccctcttgctgccctgctgagtcggcacctggcctggcccagcatcctcgggctgacgatgatgccgggctgagggcctgtgtcctgctggcatttgccctgtgccgtgtggctgggtagcatggccaggagccggggtggggcaagaccgtggcttgtcatttccaaccctctgaggcccctttgtggatggcagcaggggcttcagcactgcccccgctctcggctctgctggtgctcgtaccccggcacctgcgcagagaggtcagctccctggctacggggcagccttcgtcttcactgcccgcttggctaacagcttgacgcagcccaccactggcccaggccttggagggatgtttgctttccaggggcctggcaggacgcaaggcaggccgggtacccgtgcaggtggctttgtttcctggagaggtggggaagaggctctggcagcgggagcaagctgggcgggtcggccttatcgggccgcgtgggcagcatgtgtggctgagccaccgggctccctggggccctgctgcttctgggctgcccagctgggcaggtggtgccgccctggcctgagtccgtcagggcctaattatggagacgggtcttgtgctctgtagtggttattagctgccttcctctttttttttggtgccaaagaattccatttggggaatttatacagccaattaggtatttagctcaaggcaattaatggctggaatgcaagcattagctaaaacctaaattggaattcatacatccacgcttttgcttaacggtggaggctgcagggaggcaccgagtgttgtctggggagctaggagaggctgcccaggcccagagaggaactccagattggctgtggattcatggctctgtccttgcttgggaaggaatgtttcagtgtttcagagcaaaaattttaaatctgtttgacaatcagaggccatcctggtcctgcctggagctgctgttggcctgccccacctggcatcctagctgcgtccttactgggcacgtatgtcaccgccttcatctctttcaaagccacccgtgggcttctggtcatattgtgatgaccctcgaaagtgacggatgccgtgaggccgtgggaacaggagctaggaggctgcaggccggccgccttcagtccacagaagccagatttgaggtgggttccggatgtcatgggtgccctggacaggtggctgtgtgacagcccagcgtgcctgatggtggacagaggctggggctgccatggggctgggcttctccccagacagggagcagtggagaattctcaccaaaaatccagatagatgaaaccaaacaacaaaacttactgcttttctcatcaaccaagtaatctctgaggaaattacaccagggaccattggattttcaagctgctccgtgtgtccatggcagcccaggcagggtccaggtggggtctgcccgccgggggcggctgtggcccaggcagagtccgggtggggtctgcccgctgggggtggctgtggctcgggtgggtctccgtgtgtccattgcagagcctgggtggggcctgcctgccgggggcagctgtggcttgggtggggctccagctctcacgacagactccatcgtgagtgggcccagcgtggtccgaccacagcaacacctcatactggcctgggaatttccacattaaaatatagttgaaagtattcaatttaatgtaaaattaaaatgtactttttcttacctatagcttatagattgggggtaatttttctctgtctctcacacattcaggcacacacccaccccataaacagtccctcaacctctaagtggtttgcaaggacagaatgtgcccaggaagacctggggcgagctgggaatccggactttgggcaactgtgtgttggtgggctgggtggggcaggagcctggggtgctggggcaccagggtttacctgcccacgctgagtgtcctgggttctcacgtgtcctgagttctcacgtggggtggtccgaaggctcacctgggcgcccgggtttacctgctcatgctgagtgtcctggcttctcacatgcggtggtccgagggctcacctgggcgccggggtttaccttctcacatggggtggtctgagggctgacccggaggcttctgagcactgacatggtcttgccagtgtccactgatgatgcgtctgctgctctgtggctcacggggacaggaggaggtgggagcaggagccatctggggcaaaggagggacaggctgacttggggcagagcgccctctcagggtctcctggccccaccaggcagcatagaccccaagatgcggcaggaagctgttcccttgatgagcagcaggcggctgtctgcgttcagccctgcacctttgcccactcattgttggaggacggccccgttatgggctggggcagaggcgaggggtgggtggagattagggccagacgaacctgaaggccctccagagcctctgacctgttcccgagaggccgcggggtcactggtccggctcaggctctgccaaggagcctccttggggtttctggcgcctgcactcagggacggcaccacctgcgatggaggctgctgtgcagtgtagagtgtggtggaaactccctgcctgggttgcagacggggggatttaattagggaagggatccagggtgaggacagtcagggcagaggtgagcaggtgggggcgcttggctcttcctttggtggtgagaacaagctcagggccgagtcagccacacaaggcttcaggctgtgcagataaggaagggctggccagcctcggggacagggcagtggggctgaggggctgtgtcacccagggcctgccccctctggagacaaagccctgaggctgggacatgcctgggaggaggctcttgcccagcgagggtgaagggcatccagctctccccagccctcctggttaagcccagctcaggcccttttggggagaagtcacggtggcaggtctcacggtccacacgctgtggtgggcttgctgctgtgcagagggccgtggtctggcatggtgccccgccgggtgcggccgcgttttcaagaggatgcagggggagaattgttgatgaaagagagcgggccctgagcaatgaacttggggtgtaagctgcacagcagtgaggggacactgggggctttcttgggatcccaaaaatggccgtaggagaggacctggcttctgtgcatgtgacgcaggccctgtgggtcttggggtctgtgaggagcactgaggacgaggaaagggagacaggctgaggccatctcggttggattccacaggaaaggccgcagccagttttcctgagacgttctggcgagcagctgcacggtccgaggctttcacttgcttttcattttaggctcactctgggtctaggggggtcttggtgctgtgtctaagctgctctaacagggttttggcctgggactctgaggctcggcctcttctcacacaggtggtagagagattcctgcccccagccgggagggcagcgtcaggtttatcaaactgacgtttgcagcaggtgtggagattttgagtgaagtcaaatcaggttttcagggagaaacaaacactggccgtgggtggggacttggggacccagtggggctgcaacaggggaggaggcgcctgggcgctggggctcacggccggctggggctcacctcagcttcccgagcacagtctgtgatggcactggcgtggcctggcctctccaggacctgttaggaggtgacggtggacaggcctgtgaacattccgctcttgctggagccaggcgaggctgccggaggggtgctgggctgcagcatccctggggcaggtgcctgtctccctgcctgttggaggggtgagtggcagtgcccacaggccccctcccttctctagcacctccccgtgcagtgggagagggcaggaccctgactgaacagggccatcctgaaaggaggagaaggtgctgctggaatgacacccagagacgggtatgagcccagacacccaggacttggggtaggccagagatgggtgtgagcccagacacccaggactcggggtagggtgccacatgggagcagctctgcccctggccgtcccaggcagccccgttgctggtggccaacagtccactctgacaccgtcacccagacaaggacccccagagcctcacatggtagaggaagctcctgtgtgattcacctgctggccacaggccttggaaccctccctgctgagtcttacttttaggaaggacctcatgggcacccctggtaggaagaggtggctcgcccaggtggggacaagcagctcgcacgcttggcaggaagatttgccccacgccgctcccccatcaggaagatttgctccacgctgctccccctgttgggaggagtcgccccacgccgctcctcctgcttcctcccctccctgaggcatcctggtagccagggcagcccaggattcaacctaagagctgcatagcgtgactgaccaggcggcgggcagcccccaactcttacagacccgtcagtggggaaacagtctcgtcagttctccgttgattcattttagcctttacccagaagtcaagtttgtctgctgatttgatataaacctacccttggatttccggcaactcaggcaagaggtggcaacttcggagccttctgtgccttcggggagaagccatgcctggcgctgccctggagccgcgggagccgctgggctgagccacggaagatgggcttggagcgtcctccgcagcctccgctcctgcctctgcccacaaagacccgctcgcccagtgacctgtggccacctagtgggaacaagacatttgcaatgtgcttgttgaccaggttaagagtcattctggtttaaagggaacaaaaaaggtgtttttttgcttttttttttttttttaatacttatttgtgttcctgaaaaggcttctgtctgctttagtaccgtctttctaggccaaagactatgctctagatttataaatatttcttttaactcactaatgtgctcatttgcttggaggccctgtcctcctcttgtccgtaaggcaagaatggtggcaggagataaaatctgttttaacttctccaaaaatggaaacgtgtcattttattttctgacaaaaaaggaaacatacattcccttccgtgcctttttcatatgcatgtttcctgtaactagaattaaagcacacaggagaaaaggaagcaggcggaacgctgcatggctgggtggtgcagaagggtacaagccacaaaatcagaatcacctccttacgatcctaaagccccaaaataatcatggtgaagaacattcgggtaaatgtctgtttagatgctcttctgggcacacacataacaaaaatggaatcctgtagttctgcaaatttttcttatcacttaccaaatctcttactcctgaatgctgagtgggcttccactgttgaatactgatacgtagcatccatggcatgcaggtgccattatctagtgaaccaaccctctagtggagaaaaggtaggttgcagtgtttcttcatcatgcagatgataaccatgaataggtaactggtcactttcagctctcgtacgtttgcacatagagaataccatgcatttcagggttctcaggctcagcttctttacacattgtatgatgacattctcagctcatctttgctctcagatttttaaccatgtcaggtaatcagagaatgatttccttgctgccaccatcaccactgccatgaccattactatcaccatcaccaccactgccaccattgccatcaccatcaccaccactgccaccaccatcactatcaccaccaccaccactgccgtgaccatcactatcaccatcaccaccactgccaccactgccatcaccatcaccaccactgtcaccaccatcactatcaccatcactatcaccaccactgccatgaccatcactatcaccaccaccaccactgccatgaccatcactatcactatcaccaccaccactgccatgaccatcactatcaccatcaccaccactgccatgaccatcactatcactatcaccaccactgccatgaccatcactatcaccatcaccaccactgccatgaccatcactatcaccatcaccaccactgccatgaccatcactatcaccatcaccaccactgccatgaccatcactatcactatcaccaccactgccatcaccatcgctatcaccatcaccaccactgccaccattgccatcaccaccaccatcactgatcaccatcaccatcaccatcaccaccattgccatcaccatcactatcaccaccaccaccactgccatcaccatcactatcaccaccaccaccactgccatcaccatcactatcactatcactgccatcaccatcactattaccatcaccaccactgccaccactgccatcaccatcactatcaccatcaccaccactgccatgaccatcactatcaccaccactgccaccactgccatcaccatcactatcaccatcaccaccactaccatgaccatcattatcaccaccaccaccactgccaccactgccatcaccatcaccaccatcactgatcaccatcaccatcaccttcattgccatcaccattactatcaccatcaccaccaccaccatcaccatcactatcaccatcaccatcaccatcaccttcattgccatcaccattactatcaccatcaccaccaccaccatcaccatcactatcaccaccactgccaccactgctatcaccatcactatcaccaccatcactaccactgccatcaccactatcaccatcaccatcactaccacccctatcactaccaccagcaccaccatcactaccacccccatcactaccaccatcactactaccactgtcaccaccaccacgactaccaccacccccatcactgccatcaccaccaccactaccaccaacaccactactaccccatcaccatcatcaccaccaccatcaccactatcactaccatcatcatcaccgtcaccaccaccaccttcaccaccaccaccaataccactgcccccaccaccacccccgtcactgccatcaccaccaccaccactactactaccaccatcaccactaccacccccatcaccatcaccactatcactaacatcaccaccaccactgtcaccaccactgtcatcatcaccaccaccttcaccactactatccacccctatcaccatcaccaccaccaccaccctgtcactatcactaccaccatcactactgccaccatcatcaccacgaccacctccatcaccagtattaccaccatcaccaccaccattgttaccactatcattatcaccaccaccgccgccactgccaccaccaccatcattaccacatcaccactatcacccctattaccatcactaccatcaccaccatcatcaccaccacacccatagctactaccattaccaccatcatcaccaccaccactgctttcactatcaccaccaccactaccatcaccatcactgttgttgaggaagtctgcctgaagctgtgctagaaccctactgcaccagtcctgagataccacagccaccacagcctctgatttgaagcccgaatggaacggacaatccatctagcttttgggagctggacctggagcatttggtatctgaatgtcaagtctttggagggtgtgttcgaggtggcgactttgcctaccagaaggcagctttgagcatgagtctctacctttatgggctgtggccacacaccatctgttgttgcaactgaatttgggagaaatgtccactcagaaatgaggactcattagggtgagaggccaggaggttgtcaggacccagtaagactcatgtgaggatagggaaattaagatattttctaactgatttagtacagtgtgataggaaatgcagatgcctcaacatgatgtcacagaaccccaaaccaatgcctccctgggtttctcatcaataaatcagtcagccccaggcctcagtatttccacgttgcaaaattatttccacattgcagaattatttccaaaagatctagcttccttgtgggcactacgaggtgcaccccgtaaataagcctggagctccacagactgggccatcttgttggtcgttcagagacttgtcttacaatcagtacaaactgattttcatatctttactttctatgtctatggaagatgcatttaatatgcaatctttatattaatacacatcatgacttgatatttaaaagaattagagatggtcatgaacttgagttggcaagctttatctgtaaaggaccaaatgataaatatcttggctttgaaagccacaaagattactgtttcctcctcctcatcttactccttctcctcttcttcttctcttccttctcctcctttcttctctcttccccacttcttctctgtccctgtctccatctcatttttcctacaacccttaaaaaaatataaaaaccattcttagctcaaaggcttgtgagcacaaaatatctgagaaaggtctcagtcaatttagaaagtattttggcaaggtgaaggatgcatccatgatacagcctcaggaagtcctgagacttgtgcctgaggtggtcgggggctgaggcatgcgcaggaggtggacgggggcctgaggcatgtgcccgaggtggtcgggggcacagtttgcttttatacattttagggagacatgagacgtcaatcaatatgtgtaagacatactttggttcagtccagtaaggcgggatgactggaaatggcggcttccaggttagaaatagataagagacaaaagtttgcattcttttgagtccttgaccagccttccagtgaatacacaattgagcctggctcagtgaatctgcatttttacataagcaataggggagagggagcaatgagatgcatttgtctcagggcagcctcagaggggtgactttgaacagaatgggaggcaggtttgccctgagcagttcccagcttgacttttccctttagcctggagattttggagtcccaaggtttgttttcctttcccaggccctacatgaaaagacaggtggggtaggtcccggggctctggtttgctgacccctggtcagagtgtctttgaggaagtcactatcagtggaaatgtcactaaaccctatatgctaatcagctgggcatcagcctaaagtgtattttcacacagcacgattcatcattagcaaattccaggaaaatcaacaacgatcagaactgaccttctcttggctataatgatctgtttgcatcggatcagatttcctgtggggaacaactagaagtgctgggtaaaatccacagaatgcctgctttggggagctgcggaggcaaccgggatttgagaggccaagatcctgttaattagcctgttttgatgattccacaatgtatatatgtgttgaaacatcacaccgtagcccataaatatgtacaattatttgtcaattaaaaataaaataaaactttttcttttttttttttgagatggagtcccactctgttgcccaggttggagtgcagtggcactgcaacttctgcctcccaggttcaagcaattctcctgcctcagcctcccagtagctgggattacaggcatgcaccaccacgcctggctaatttttgtatttttagtagagacggggtttcaccatgttggccaggctggtctcaaattcctgacctcaggtgatccgcccacctcagcctcccaaagtgctgggatgacaggtgtgagccacagcccctggccaaaaaaacttaaaaaagacccatcggaggggcactgttagggagcccactccctgcgggctgcctgtctcctgggggcatttgtgattcctgtcgaaagaggctgagaaaccaggcaagggctgtggagaagaggcagtgaaacccacagagcacttggcaacctcatagggtcatcaacacacaaatagatgtttgcattgcaaaggttaccaggccctgaggagactggatcccaaagagaaagtaggtacagaggcaatcagcacctgtggctttcacctctgacacatttgccaaattcttgagttgaatcagaggctgatcagaaagctatggaaaagcagagcaggatttctggcagtctcataatgctgaagagatgaaactggaattcaggaacttctaagaaagaggggccatcgcacacatcccaggtcccagccccggatgggtcatgccataggtgtgaggataaaccccaggtgactgagccttccaagaatgatgggtctgtcttcttgtctcaggcctcccttgagttaaggggatctaccctcgatctggctgtctagtgaggaggaaggtaagaagatagactcacccagagtctctgcagtttcatatgtaatgtctgaatttcagttgtcaagaagcaagaccaagacacaaaaacagatgacaacagtacacccacagatagttattatacttgttgcagtcaaattttaaaataactgtggttgatatgttcaagaaaataaagggtaagtggaaaatttcaccagaaaaattgattctataaacaaagtaatcaaatggaaattctagagctgaatctaataactcaatagatgggcatcacaaaacattgagtatgaaggaagagcagatgagtgagctggaagaaggtccctgggaaataatgaggcagagtaacagatcaaaactgagagaaagtacaggacggagtgtatgaggcagaggagatctgttggaaaggtctatatgtgtaggtggagtcccagaagaggagaaggaaaacagcttagaagcaatgtttgaggcgatgagagctatgatttttttcaaacctgaagaaagacaccaaagcttggattttaaaaaatctattatatagctattttaaaggtaaacaacagttgaatattggcagttttgtgtggttagttcaacctcacagaatgaacacaaagaaaaccctacctctgaacatcactctaaaattagtaaaaaccaaagtttaagagaaaatctggaaagcaagcagagaaaaatcataggaaattaatctctattgatgaattgtttcaccagaaaccatggagaccagaagtgtgatgaacctcgcatgtgatggaagaaaacaccccatcaattcaagttctctactccctggaaatgtttctcaggtataaagatgaaatcaagacgtgaccagacagacagaacttgagagactccatcaacagatgactcttaggaaaagacagacagaactcgagagactccatcaacagatgactcttaggaaaagacagacagaactcgagagactccatcaacagatgactcttaggaaaagacagacagaactcgagagactccatcaacagatgactcttaggaaaagacagacagaactcgagagactccatcaacagatgactcttaggaaaagacagacagaactcgagagactccatcaacagatgactcctacgaaaagacagacagaactcgagagactccatcaacagatgactcttgggaaaagactgcaggggcttctggcaggaggaaagtaaacccacatggaaaccaggaaacaaggcaggcagggatagcagtgggaactatcaatgggttggtaaatcaacacgaatattggtggcacagaaggtaaaggagttagtgttctcaggttttggcattatccaggatgcgataatgcgtgttacactaataagtcagggatccatgtccttttttgtggaaagaacatataacatgagatccaccctcttaacattttaagtgcatggcacagtattgttgatgacagccatgatctgtaccgcagatctctagcactcgttcatcctgcagaactaaaacttgatacccattgattagcaatacctcaccctgccccgacccagcccctggaaaccaccattcttctctctgggtctacgcattggactattttagatgcctcgtctaagtgaaatcatcagtgttatcttttctgtgcctggattacttcgctcagctcatgtcttccaggttcatctatgctgtcacttacagcaggattttcttcttttttaaggctgagtaatgtttcattgtctagatataccacatgtaaaacatccatccatctgttgatggacatttgggttgtggccacatcttggatattgcaaataatgccacagttagtgtgggaatgcaagtatctctttggagatcttgattttgactcttttgggtaaaaacccagagtggggttgctggatcaaatagtagttctatttttaattttttgaggaacctgtatactgttttccataaggaccttttgcattcccacaacagtatacagtcttcaccaatactcatcttttttttttctgataataggtatcctaacaagtttgatatgatagctcattgtagtgctgatttagattttgctggcgattagtgatgtcgagcatttttgttgtatacctgcagtccatttgtatttcttcttgtgagaaatgtctatttaggtccttttgcccgtttaaaaaatcaggttattttgtttttggttattgggttgcagcagttccttatacattttggacattaaccttttaaaaagttatacgatttgcaagtattttatcctgttctgtagattgccttttcactgttgattgtttcttttgcagaaactttagtttgatgtagtctcccttgtctgtttctgcttttgttgcctgagcttttggtgtcatatccaaaaaataattgctaagaccaatgtcatgaaggttttttcctatatttccttctaggcggtttacaggttcaggtgttatgtttaaggcatgaatccatttttagttgatttgtgtgtgtgtatggtataaggtaacggtccaattttgttatgtgcatgtgtgtatccagtttttctgacaccatgtgggatgtgatgtgtgttgcaccatgataaatcaaggtcccgtgttattatttctagaatagccacaaaaagaatagctaacaagctaagaaagggaatcaaaataataataaaaatactccatccagaagaaagcaataaaggataaaaggaaaaataaaacagatgagacaaataaaaaaacaaggtaagatagtcgatataaatcccaatatattagtaatttcattgtaaataaatgagataaatactccactcaaaaattaaagattgtcactaaaaaacaaaaccacactgcttgcaagggaccaccttcaatgttgagatataaaagtttgaaacgctggaagagaatacaatgaaaacactaccctaaagaaagctggtatatctaaactaatatacaaagtagatgttaaggcaggaagcattttccgagataaaaagggccataataaatataagggttggtctatcaggaacacacagtaattataaatttgatgcacctgatataattttcaaatgtataaagcaaatattgagataattaccggagagaataatgcacatttttatgcatgtttgtttttattattggtgtgtgtgtcctgtcatgtatttagagagacatgctgaagcaggtctgaagaacgggattaatggccttgatctaatggacacactgcaactatcaaaatagaacctgtgttcttttccagtgcacacagcatacatattgaaaatgaccatctattagacggaaatgttttgatcagataaacaaatcttaacatattgctaaagattgaaatcattcggagtatttctttggccaaagaaattaagctaaaaacaaatggaaaaaaaaatccctagaaaatctaaatgtttggaaattaagcagtactcttctaaataccccatttgtcaaagaagaaatgtcaatagaaatctgaaaatattgtgaactgaactataataaaaatacaatattaaacaattttgggaattttgggatcaagttaaagctatggttagaaataaattataaccttagatgcttttattagaaaagaagaaaaggtgaaaatgacatatgtctaaagagtgtagaaaaagaacagaaaattgaagttaaagaaatataagaatataataaaaagaaaaataatgtaatagaaaacaaatgtacggtagagagaatgaacaaaaccaatcattgcttctttaaaagatgtgaatatacacttctggcaaggctgatcaagaaaaacagaaggaaggaccaacttaccagtgccaggaatgaaaagtggacatcgctatcaatccgtatcatcagcagcttttgcctgtaaacttcagaataaagtgacaaatgtagctatgtattttttttaccctgtgatcaaataatagcactcctagatacatgtattcccaacagaaatgcagactgaggtatgcaaaggacatgtacaagaatgtgcctagcagcttggttcgtatctgtggaagctgaatatatctgtcttttatggtctagtaatcccactcctatgagtacatacccaatagaaatgcatccttaaatatacaaaaaggcctaagaatgttcccagcagcttgatttataacagcttacaactgaaataacttacacgtctatgcacaggggaatgtagaaataactgtgggatgttccatgcaattaaatactacagagcaataaaaaaccaccagctactgttgtacagagccacacaggtgactctcacaaatgggatattgcgcaaagaagccggattcaggagagcagagagtgtgattccacggacctacagttcaaacaggcaaagctgacgttcagcctggaatttagaatgatggtgactgagaggatgggggcggggcttgtgggttatgaatctatgtctgggtgggagtgtttgttctgtaaacatttgtcagggcgcggggcctcttcccccttcctcgttcctgttttcactccaggtcagtcaccaggtgtttcttttgtagcaggagtgtaagccattctagtgagggtgaggttgtcttaagctctgttttatgggggttgcatctgttctgagctggccttgctcctggaaatcccgggccaggctgcgtcttcaggcagcaccaagctgtgtacttctcactggtgaacgctttggaatgcatagtatctcaacaaaaagtttgtaaagtgatatttctaatagctgttgtttgtttgcataatactttaaacatattccaggagcttgaaaacatattatctttactgatagtctcagaaaaccttcgcaggaggctgcaggcgtttaagtgatgtttgccttccctggtagaggtggggcctgggccagagcttgcaccctccccctcctgaacactgttccaagacgacacagaggttacattttcatgaacaaaacgtttgaaatccgctatctgagctctgtgttacaggactttgtcgtttgtagtcagccctagcttgagaggtttggatgcttgttcagggaaggagcctgggatcctggagcgcccggtgctttcgccctggctcaaggccccgccgctcctcatgagtcactgtgtgtggttcccctgaggatctggggaaaacctgtgacgtctccctgaccgtgtcgtgtttctcttctccctcacacgtcattaaaggtccagcgagaactctgagtcctccccgccctggacaaggcatcccgtgagtcagccagaatgttccgtggtcctggctgcagtgattggctcaggaggggtcatgtgaccaaaggggatcctgttagagtggattggactctgaggatgctggacgagaatctgcatttctgctcaggtgggcttgtcactgctggcacttgagggctggtgttggtgtccagcaggcaggtcagagagagggacgagcaggtcccggataacatgatggagcactcagacacagcttcccctggcaccagcctgtccctcgggtgggtggctgtaagccagtgtgtgcccagtgtgtgcccggtgtgagccagtgtgtcctggtgtgtgcccagtgtgagccattgtgagccagtgtgtggccagtgtgagccagtgtgagccagtatgtgcccagtgtgagccagtgtgtggccagtatgtgcccagtgtgagccagtgtgtgctcgatgtgagccagtgtgtcctggtgtgtgcccagtgcgagccagtgtgtggccagtgtgagccagtgtgagccagtatgtggccagtatgtgcccagtgtgagccagtgtgtgctcgatgtgagccagtgtgcctgctgtgtgtctggtgtgagcccagtgcaagccagtgtgtgcccagtatgtgcccagtgtgtgtcgtgtgaggcagtgtgtgcctggtgtgagccagtgtgcccagtgtgagccattgtgtgctcgaggtgagccagtgtgcctggtgtgtgcctggtctaagcccagtgcaagccagtgtgagcaagtgtgtggccagtatgtgcccagtgtaagcctggtgtgtgcccagtttgagccagtgttgagcccggagtgagcccagtgtgagccagtgtgagcccagtgtatacccagtgtaagccagtgtgggcccagtgtgagcccgctgtgaggcagtgtgtgcctggggctcacgctggctgggatcttttctttgatctgtcactgaaaacattcagataagaatttggttctgatttgcttggaatcacacagtgaagaatttgaacttgctttcctcagtccaagctctttgcatttgtcatgttctggggtcttgggtggtcctcgttagccagctccctcaagggctgactggagtcaaacatgtctgctctggttctgctcaaacatgtctgctttggttccacggtcagacacagccagggtcagatggccactgcctgggggtctccgtccagagaccattctgagagtgtggggggctcttcccccttcctcactgctgttttcactccaggtcagtcacccggtgtttctctcatagcgggggtgagctgggttcaagctgtcatgggagttgtgtctgtgctgagctggccttgcttcctggaaatccaggccgggctgcggcttcctgcagtgacacggtgtcggccccacaaggcaccgagtgggctttatggcttcactggtcccgcagccatgctgcgtctcttgtggtggagacaccaccaaatgttccctgtcaattaggacaagaagcaatgcactcccatgcagtgatcttgactctcagagcgggaatccacagggagggggtgccgcgctgagccgtgcgaggccccgcaaaccacagagcgcttctgggaacatgcccagggtccacaaaccccagagcatttctgtgaatgtgcctggggtggttttcatcttcaccagagacttcccacaagtggtaccgacttccgggtctacaggcccctcagcctgtgagcgccagcaggctgctctccctcacctcatcccatgctgagtttgtgcactctttagcccactttcaattcagttggattcttctgctgcttgggatccttacaaagcattgttgtttaagaaaacttcatgtcccagctgggcgtggtggctcatacctgtaatctcagcactttgggaggccgaggcaggtggatcacaaggtcaggagtttgagaccagcctggccaacatagtgaaaccccatctctactaaaaatacaaaaattagctgggcgtggtagcgtgcacctgtaatcccagctactcaggaggctgaggaaggagaattgcttaaacccaggaggcagaggttgcagtgagccaagattgtaccattgcactccagcctggacgacagagcgagactccatctcaaaagaaaaaagaaaagaaaagaaaaagaacagtttatgtcccacgagtacggctacacacatcttccttttaaatgatcacttttgtttggagatttggacttgacatttcaggccattagctcaccatccatggcctgttatggaaacccactcctgcatccatctgtattaagattgcatttaataaaaaagccatgaattagtgaaaaaccagaaactgagttgagcccatctttccatatgtttgcctgctggcggtctggagctgagttctttcctctcagacagggctctgctgttgggatggccatgtgcttgagcggagggtggcaggagggaggtgggaccaggccaggctctcccaggccgggaatgagggagctagcacatcaccagcgggtctaagggtttgtggaagctgcagtggggacccagcattgggctgacggtccgtgggaacgaggcagagatggtggtggagctgggtggtgcagagagtgcctgatggcgggaaggtcctggagaagggatgctgagctctgagctgcaggaggaacagctgctaaggaccagcgtggagagcctagcaccaccttcctaaggtttcctttgtgccggctgtggatctgctggaacgtgttcttccctggagatgtgggggagctcctgctgtggagagaggtctcagatgctgcctcccagtgctctcggcttcaggaaagcctctcgactgggtgacagccccaccctgcccctgaatgggtagggcacctccgaaacacatcggttggatccggaagcatgttcttagtacagagcagttagatgagactattacggtttagcaagcgagacagccagtgctaggagtccaaagccttggtctcagttcaggcttggccaccaacccgccacgtgcccacaggttgatgtagctggctcagctggaactcgtaaatcctcccacaccctgtttttcttgcagtaaggctgtcccggcaccagggtgcagctgggatgcccccaggacgatctgcatgacggtagctgcttttataatttccattgccatgaaaaatagctgtctttattggaaaagaccctgaaagaagcgagtaagtaacatacagacacggtgactgaacttccccatcagaaccaggaaggaactctgtcactgaactgtgactgcctccgttagacttggttcaccgcccggcccccttggatcactgactaaaaacgacccgactgtgtgaaacagaggcctggtcgagtaatggtgactctgtgacagataccttgcaggtactaaaattatacttcttaggagtttcttaagaacataagaaaattccggtggaatagtgttaaatgacaaaggcagctgtaaaagtgtcccaatactgcgatctcaaccatggagagaaacagccaatgccagcagccgtttcctcagatcggtgggttacaaataattttagttttctcctttgcagtttctgtgcggtggcacacatcgtttaaaaggacaacccggtgacttccctaagggttcccccgagggtcttgctgccgccctcgtcttctgagccaccaagagcaggccccttgtcttggatgcgctgcgagtcacgtccgacgccgctgtgccttcaccacctcatgttttattactgttaaaaatgaatgtttttccattttgggatgagagagtgccccagctcccctgccctcttacaggagtgaatttcattcgtggccccagtttaaagacactcggattggcttgttggtttcatcataaccttctttaaacacttggtgacaggctaagagaacccctgaaatcagaatgtaagtcctcggcggagttaggtatgcaggactcagctaggctggtctcggactctgcgtctttcccggcgctgtgcaggcctcagctaggctggtctcggaccccgcgtctttcccggcggtgcgcaggcctcagctaggctggtctcggaccccgcgtctttcccggcggtgcgcaggcctcagctaggctggactcggactctgggtctttcccggcggtgcgcaggcctcagctaggctggactcggaccccgcgtctttcccggcggtgcgcaggcctcagctaggctggtctcggacaccgcgtctttcccggcggtgcgcaggcctcagctaggctggactcggaccccgcgtctttcccggcggtgcgcaggcctcagctaggctggactcggactctgggtctttcccggcggtgcgcaggcctcagctaggctggactcggaccccgcgtctttcccggcggtgcgcaggcctcagctaggctggactcggactctgggtctttcccggcggtgcgcaggcctcagctaggctggactcggaccccgcgtctttcccggcggtgcgcaggcctcagctaggctggactcggaccccgcgtctttcccggcggtgcgcaggcctcagctaggctggactcggactctgggtctttcccggcggtgcgcaggcctcagctaggctggtctcggacaccgcgtctttcccggcggtgcgcaggcctcagctaggctggactcggaccccgcgtctttcccggcggtgcgcaggccccagctaggctggacttggactctgggtctttcccggcggtgcgcaggcctcagctaggctggactcggactctgggtctttcccggcggtgcgcaggcctcagctaggctggtctcggacaccgcgtctttcccggcggtgcgcaggcctcagctaggctggtctcggacccgcgtctttcccggtggtgcgcaggcctcagctaggctggtctcggacaccgcgtctttcccggcggtgcgcaggcctcagctaggctggactcggaccccgcgtctttcccggcggtgcgcaggcctcagctaggctggtctcggactctgcgtctttcccggcggtgcgcaggcctcagctaggctggtctcggacaccgcgtctttcccggcggtgcgcaggcctcagctaggctggactcggaccccgcgtctttcccggcggtgcgcaggcctcagctaggctggtctcggacaccgcgtctttcccggcggtgcgcaggcctcagctaggctggactcggaccccgcgtctttcccggcggtgcgcaggcctcagctaggctggtctcggacaccgcgtctttcccggcggtgcgcaggcctcagctaggctggactcggaccccgcgtctttcccggcggtgcgcaggcctcagctaggctggactcggactctgggtctttcccggcggtgcgcaggcctcagctaggctggactcggaccccgcgtctttcccggcggtgcgcaggcctcagctaggctggactcggaccccgcgtctttcccggcggtgcgcaggcctcagctaggctggactcggactctccgtctttcccggcggtgcgcaggcctcagctaggctggactcggaccccgcgtctttcccggcggtgcgcaggcctcagctaggctggtctcggactctgcgtctttcccggcggtgcgcaggccccagctaggctggtctcggactctgcgtctttcccggcggtgcgcaggcctcagctaggctgcacttggaccccgcgtctttcccggcggtgcgcaggcctcagctaggctggtctcggactctgggtctttcccggcggtgcgcaggcctcagctaggctgcacttggaccccgcgtctttcccggcggtgcgcaggcctcagctaggctggtctcggacaccgcgtctttcccggcggtgcgcaggcctcagctaggctggactcggaccccgcgtctttcccggcggtgcgcaggccccagctaggctggtctcggactctgcgtctttcccggcggtgcgcaggccccagctaggctggtctcggactctgcgtctttcccggcggtgcgcaggccccagctaggctggactgactctgcgtctttcccggcgctgtgcaggcctcagctaggctggactcggaccccgcgtctttcccggcggtgcgcaggcctcagctaggctggtctcggaccccgcgtctttcccggcggtgcgcaggcctcagctaggctgcacttggaccccgcgtctttcccggcggtgcgcaggcctcagctaggctggactcggacaccgcgtctttcccggcggtgcgcaggcctcagctaggctgcacttggaccccgcgtctttcccggcggtgcgcaggcctcagctaggctggactcggactctgggtctttcccggcggtgcgcaggcctcagctaggctggtctcggaccccgcgtctttcccggcggtgcgcaggcctcagctaggctggtctcggaccccgcgtctttcccggcggtgcgcaggcctcagctaggctggtctcggaccccgcgtctttcccggtggtgcgcaggcctcagctaggctggtctcggaccccgcgtctttcccggcggtgcgcaggcctcagctaggctggactcggacaccgcgtctttcccggcggtgcgcaggcctcagctaggctggtctcggactctgggtctttcccggcggtgcgcaggcctcagctaggctggtctcggaccccgcgtctttcccggcggtgcgcaggcctcagctaggctggactcggacaccgcgtctttcccggcggtgcgcaggcctcagctagactggtctcgtactctgcgtctttcctggcagtgcatcagcaggactttcagcctattgttttgggttcttagcagcaatgaacatgattgtttttgtcttaaggcctcaagtgatggccacatgaaggagggtcccctcctttaccgacagtcacctgatggtggatggtagttataactacagaatgccttctccgaaacacccgggccccagacctggtgagctggtatgggagattaggctgatggttaatgcctgtgggccccgagatccccggaccttcttgagggtgctgagcacacctggcgtgggagattaagctgatggttaatgcccctgggccccgaggtccccggaccttctcgagggtgctgagcacacctggcgtgggagattaagctgatggttaatgcctgtgggccccgaggtccccagatgttctcgagggtgcggcacatgcatggccactggggccaggcagcagcatcgtgcttgactctgctctcagggctctcagggccgcgctctgcgggcgtctcagtccccggtttgaagagcattttctgaccactgggcattacgcgtgctggcatgtgtgtatgagcctgttccgtacacacatatgatttgtttgaatgtagccagagacaggttaatagaggaatcgggagagtcagttctttcactaatattcatctccggtggtcacagacgttgtccctgtttttgtgtgaagtgatgttcactcggcccccggagctagtgtgttataatcagactttgggagcaataaacgttaacaggcagagtttctgaaaacgcctcgctttgctccttgacggaattccattacagctgggggaatcgatacgacgccttgcttcattattgcttttcttccacgtgggcagttgcttaataaagcccgaagaacgggccgcaccgaaaacagaacgggatggtgccaggtgcctcccctctctggcctctctgcatccacctgtgggatgcgccttgtgtacgtcacagagcactcctgcgccacacgtaagcctgtgtccaccctggagaaatcactgggcgcctggagggtggtccagcaggttccggaatccgacggctgcctctctgctcggagaccttggagctgtttagcctcttccgaattaatctttctcgtctaaaaaagtgaaaataaggtaattaccaccttagaggggagttgtgaggattaaaggaaatgatacatgcaaactacagaccacagcagaactccgtgcaaagcagttttcaggattccattccagtgttggccgtaaagggactgtaatgtcccagtttctctttcctcatctagaaaatgaggggctggatgtggtggctcatgcctgtaatcccagcactttgggaggcggaggtgggcggaacacttgaggtcaggagtttgagaccagcctggttaacgtggtgaaaccccgtctctactaaaaatacaaaaactagtaatctcagctactcaggaggctgaggcaggagaatcgcttgaacctaggaggtggaggttgcagtgagctgagatggtgccattgcactccagcctgggtgacagagtgagactttgtctcaaaaaaaaaaaatgaggaaccagaggggctaatctctgagacctcttcccctctaagaacattttcgttgagacattttgggagtgccctgggcaggacaggcagggcactggagaggaagctagggcgggaccatttcatgtccctagggttcaccgtgtccccacgaggtcatgggtgctccccggaaaggtcaggcttgcatcactcagcaaaggaaggttactgtgggtggagggaagccccccaaatccacttccttcactgccgtgctgctcaggtctggcccagcagcaggggatagaacatggatcccggtttctcccccgtggtttctcttgggtttcttgcttgtttcccagatgagttgatgtatacagtttattcacggatcaaggctcatttctttgctatcttaacaagtgacagcgttggagataaatttgcattttgtggtgtcacctcaggcttccttgttgctttgggctgagtagcagggatggaacacctgtggtctcgggtttatcggccatggttcctatctgggaaactggcgtgggccctgattggctatcgtcaccctctcctcgctttatctctggagagcagcaggagtgtgcagtggctttgaagcctttctttgtctctactgaccatgcaaattacacaccaactacttgtaagcttgagctcctgtgagctggccgagctcgggaagattattgagaccatgtccgaatggtggccccagaagccggcagtgtcagcccaggtgtgacggagaccacatcccaatggtggccccagaagccggcagtgtcagcctgggtgtgactgagaccacatccgaatggtggccccagaagccggcagcgtcagcctgggtgtgactgagaccacgtccgaagggtggccccagaagccggcagcgtcagcccaggtatgacatcccgtgtagctgctgaggccttcagatggcatttgctctttcatgtggactacagggtttctttttcttctttttccttctttctatcttccttttattttactttctttgagacatgtaagagtatgtgtgtgcatctgaaatgagaatctggcagcattcagagttttccggctcaattccgtgtccagatttgaaattcagaaaatcagatggtgttggaagctgccattgatggggtttgttggtacttctcaacctgccattccagctctccccaaccaagctggccaaagagttcaagccttttgcagagacgtggatgctgtcttttgctgtttaagaacctacctaggatttgcattctgatctgcatttcttaaaaggttgactgaaattcagttccttgtagtctagctcctttgcagtttttgatctctgaggaagattcagtcagctcgtaaaattaatggattctagcaaaattgcgttttagtgatacttttcagtagatattctgtgaaaagtggatttgaagtatttctgtgatgaggctcgattattaatgcagaacttgattgccaagaaccaaactacctccctcatcagtaacttggtctctagcttcagcatctgttgcttgaatatttcacagacctgaaaatgaaggtgggcccaagttgttcagggttaagacaaactttatttttttaaccccaaaccttagggctaataaaaattctttattagaatgcccaaaggcattgatgaataggtttggtcactacttttaaatgtaaaactttttaatttcagttccatctcatttacatcaaacagagcatatggctcccaaagcagcccagaacatgctgcggagaaaactagcaatttactccacgattcagcttcatttttctttcattttcatggaaaccataagattgtttttgtgtttcaaatcaaacatgtttttgagcaaagagtacattacccagctgtcctaaaagcagaacttatcactgttcagatttaatccaagccatctgctgcgtttctttctttccatttatttctgaggcacatcacaggaaagctgcttcttgacatatctcacttggagaaactacaaagaggaaaatatggcaaaaactttcaatgtcgctttgtcgatgcactttgcataaataatgaaacgttgccctccgctcagtgttcaaaaacccagtgcttgtcaccccaactttaaaataaataggaaaactccaagaaacaaactcagccttacatgttcatttcctaccagggtgggtgtcactaatatccacaggctgagctcttttttcaagtgtgattccagtcagcttttcaaccaaaggcctgagagctgtgcaggacatgacaggtgcaccaggggaccaccagccagaatgggagcaacaaggggtgcggctggccctcgattccaaagcctggactgaagatctgagccacacacgtctaatggggtacgggaatcctcagtccagaaatgaccttgaactcagatacttgagcagaggatgacatgggcagaactgagtatattgtgctttctaagatgttatgggtccgatcaagaatgggaaggtgatccctggaattggacatctctgtcaggccctgttggaacccagggcgtctgtaagccacaaccgcctgtgacctgcccctcatgcaactgccacgtctcatcaacagggacgcggaggaaactgactccgagccgtcacttcatccccgcttccatggaagacatgctgcttacatatttcacaaatgtggccggagaagggaggcaggaaccactcagtcactgggattatcttctgggaagcccactcggatgatggggagtatcttctgggaagcccactaggatgacaaggaggacctcatctgcatggctcacagccatgacagcttgggtctcagagggaagggaactcaggggcaatgcgcactggtgggattgcttatgcacgatatttgtcaagccatctctttttgtaaataactcttctcattaaaaacataaggcagctttgcaactatgctgatctcattggcttttggtgaagaagaaggaatgtgtgctggaccctgtgcctgaagctggagtcccaggtaccccaagcccaggaaaagacaaagccaagattctatgttctgaaaggagccaaatgtggctcagttgccctcaaaggagagaagatccaaggtaacccgtggtcagcaagagtcagagggctgaagctgtgcctgtggtgttggctgaagactgaggggccttttcgcgggtgggcagtctcttcctcctcactgcagctttggggtgctgatgctctgagttcagggtaaggccagctcgccgtgagacaatgtgtcctgcctgccttgggaaggaaaacgggaggaattgggagggagaacatgttcccagttctttactcactgttgtgctggacacaaatgtggcaggaacctctgataaaatgccccaaagctctggagaccttaggggtcaggtcctgtgcacaagattgtaacagtggccaacatgacagagtttcaacagatgcctgttgagtaaagaatgcaggcaccgaggttcaggcacagctcggggtccaatgctaacataggtggattgcatcaccagcactggtgtcagtgggccttttccttcaggagtgggctttgaagtaatgactgccacttcttttggatttggagataataaaataacgaagtgctgagcttccaagtccggtcagacatcacgtgtgagcttctgagtccggtcagacatcacgtgtgatcttagaaatccctgagtggtgaatgctggccacaccgagtgctggaggcttgtgaattcgactctcttctccaagtcctccatcaggtatttcactcattccagctgcagtgctgcgtggtgaggctcctggcgtgacatggaaggagggctgtgtgagtcagggctgacactcccagagcagggaatgggaaagagagcagccactctgctgccttcccatgtggaagggtctgtggagctgggcacctccgagagtcccgaggccccgtgcacttgactgagacttcctcagtctctgatgagtgattacggcagtgacagaattcttgcaatgatggaattcttgcagtgaaggaattcttgcagtgacggaattcttgctggtgacagcttatataatgtttgcaaaacagccgttttctaaaatggagctttccaggccaaaaatgcttgatgtcaagaaaatgacttttagctttgagatagcatctgggtctaatttcagaaaggtgggtctacacacaggttactgccaaggacacatgtcttcaggctccagaaccctgcctcaaggctggcaacaccacagctgcctgaaatgcaatatttaaacacagaaccttacaaaagatggcaagagggtcagagtcaagcacaaaaccaataccaggttgtacctcattgcatggtgaaggagaagtggcaaggactatgtgagccactggaataacttataggaaaatgaggattgtttcatgacctgtaatgttgtgaaaacgttacaaactcttataatctaagtgtgtatggaaatgaaaacagtgagtctgacaatgatgtagtacactgtgacaacacagtgggacagtgagagctacagcatcttgatgtagtacaacatgacttaacacagtgggacactgagagctggagcatctcgatgtagtacaccatgacttaacacagtgggacactgagagctacagcatcttgatgtagtacaccgtgacttaacacagtgggacactgagagctacagcatctcgatgtagtacaccgtgacttaacacagggggacactgagagctacagcatcttgatgtagtacaccgtgacttaacacagcgggacacggagagctacagcatctcgatgtagtacaccgtgacttaacacagcgggacatggagagctacagcatctcgatgtagtacactgtgacttaacacagtgggacacggagagctagagcatgtcgatgtagtacaccatgacttaacacagcgggacactgagagctacagcatctcgatgtagtacaccatgacaacacagtgggacactgagagctagagcatcttgatgtagttcaccatgacttaacacagcgggacacggagagctagagcatctcgatgtagtacaccatgacttaccacagcaggacacggagagctacagcatctcgatgtagtacaccatgacaacacagtgggacactgagagctagagcatctcgatgtagtacaccgtgacttaacacagcaggacacggagagctagagcatcttgatgtagtacaccatgacttaacacagcgggacatggagagctggagcatctcgatgtagtacaccgtgacttaacacagtgggacactgaaagctagagcatctcgatgtagtacaccatgacttaacacagcgggacactgagagctagagcatctcgatgtagtacaccgtgacttaacacagtgggacactgagagctagagcatctcgatgtagtacaccatgacttaacacagtgggacacggagagctagagcatctcgatgtagtacaccatgacttaacacagggggacacggagagctagagcatctcgatgtagtacactgtgacttaacacagcgggacactgaaagctagagcatctcgatgtagtacaccgtgacttaacacagcgggacactgagagagcatctcgatgtagtacaccgtgacttaacacagtgggacactgagagctagagcatctcgatgtagtacaccgtgacttaacacagtgggacactgagagctagagcatctcgatgtaggacaccgtgacttaacacagtgggacactgagagctagagcatctcgatgtaggacatcatgacttaatagagtgggacagtgagagctacagcagcatctcgatgtagtacaccatgacttaacacagtgggacactgagagctagagcatctcgatgtagtacaccatgacaacacagcgggacactgaaagctacagcatctcgatgtagttcaccatgacttaacacagcgggacactgaaagctacagcatctcgatgtagtacaccatgacagcacagcgggacactgaaagcttcagcatctcgatgtagtacaccatgacttaacacagtgggacactgaaagcttcagcatctcgatgtagtacaccatgacttaacacagcaggacactgagagctagagcatcttgttgtagtgcactgtgacttaacacagcagggaaactgagagctacagcatctcaatgtagtacactgtgacttacaccaggacactgagagctacggcatcttgatgtagtacaccacaacttaacacagtgggacactgagagctgcagcatcttgatgtagtgcactgtgacttagcacagggggacagtgagaggtagagcatctcgatgtagtgtgtgtggcacttgaatccttgtctaggctgtgatagttgtgagcattctccccatggcttgctgagtgtcaatccctttctgagtctggattgccctccaacattttgtgctttgccattttgtggtggtgaagtgcctctgagtgtccctttactgtgaaggtcttattgccccatttcccctggatatcatcgtttccctcacagccacttccctgctgtgtgcggatgagttgccttccttaggttcctgcagcaccgtgagtgtcccacatggtagccagtctatgtttcccagcaggctgtctgtttcctgccccctggcctttctttggaatttcacttccagcaccatcccttttcattctctggtgcacttatatctttgtttgtctgttctttcttctgataattcacttctgcgaaatgttgtttggtttctccctgggagatgatgtggccacacagctccatgctttgctgtctgtgctgagctgagtgacaggcaccctggccaatccccatgcagccaccaatcccacatggctgttaacatgtggtggtttgttgcctacacctggcagcacactttgtactttatgtagttactcggttaacatgccatgtaattgaaatctggactgtgtggttgggggctgggggtgcatatctaaactttggccatgtatccctgtgggttgggcctgcaagggaggacagtcggatgcaatcagatcatccaccacagttgtcccaagcctggctgactatggagtgaagctggattcccattcctgggccccaaagtggaccttcacagaaggcttcctccagtgcatggggcccagggaaggcacctgtgtggaaagtatttagggatggttcaggtgtgcagtcaggcttgggaaccgtggattgtaggatttgctgtttctgaaaccaacaccaaaggtggatgtggaagagaagaaaccagaacctaacacttagattcctagaagagacaggactgtggtggctgccaccagacacgtcatggggatgtggagccccagccacagcagacacaggggtggcaggggcttctaggggaccacccagccctctgaggaatgctctggtattgaaaatccttagagacaatttatgaactactctgaagtcccttcttagtgactaaaactaggctaaatcacctgatttgtttaatttttccttaagaaactttctcatttatcaattgaatgaggaagaggcatgggtggcctgcatacttcattgagggtctttgacgaggatttgcgtgtatgggatattaatgagccattgtagggtggggtggggggacaagtcctcaacaataactctgaggcggggcccgtggtatatgcagttcttgttggtagaatgggcccatggttctaaaccctttctgtacatccacagtagctgggagtgctcagataagtctggtaagcaggccgcactccggagcagtgacatctgaatctggtggaggtggggcccaggcacctgcattttcagggtcccaggtggtgtccagtgtcatccagggctgaagcagctggtgggggcttagagaggatggtgggtagggcctggggtgacccttccaaacccaggcagcaaggctgctggctctctcccctgaggaaggaaagcaggagggtttcttgaagccacctgctacaggttgtttttgtttgtttgacgtcattcatcagctttgcgtctcttcaccaatactgtcgctggggcccagagtggggactgcagagtaaagattaattgggaagcagggagttgaggtgtggtttctggcctcttggtaggtcaggaaattagctgtttgtatcatcagagaagtagctggttgtatcatcagagaagtagctggttgtatcatcagagaagtagctggttgtatcatcagagaagtagctggttgtatcatcaggaaagtagctggttgtatcatcaggaaagtagctggttgtatcatcaggaaagtagctggttgtattatggctggagtgctcagctcctgttttccttgcaggcttttgtcccaggcagaggtaccttcccccgcccctcctcatgtggatgactggtagtgttttccttacagcacgctggctcattcagttggtgtgagggagctggctggatggagatgctccggaagcttcatcagtggatgcccctcccccactttcaacacagctcccagcgttcagtggagcctcgaagaatgagccacattgatgtggccagggcgggaggcacggcacaatgccggcaattatgccagatcgaggacctcggtggggacagctttttgggccgtggaagcgggggcggcctccagcccgcatgtgagctcgtgccagcttcttcctaatgggaattctcagtgggtggctctgatgtatgacttacagctgagcccggagaacatctaatttcctttgcagctctcttcctcacagatgcaattactgtagtgaaatctggtccaggaggatgggatgggattctattttaaggttatttctttccttcttaggcctgaatagccattgttaaccgcccgggcaccctcctggatccgtcctttggggcttaatgctccagcccgttaattctgctctttaaattctcacaggtgactgctccctgtcagcccctttgtcttaacctcatggtttagtgctgctgtcctcactcctggtgtgccctgcatcatcgggagagctctgctatgggccgttcggggttgagcacctgattccctacgctctggaagtgcacggtactcacttggtagaggatttgctagaaccacagttctccccctgctggaacactaggaatccccttgcttcctttttttttttttttttttttttgagatagaggctgtctctgtcacccaggctgaagtgcagtggcacgatcacggctcactgcaacctccgcctcccaggttcaagtgatttagtagagacacggtttctccatgttgaccaggcttgtctcgaactcctgacctcaggtaattcacctgcctcggcctcccaaagtgctgggattacaggcgtgagccatcacacctggcccttgcctccatgtttaagggtggcccaggttgagctgaaaaggctgggtcaggaccgctgggcctggacacacaagtgcttcctgtgtgtcccacaggctccccagcacccgcaggatgggcccgttctcctagttttacagacaccaggctgagagactggggtcctcatctcccacccacagaagtcttcccactgttagtcctcccgggagaggggtgggctcgcctgctgaggtcgccatggagcccacacggggctttcccgttcaggcctcttgagccctgccatcttctgggaggggagtcggaaaaggttaaggacaagagatcctcatctgtgttagtcacaggcccagagtggacagtggccagtttcctagttgagaagaggacttggccaattgggggccatgttaggcccactgcattttatttccttaaagacaatgttttatttttttgtgtgcattcgggttcagatgctaagtgagctgtttaggaaatgtaaacatacattcaaaattgaattatctttccttttctcgtgagcccctacgacttattacaaatgagatacaaaggattgtttttgatcttgaacccaactttggcacaaaatttgtcttgctgtggattttcttgtgggtctggaacgagcttgcatctgttatcaagtctgctcagtggcgagagggaagggagccatgttgaggagggcgctggatgggtcctggagctgaggagggtgctggatgggtcctggagctgaggagggcgctgagacgggccctggagctgagaagggcactggatgggccctggagctgaggaggccactggatgggccctggtgctgaggagggtgctggatgggccctggagctgaggagggtgctgagatgggccctggtgctgaggagggcgctggatgggccctggtgttgaggagggcactggatgggccctggtgctgaggagggtgctgagatgggccctggtgctgaggagggcactggatgggccctggagctgaggagggtgctgagatgggccctggagctgaggagggtgctggatgggccctggtgctgaggagggtgctgagctgggccctggtgctgaggagggcgctggatgggccctggagctgaggagggtgctggatgggccctggtgctgaggagggtgctgagatgggccctggtgttgaggagggtgctgaggtgggccctggtgctgaggagggcactggatgggccctggagctgaggagggtgctgagataggccctggtgctgaggagggtgctgagatgggccctggtgctgaggagggtgctggatgggccctggtgctgaggagggtgctgagatgggccctggtgctgaggagggcgctggatgggccctggtgctgaggagggtgctgagatgggccctggtgctgaggagggcgctggatgggccctggtgttgaggagggtgctgagatgggccctggtgctaaggagggtgctgagatgggccctggtgctgaggagggcgctggatgggccctggtgttgaggagggtgctgagatgggccctggtgctgaggagggtgctgagatgggccctggtgctgaggagggtgctgagatgggccctggtgctgaggagggtgctgagatgggccctggtgttgaggagggtgctggatgggccctggtgctgaggagggtgctgagatgggccctggtgttgaggagggtgctgagatgggccctggtgctaaggagggtgctggatgggccctggtgctgaggagggcactggatgggccctggagctgaggagggtgctgtgatgggccctgcagctgaggagggtgctgtgatgggccctggagctgatgagggtgctgcgatgggccctggcaggtgtgttcttggcccacgcatgttctcagccccagtctcatgtgcgcagcctcatttcaccctcacggcagcctaacgagatgggcctattgtcccctgagccacagagaagcagcccgggaggaaggccagtgactgacctgggtcacagagcagctgagtctggataagacctgggccctggcccctgagaccatgctcccatctgaggcgggtgtgagtgccgcggggcggcgccttccacctccattggcgttggttggctgcttggtacccaggtttcccaacttgaagttgagtgcttagtgtagacaaggacagcgagtgagttctgatgctgccctctgactggctgtgttacctgggggatcccatctcccacgggaaggggacccctgttcccgggacgacagcaggacttgcaggtgccttggctcccaggaggtgagccgtgagtgctggggggaccagagagtggtggccgggcatgtgcaagggcccaggggaccaggaggtgagaccccagaggctgctgaaggagctgtgaggacccagcaggggcagcagtgcgcagtgccaggccccgcacttcatcacgggaagcgactggagatgtcacctcatttcaaggtggccggaaagctgtggctgcacacatctttacgtggggaagggagaatgaacccactgggaagcgtgtgaagaagccgtgggaggcagaaacggagctgcgtttggttgtaagggatggggtgctcatgggttttgagtgcctgctctgtgaagggtcccatgacacagaaacaggtggaagagcgaggcctcctctcgggagctgcaggagtgaaaataaggctgtgccagggaggagagggccccgggttcgcaggggcagcccagcctgtccggatctctgtggcctgacaccaccaagtgaatttcctactcacgctccatgtctggggtcacctgggtgcttgtgtaccctgtccctccggggcctcccaccccatgagcacactgtcccgtcaccccttccctgtgtctccgtgtctggggtcacctgggcacttgtctgcactgtccctccggggcctcccacccgtgactccaccaacaccccttccctgtgtctccgtgtcttctcctctccctacagggacgtcaatcactacatttagggcccaccctggatccagatgatctcacctcaaggtccttcaataatgaggtctgcgaggaccctgtttccacgtagttacattccgaggctctggctggacattcccagagaagttaagagccactcgtggttttgttatttcactttaccgaagttggggaaaccgaagcttagggaggctcaccttgctcaaagcctgtagtttgagacagactgggagcctctgcccttggtcaccccacatgcctcagagtcgcagaacttcagggccagaggaaaccttaactggagctggaagtgggctcacaggtgtctactctgtcacttcatcccacgagaaggagattaattctcctgtctgtagtcacctgggtactcggggatgagacgagggtgactctggcatcgtgacctcattctgtgtcctttcccccacatctcctgccttcgggatgacagctgtgtcctgagtgtcgtgttaggttgacattttggtgtcgggagaggctctctagagagggagcgggccttgtgtggtgagggtagcttgtcagatgcttgaaggcagagagggtttggggaggtggctcagacatgggctgtttttctttttcttaaatggagggaaggtggccagagactgtggaggtcacccggatgaactccaggtctgcctgcagccgtaggaggaaaccgaaggagtgatcaggctgaatctgcggggacgcctcggagccacccaggctgttcagcgaacctcaggcagctggggctgtgggggcacaccccatcttctcaagttttcagaaaactttggaaggcaagttcatggaagctgctcaaaaaaacactagctttattattattttttaaagccagattttttgagaggcgacgtcaacacatcttctcagctctttatgtcaattcttaaaacacttgccagattctgcaggacagttctgaatgtcggcatgctctgtgagggcacctgttcttcagagcgagggtctgagggggcctgcgcgatccctacctggccccttccctggcaggtgaggttgaaagccagtggaggttttctgttgttagagacccccggaaccctcacagccaccctttggttcacatagaggaggggcttggatgcttcgtaaattctcctgccggagtttgagctgctttaaccacggtccttttcaggcatgttcataacatggaaaccagcttcagaaggcagccctggggaaattgacctgactctatctgttagcagcagccactctttccttcctcagactgaccaggtcttctgtgccctctccacgctcatgcctgggtaggtcctgggtaggtccacgcttatgcctgggtaggtcctctcctaagctgaggactgcccacctccccagcctgctcactgcctgctcctgcacacatctccccatatgctgccagggccagccctgaacacaggcaatggctggcttctggctgcagaggtcagcgtgggccccacaggatctgccatctccaggagcccctttggaggtgaggccccaggtgagccccaaatgagtagatgcactgcagtctgcatctactcattaacgtaaaccaagcattacctgcgggggcttctcatgaatgaaaacagaactttcagggtgttacgaaaatgatatgattgtgtacataaagcactgagcttggaatctggtctgggaggatgatcttttgatttttttttttttttaattaaggagagcaaagtcattactagaatgtatagcaaatatggaggttaactttgtatcgtttaagtcatgtttgtggtaacagagttttaggctgtgtttggtgtcaatgttaatatgactggggtgagtcgtgtcaatgttaatatgactggggtgagtccagtgttgacgttagcagcgttttatctcaagcatatgtgacgttgatcaaaatgtgaacttttgatccgattctccttcctaccccactggcttagttattgctgtagtccggtcacgaagggtggtcacacgtttggtgtatttctgcaaacacggaggaaacaccttatttatattatgcaatttaccttttcttatcatttggactttttctgagcccatcaaattgcttgttttatgattttgattttgcaacacagtaataaatgtcattttctggaaataagtaatgaacatctgcttcctctgaagatgcagtatgagtccaccacgtgcagttctcacaggcagggacccacctccgggctgatacacagtggtgacggttttcttcttcttcctcttcttctcttaaaagtctatttgaaaaattccactgtagagaaagctactgtaatctgctccttaagaagatttggcctaggaagaagaaaatcatcctttatacttttggcttattaaattgaaaaatatgcatagtggtgttcttattaatttattcatgattttattaatgtttaatgctgcctctggtgttgtctgctttcaataccaaagaaaatgcaaaggcacatttgatcatgtgtgtttcagatcacaggatctcgtgtgtttctcttctaacactgaaggccaccagatgtcagtgtaacttaacaaatcacatcctacatgtcacgttgacttcagcatttggtctaagtgttgccttttcctttcctatttcaacttctgaagatgaagagggactttaagggaatttgcacacaagctccatagacttgagtcattggatatcttctgaagatgaggagggactttaagggaatttgcacacaagctctgtagacttgagtcactggacattgtgggagatgcctttttgcttttgctgtttccaaacctcccagctaatcacgccatgaactcatggtccctccactgagcacggcgatggttccacatcggcttcgtggcaaggacggattccaggttggggctgcagccgggctctgcttgagcggcccagggtcttctgtctcaatccaggacccaggacgcaggatgcaggacgcaggacccaggacccaggacccaggacgcaggacgcaggatgcaggacccaggacccaggacgcaggacccaggacccaggacccaggacgcaggacgcaggacccaggacccaggacgcaggacccaggacacaggacccaggacgcaggacgcaggacccaggacgcaggacgcaggacgcaggacccaggacgcaggacccaggacccaggacccaggacgcaggacgcaggacccaggacccaggacgcaggacccaggacccaggacccaggacccaggacccaggacgcaggacccaggacgcaggacccaggacccaggacccaggacgcaggacccaggacccaggacgcaggacccaggacgcaggacccaggacccaggacccaggacgcaggacccaggacccaggacccaggacccaggacccaggacccaggacgcaggacccaggacccaggacccaggacgcaggacgcaggacccaggacccaggacccaggacccaggacgcaggacgcaggacccaggacccaggacccaggacgcaggacgcaggacccaggacccaggacgcaggacccagggctgggcttgtctgcagcccgacctcctcacaggcggatgttggttctcttgctgggtctccctggagggttccttgctgacagcctgagcacgctcagccttgctcattgttcagggctggcagctccatgtttgctgtgggcgaggcctgtgcaggacagactttgtccagtatttacagcattttcctgattccatgttgagagataaagcaatttgcctggagtgcctgctgtgatcctggagctctgtcatccagggtctgtttataacagcagaggaacgaaatgagccgaaacacaaatctaatacaaaaaaacaaaatcaggagcatttttgaagtttagccaggtatccaggaggcagtcagccacttatccagtggcatggggatgagaggtagtcttctagaggtgtgtgaacagggcaggtctcagggcatggtcagtgtcacatgccagcgagtggctgcagcaggactcaggtccgcgggagagactggggaggcttccagagcggcacctgccctggggaaggagccgatgatgatgcagggggctccaggcatgaccagctcttccttcctgagataagcaccactgcgggatctcagtgtgcagccacatgtctcatggatgagccaccgggatctcagtgtgcagccacatgtctcacggatgagccactgcaggatctcagtgtgcagccacatgtctcacggatgagccactgcgggatctcagtgtgcagccaaatgtctcacggatgagccaccgggatctcagtgtgcagccaaatgtctcacggatgagccaccgggatctcagtgtgcagccaaatgtctcacggatgagccaccgggatctcagtgtgcagccaaatgtctcacggatgagccaccgggatctcagtgtgcggccacgtgtctcatggatgagccactgcgggatctcagtgtgcggccacgtgtctcacggatgagccaccgggatctcagtgtgcggccacgtgtctcatggatgagccactgcgggatctcagtgtgcggccacgtgtctcacggatgagccaccgggatctcagtgtgcagccacgtgtctcacggatgagccactgcgggatctcagtgtgcggacacgtgtctcacggatgagccactgcgggatctcagtgtgcggccacgtgtctcacggatgagccactgcgggatctcagtgtgcggacacgtgtctcacggatgagccactgcgggatctcagtgtgtggccacatgtctcacggatgagccaccgggatctcagtgtgcggccacatgcatggataagccacttgtggtcgtggtatgcagcatttcactttgcttctgggaaggttttccgagttttccaagtgcaggctccacacacagataagtttcactgtattaagagtatagagggccggatcttggttggattcagaaaagtagttattaaaaatatctgataccacataactggataaatcgtctcttgctgcagtaaagtgttgtgcatgccccgtttcttagcaagcttgcggaggctttgtttgttgttcccttccagtgtggaggagagacggtcggacgctgcagctctgtgttgtgtccttatcaggcatcatgctaaaaaaacatttcctccagggggctgtttgtgaaaggcaagattttcagaggttttaaatgggaggatttcagccctcctggaccaagcctctgcttggagctaacatcgaagctttcagagagttttcctatagctagggtggcctctgtggccatgcctgaccttcgtctaggtgttggcattgctaggaccccaaaatcctaggggatgtgacacccaggaattctagagatctcccaggcaccccgggaggatgtggactccaggcatcctagggggtgtggatgttcgtgatgctgtctttgtggatggggaaaccctgtaacaacttagctcctgctggggccagggagctggggccggggagctgaggccgaggagctggaggccagggagctgggggccggggagctgggggccggggagctggggccggggagctgaggccgaggagctggaggctggggagctgaggctgaggagctggaggccagggagctgggagctggggagctggggccggggagctgggagccagggagctggggccggggagctgaggccgaggagctggaggccagggagctgggggctggggagctggaggccggggagctggggccggggagctgggggccggggagctgggggccagggagctggaggccggagagctgggggccggggagctgaggccggggagctggaagccggagagctgggggccggagagctgggggccggggagctggaggcccgggagctgaggccaaggagctgggggccggggagctgaggctggggagctggaggccgaggactgcaggccctggcttgtgtttctggcacaggactcccgagtgactggtgttgttggggtggatataaccaaacagggatttaaggaatgcagccagcaattgcccaaagccacgtcccctggggagcccccgtcctcacgggtcctggtgtcttcatcctgtggactggctcagcctggcctcagcgcctgccccggggtcagcaggttaaggggtccacagcccctgcagcaggaggttttaatgcctgaactggagaaccttcaaaggcacacacagaatctctgtctcctcagcatcctcccatcaaagtctgtccgcatgtgttcctggctagtggctcaggaaaggtctgacgtcttcccacgtgtgacacagcagcacaaacctccagcacgtgtccccaccctgcacacaggtgttctggtgacgtccagtgaaagggtcacttataagccttggggccacagtgtgtcctgattaagcgatgtttgtaaagttgatctctcctattgtcacggcgataccttttattatagaaagtccagaggctgcaaatcaccaggaaaagactgcgcatgctgggattcccccaccacaacgtcttcgtgtcatttttgtgtctgtcctaatggacttccttttctttggtaaggacatgagtaattataaaaatggaattgtagtgtttcttgtgacttttaccctacattttaaacctcattaccttaattaggtgactttttgtgctagctaaaggcataaagcaaatattcatttccccctttccagccatcatggttttttccaaagtgcatcatcccagcatcagaatttcagaactctgggggaatcaagattcagcctcgtggggttttgggagttttcagagtgggggtgcaggacccctccccgagtgggtcttggtgtgcgatcctcagaccccaggcactcgcagtcccggctgccgcactgcctgcctgctgcccaccttagcccacttccagtccgacaggcagcgtgaacagaagtgacctctctgtggtgattgacgtgccaccagagtggcccttggagtaacaaaggccacacccaggggtttgggcctaaatgtgcttgctccgggcacgattctcaaacctggagcccatgaggattacctgggagctgttgcagaacgagggcagctgggcctgtgcccgggcctgtccagggttgctggggtggggcctgcatgtcagggtggaatccttgccactcctgcctgcagcctggtggagacatgctcttcaggtcagctctggttatttacgttttcacatcagtacggcagggcctgcatgggtgcgtttgtgtctttcacttggcttcctgctggtgaggggtctgctggcagaggtgctcacatgtgctcccctggcctgatggggcaggtttctctctggccacgtgcccacgtgcattctgtctgctcaacctcccaagtgcacagcttgaaggtggtccagaccttaatgtggggggattttcaccaaaaccctgtggtgtctccaaacagagcgagaatgaaccccctgggaagcatatgaagaagccgtgggaggcaaacggagctgtgtttggttgtaagggatggggctgctcatgggttttcagtgccagctctgggaagggtccctttgctgtggagaatcacagaggaggcttttcttttctgacctgctgcccctgcaccccatgattctccctcatcagagttttgctttctgctgggcaaagccaggaagggacagacagtccctggcctgggttgagcccccaccaccctgtccctccaccgtgggaccagagctgtccatgacaccaccctgcctggccatggcccttggatccctctagggcgggcgcagggtccggagagcaggcacgacagctgcagacacccagaccttcccttccctgcaggaacatcgcagggcttgcccaaggccgcatggacagctgcattggaaggagactcatcgatgactctgcattttggggctttaatttatctgccaaatatggagtaagcccctggcacgtgggatattggagtctcagcagtgtgcacagcagagtcttgtctccatggagttggagggcgctgactcccaccaacgtaaattcagtgcagatgcaaaattagcagagaagagggcgtggggtgcactggccaacagcatgagccagccccacctccgagagtcaaggtgaagctctgaggcaggtgctcatttgcgagctggaatgcatgtgtgtacagaggttgtacccccagatttccaatttggggaggtgctggggcatgtgcctcctagtgccgtggacagctcaaaagtcagcacctgtataccctggtcctgtgtctggctggtccctgagtcccacaagatgtatgtggacttgttgtgagccactctcccaccgggctgtcctccggggttctcccttttcccaggtgtgtttggagggggtggctggatgtgctgactcctcatctcctctctttcacaccccgtgtcccgcctctccctgaccctgctgggcaccggtcagaccccctttcctcatctctctttcacaccccgtttcccacctctccctggctctgggcaccggccagaccccctttcccagatgggaacttgactggcggtctggatggagagaggcctgggaggtctgggcggcagtgtggacatctctatggattcaggcacccctgctctcgttttgtcttccctccactgggcacctgctggtttccaggctgccgtcagtcccctgagcccctctgtcttcccagcttctcccttaggaattaccagccattcgtccttttgttttcctttcagccccttcaaattttgtctcgggaataattttgtgcattatcagatcatcaagatattttactaaagacatttcttcctaagaatttagttattaaactagcatttccctttttgagttcctcttatggtaacagctcttcactagaatgcctgggacccagtgtgtcatggcaaccatggggctgtcccatggcagccccactcctgcactaggccagggtctctctgcctccacgctgctcccttggggtccatcgtgtcttggcacccgtggggccgtcccgtggcagcttcgcttctgtgctgggccaggtctctctgcctccatgctgctcccttggggtccagcggctcctgggtggcagcaacacagagaaggagcttccggtctattttctccctggtggaggtctctgaagatttttcactgctggaaaaagaggaagaagcccagtaaaaataacaaacgaggggatggagcctccatacacacagccttccttgctcacgggatgagcctgggtctgaggggcttggagcccgccttccaggtgaactgtcagagggtcaggaacccggagagcccctggcaccgcaggcatcactgctgcctccgtcatcaggccccacgtccctcttgtgcttgctggtggcggtgccgctttctcttttagattctgcatctcgtgcgtgtcggttcctgggtgatgagcggccttggccacaggaggcggagcagggcccaccgcagtcggggaagctctgggtttgctgtctgctcggctttcctcgtgaggttctttacaggatgttctttacaggatctgggggaatgcggggggtgggacgggggctgctggttggtgtttgaggagctcacctgcaggcaggacgtgtcctgaggatccgtctcagctgcatggcaggcatggagcagggctgcctccgtttgtgtagaggatgcctgcactccagagaggctctgaggttggcctgagaggctctgtctgcatttgtggctgggaccacggtgtcctgtgctgaggctggtctcagttgctggggagatgctgccttgggacctgcaagagggcaactcccagcgcccctcactttcaccccaaggagaatcgtagctgagatgacaaagcgcatcttgtgttcttgttagatgtgtgttggcttcataatgatgcagcataatgatgtcaggatggctttggagctcagagaaatgggcttgagccaccataaagcaatcccgttggacttaatggctgtgattttgttgtggtgatgtcaggaggctttctgtccagtttctgaggagctgtgtgtctggtagacacagagcaataaagcaaaacaaaaacaaagccagaatgctgctccagcctgagtgtgggggagatgggacagcatgggttctgtgcatgacgactgccctgtccacatagggtagcgcatctgcttggttcaaaagtgactaagacattggtcttcaaaaaatatccatcagttacgtcatttcttttggcaaaattcttgatgtttgtgggggcctcgtaagtttaggcatcctcattaaaacctctaaagactgtcagaaagcacagctttaacgatgacataaaggcatctgttacatgagaaaagcgtttacttcctctcctcaccccagtatgaaaggtggcctgagtaccctgcaggtgtggtcacagcagatctcttgcatgcagggagtttggcaaacccagactggtgctggtctgcagactcgccgcccctcccagcttcgctccctgtgggactgcaagtgcctggggactaatgagtcccgcttcccactccccttgctgggagagctccaactgacggccaaggagtgagcgtttaaatacctcagctacaccaccccttgaatgggatggttccggtgcagtaggagctggctggtgatgcacctttcactggaaacccaaccttccttgtcacactttttttcttttaaaaatttcctcctctcccctccccttccattcccttgtttcttttccttcttttcttttctttcttttcttgagacaggatcttgctttatcacccaggctgcagtgcagtggcttgatcatagctcactgcagccttgacctcctgggctgaagtaatcctcctgcctcagcctcctaagtagctgagaccacaggcaggagctaccatgcctggctaatttttaaaaatgattttatagagacagagatctcactttgtggcccaggctgttctcaaactcttggactcaagtgattctcctgccttggcctcccaaaacactgagatcacaggtgtgcactaccacacctggccaactacaattgtttcttattccaggtctgcttctgtgggaatagaaatagagaaaatttttcccagtgaaactgctcagcagggtctcctatactgacacccactttcaacaattcaccaggtgacacaattctaaatcagctctttgtgccccttattaaatatgagcaggcatcccaggatcactggacacttatggaaagcctctaatgaaagagccctgacagccacatggaagaagacagcatgaaatgaagagagactatggacactaagcaaatacataagacatgtataactccaggaaaaacaagaagacactgtgaaaggaagagacactgtggacactaagcaaatacataagacatttataactccagggaaaacaaaaagaaaaaaaattaatactagtcacagcgtactacatagcctagttggggatagcatttacaaagtcacaatattgtaagcacataatactgatctgatgaaaattgtaatgtaactaaactgggaaagagaaagtaagcttggaaacagtgatgtgttatggagaggtaggcccatcttctgtagcagtcagaaaatagatacatcctaaatctgaaagctgagaaatggcaacgtgaatgtgtcatgtggagatatggagatgaaaaccaagagtcagctaaatgagttgagggtgcttacctctggggagtagaaatgcgggtggggaaaaggtgggttagaggtttgctcatttccccaaccagacttagatttttcaaactatgtgcaagcatgatgtttaaaaataaaccctaaaataagaagagagagttaactttgacaacggcaataacagaacaaagaatgtactttatgtatgttttctttgttctttgtttaccccattctagcaatgcagaaacagttagaagacactcaccgagccccacctggcttcccacctgtgaccaggtgaggcaacagtgtgggggaggatgaggcagctgccctcggcattgcctgtggcaaggccagcaacacaacccaggaaaggggaccgttttcagtgtctagtgggataataatatctagcatttactgggcatactcaatcttgctaccaccctggttttgaaaacacaaatctgttcaaatgcagttgatacatgggggagcactttgtgcatgatgtaattttgcattctcctatgaatgatgaatgacgggttgctagtctggttgaacagttacagatggatttgtaagctagacagtgtccctcaggaccatggaatgtgtggatgtatcagcactacagaatcttcgagtctgcaaattttcccagcctcaggatcagtggggactcatcatcctctcatttccctgctttggttccaccctcagtggccgtccctccggttcctactccttgttatcatgcacacctcgatttacgttcatggcattggaaaaccctcctgtttgattgttactgtcaggccgtggcaccctgcttgtgcttttcaatttgttttgttttgctttgcacagttgtgtgtgcatgtagctgtttttattcactgttatacttttattctgtatttgtttcctgtttcttttggtcaagaggcctcacaaggcatcttctctgcaggggaggagactcagccctgagagggatgttgttgtcatgtggaagtggaggcacagagtgactggggggtggggagggagtggcaggacaggcccagacctgcccaaatggtatgacatttcggcccccagctttcctgggtggagccctgtgctgtccctattttgagctggggcaggacacactatttctctggaagggaaggtgagggtgcagggcacaggaggagtgtttgtttgggcctccagagctggtctcgatctgaggacctgcttcatgtcagccctgtcccctggccacttggagggcaaccctgaggctggttcacaactgctcgggggtcctgccgctgggagggctggttcacaaccgctgagggtgtctggatgcaggctcctggcagcatcctggatgggcgcagctcatgtggttctctgcagagtggccccacattgggcacaagcccctgtccctacctcggagggcatctcctgcattacccaggaagtgagcctctctgaatcttgtttgctttgagattacgcaaggaaggaaaaaatgctgaagtgtaagttttgagggtgtgaggcatagtttaaatcagggaggcactcttacagcagatggcctttcagaataattaaaagagcaaattaaaagagcaaattgaaagagcacttcagcggggcctgggtctccacagaggacaggatgtcggtttgtttcaaaagacagaaaataaagtttctttccaaagctgcaatttccttgaggccattgtaccatcatgtcacaagctcgtgtactttttccttgtcttggggcttttacagtgttctctgggggctatttctgggctctcaacagtcttattttgggaaccactgctgagctgcttggcattctctacagctgttgtggcaaaacaggacagaccccgaggcgggtcaccgctggtgtgtgcaggtggaggcggcttggggagatggtatgcgcacacacacacatgcacacatgtgcacacacaaacatgcacacacacgtgcacacaaagcacacacaagcctaccctgtgagaacggagctgccccagttccctgagtgcccccttcagagctctgggtggcctctaacatcctggctgcttgtccatccccctgagcacaggaagcgggcaaggcacaaaactcactcggcgaggaggggagcagctcgctccctccacatgtgcatgcatgtgaacaaaatcacatgcatgtacacgcgtgcacacacgtgacacattcatgcacacacacgtgcacatgtacacacacacacagacttcacctcacgatgctgtcacctttttgtgtgtctctttaaaggtctttttgttttgattccttttgcgggtttgaaatagagatatatgcattaatcatttccccagcactacacttttattgttttaaacggcttctttgtgtgtgtgtgtgaaaatgctcaaaaggcctttgacaatgacggtgagaaaaccagccctggctgggcgctgtctcccgttagggagtgcctcctcagcccacgtggcactggctgcccgctgccctgtgcgtgtcccggccttcgctgcctctgcagcctgggagcttggtctctggttggggaggccagggccagcctgcgatgtggctgttgagaagctgtgcgtgcctgggccagggcagcagctctgccccatgggtcgcggcgggactgggatgaggccccactctcacctctgtgaccagggggcagagggaagtctgtagcccgacctcacctgctgcaggctccgagctccccctccaggctgggccctccatggcgctctgcccgaattcggggctggtgggatccaaggcggcgcaggccgggagccctcgcccctcgcccctcgcgcctcacccctcgcccctcgcgcctcacccctcgcccctcgcgcctcacccctcgcccctctcccctctcccctcgcgcctcgcccctcgcccctcgcccctcgcccctcgcgcctcgcccctcgcgcctcgcccctcgcccctctcccctcgcgcctcgcccctggcccctcgcccctggcccctcgcgcctcacccctcacccctcacccctggcccctcgcgcctcgcccctcgcccctggcccctcgcgcctcacccctcacccctcacccctggcccctcgcgcctcgcccctcgccccgcacccctcgcccctggcccctcgcccctcgcccctcgcccctggcccctcgcgcctcacccctcgcccctcacccctcacccctcgcgcctcgcccctggcccctcgcccctcgcgcctccccctcgcccctcgcccctggcccctggcccctcgcgcctcgcccctcgcccctcgcccctcacccctcgcccctcacccctcacccctcacttgtgcagggacagccctgggcgcaggtgcccgcacgggggattcaggtcgagaccgcgcctgcgtgccatctagcggccgtgctcgggtactgcagcccctccaccccagactccggaggctcctggaaggtgggtgaaccttgcagaccacccaggcgaaaacgcggctacttactcaggctggcgggaacgaggggtcagtcactgtccctcgtgcttggcaaagactcaggcaggtagaggagccgaagttttacagcagaaagggctggttggcccaggtgtcgtgtggacgggcagggcctcctgagtgctggctggggtgcccccggctttctctggctgacgcgttgcagagatgcggcctgcacagcctggccgctgtcccactgtccctgtgacgattcggtctcttttgggcacacggtaaatgcctctggtcagggctgtttaggaggtgagggtgtcgggtctccaacactgagtcaggtggaggggcagcccctgccgcacaccctctgtgtttttgtgagttgcctacagtccttgtcgccccgtcctgaatgctggaagctttgacgctagctcgtcttcctttcttaggcccccagcagcaaaaatctgctcccctcatcaatgagtgagttttgtgccttgacactttctgcgcctggggggatggacgagcagccagtacttagagaccacccggagctctgaagggggtgctcagggaaccagggctgctccattctcaccaggtgggcttggacagccacgggggctcatccccgacctgccaacctgggtcactcctggtgaggcagcagcatccccgtcgcaggctgggacagcagttccacaggtgttccctgcacacacctgtgcctctcacacttccgtggcctccaatgccctccctgtggccctgaaagcagccatggatttttgtgccaagaaaaattatacctgctccttggtgggggagccagaggggagccaggcgtctatgggggacagagtggggccagtggtccacagggaacagagaggtccaggcatctgtgggggacataggggaaccacgcatccgtgggggacagagggggtccaggtgtccgtcggggacagaggggttgaggtgtccgtgggggacagagggggtccaggtgtctgtgggagagaagggtccaggcatctgtggggtacagaggggggccacgcatctgtgagggacagagggggagcgaggtgtccatgggggtgggacattgttacccaggatgccagtggatgggctgatggcacagtttaaggggtgagagatgaagggtgggggtcccagagcagtggtgtccttggggtttgggtttgattgtgtgttaggggacgtggccttggctggggagggaggtgatggaaggtgatatacattgaacccaggctgctcaccacgtttgagaagcccctgagtgatgttccatcatgaagacggtgtgggcttccttgaagtgtgttgcaatcacgtcatgattccttcttcaccagtgttaggcgatgagattataatgaaaagcattagagccatcacactattgggaagcatcccccactaagctgtgaaaagctagaaactctgatgaaaatgacgctgaaagatgacttccacttccaaaaggtgcagattcaccaaagggagaaacccagagctgaggccggtctgcagcaggtgccgggcctgagacctttatgttgtctgagggaaacacctccatcccctgtcaggctcagagtgtccttttttgttctgggaaccatttctgtgtcatttgtgtggaggctgaagttgcccggggtcgtcctgcaaggcgtctcccagagcgaagtccctccgacgtgccccctggtgatgatgtttaaggaaaccaggctgaactttaattttccttcagtgttcgtggcagagcgtgttaagtacacttgacctttctaaatttatcacgcagcatttgagtctcttggatgtttgcaggattttcaaacccaggtttcggcctttttaaagacgccgtggggtgaggagggtgcgttggaggcgctgtgaccaggatgggatggtttccagctcccgttttcttcctgcccagtctcctttccagccaacatcgagtaagaccagggccacctggggtgcagaggcccctggaaaggactccccttccttctctgcagcaggcacaggggcctgggcagctgggcctgtgcagccctttctctctgtggacttgctgttttcagcctccctggaggggctggtggttctagacactgaggttgacaggcgtgctcgaggagttctcatcaccctgttcttccttaatggaaggaagttatttctaaaattctaccgagaggggctgcctggggtgagacatacctgcaggtccgatgaggctttgggatgtggacagataaccagagcaggatggtcctgtccgcaggggataccgggaagcctgtggggtcctggcgaggctccggcttggcttccaaggaccctgccccttggctgctgactggacccagggcccggctttgtgtcttcgcagttggtgaaacacattgatctacaatgtgtttctgtagcaccttgatgtggtcagaccccggtgagttgactcctcccccacggacacaaggacagggctgcacccacatgttctgccatcctcactggctgctggggccgtgcccccacgtggagctcttgctggccaagagaagcagctgtcctgtgaggccctgctccatgccaggatggttccccagacaacgctgggtgtgcagcagatccccgccgccctctcctcgtgtgagctgacgcatggacagaacacttggggttgccctgtgcctgccgctcagccacggtctcatgagtggacccatcttgtggaacatccacagtgcccaggaggcttgcctttgtgtccacaccctgtgtccagtgctggggtggtccctgacccagcccctctcctcctcggggagtttgacctgcatggccacatcagagtcctcaccctgaggatggacaggagatgaagggagggagaggggaggtccaccctcattccctccccacggaagccccagcctggccattgtcccttggccaaaggtcacccccaaaggcagcccagtcctcacaattccctcccctgggtatggctactccccccgcaccagcccagtactgcatcatccctgccctgcaaacggtccctcctgaagccaccctgggggcctggtggaggactctcgactcacaggcgggctccctgtctcaaaggtgctcattcctgagggcgtcatcccaggtggcaaatctgtttgcttttaaattctggtgagagcagtgctgctcactgttgtgccctgtttgtggccttgtctggctgggggtgcagctcctttcctcccccgcccccggtactgaccagggcctggcactggggaaacctcctgcctcctcccatccccagggctgcagggctgcatccagcctgggcagctggtcagggctgtgaggggctggggtgggactccagctgctctatgtcctggcaggggttgggcctgcatctcaaggggcatgtgcagcatgggtgctggtgggaaaatgtgggaaggcctctcctcctgcggggtaggtgggcatttctcatcataaaatgagacatttgtatcctcctcatggtgaccttaagcctcaggaagaagctaggggaggctgctgtggctgagagaccttcccaggacatggtctctttcccgacgggcctctgcagtcagcgtccgaaggagagatgggcctgtgagtatagctgggtgtcagggcccggacctggatttcgggcctggtgcagcttggccaggagagggagcgcggtttcagacaagggagggtggcgcctgggcttccaggcttggagggatggcgtgggctcacagcccctttctcctcggccattggccccagagggtccctccagggaatggaagtcaatgtctctcgtgcaggttctttttatctttaagggagcagcagctgctgggttagggtgtttggaataagaagtatttgttcctgcagctgtacatctgaacgtgaaacatggctgttgcgttacaaccgtcgcaagagggaagaaaatctagtctgtagttaggatgatttccacccctcgaatttggaagtggtgaattagtggaggtgggggtgggtttcacaccatttcaggagggcttgttcctgtagggccctgacagcggacagagcctgccacgtggacacagtgcatgtgacgcggcacccgtgggggatgggttttcatctgcccttcctgcccctccatttttcgtagcctctttggggcatgacatacccaccttgagcttcgcattttgagaggacatttgtagagtggagctgacagttaaggggacgatgcgcgagaagagaaggcttgggagacatcggccagctctcccgcaaagtgcgctgagagctgaggggctggtggttctgcaccctctgggacggggcaagcctggccgggcagtggacagcagttggcatgggacaggctcagctcccagagccacagtgagcagcattgcggccactcggtgtccagatgcctgtgttccctcctaccttggccgaggccctccagcacgatggtcctactgcgaggctggagaagggatggggtcggggtgcctgctgtgactgtcctggggcagaagggcctccagctcagagactccgcaggtctcacctcataactccgtctggctgctgattccactttacgtgttctttgaaggcaaatgtgtttcccatgaagcaaattggttcggctgcgacttagtgccactcgctgcatgggaataacttcttagtcgagttcattgctgttccaggtgccggctgcccctggctgcaaggagaggccatttccacatagcagccactgagctgtgtgaccatgagagccgtgggaggacacggcccagggcgacggcgcctctgagttcaaggggacatgcctctgtgcacactcagcagccgggggatgagaggacagggtggtggggcggggatggagctggggcacaaagaagatcggtttgaataaacgcagctgagtatcgtgtagacgtttgagaggcttcatccctccgtaggatcctcctgtcttctgtggatgtgaacagcgtcattacagagtcatccgaggtggatgcaggaggcctggctgcaccggaggacagcacctggggctgcctcaccacgcgtcttgggccagggccctgctttctggatgtgtccattaacatcccacaacctttgctgaggctctcacctcttttctccaagagcccgtttgtgaaaactaagatgtggccaggaacaaaggagagcaggaaggacagaacttgcgtttagcccattttctattctgggaatgcgacgcgtgatgatttatccgtgcatctgtgttgtcatccgtgttctcgcagggcctggttccagcagccaggctggtggctgagtctagaattgcatttgtgacggcggcagccgttattgcaaatgtacctttcttgtgtattgatctttcgcagatcccattatttttaatttatttaataaggaggagtgtttgtttcataactcagaatcaaaaccataattattcactcagactctggtgtctgtgcaagggaagcctgtgggttgatgtttttcattcttcaatgaccagaggattaattgaggggccaccacagaaagaaggcacaatacatctcttttctaatgaacttgcatttcagagcttaaatccaaagtaattggatttcacagtcaaagtgcgctttcacttcgtgtggtctatggacacggctgcgtgtcctccacatgcgtcgcagcctgggctgatcttaaaaacaactttatgtacagcaggtgtgtcgtgtttcattctgtgaggaatcactcactgaagtgtggtgtggcctcagtggccgcacctgcctcctgccgagggcttcagggcccaggtgtggcccttcggacgcctgtttcccttcagcttctcttcgcagactttgaggcccaggcactgccctgcctgcatctggagcccttctccttccaggggcccgcctcacgttgggtgaaatcaagcctccatggttgtaggttctaatcgccagtccgagcttagcccttagggttgacctattccttcagatcgatcacagctgagctcagcactgagcattggagggtgaaaaagaagttttgtatcatctgtgtgtgggttaataataacgtatgtatttggagtttgtgtctggttcctggctcctgagacccttggagtctctggggcgatgagtgtcttttgtgtgctgagaggtggctgggagccctggctggcttcagggtggggctggtggccagaaaggccaaggcaccattagatggttgggcctttcaggcccccccaactcttggggggttaatcaccaatggccagtgatttaatccatcatgcctatgtacgtgaaacctgcatagagaactaagtgagaggttcatggagctcgcaggttggcagacacgtggaggtgcagggagcctggtgcacccagggcaggtgtgacgtgtgccctgcaccctgccccgtgcgtccctcagtttggctctccttgagctgtgtcctttataagagctagtgatggtgagtgaagtgctttcccaagttctgtgtcatccaaagaaaaattgcacccgaggaggttgtgggcagccgagtttgtcgctggctgggaagaaatgcaggtggcctggctgtccatctgcactggccctcatgggggggtggtcttgcgggaccgagcccagaagctgtgaattctgggaccttggtgccgggattgacgtgaaccgtggcttcccgtggaggatgtggccgtggatcaggtgatggccactcggaagggtccaggggcttcttgttcagtgtggacaggggtgctccttgccgagacctgcagagtgaagccgacacaggggagaggtggctacatcctggggtcgggggaatcctccgaaagtattttctgtggggagaaggctgctgtggagctggggttctccagagaaacagactcagcagggggtttgtatgtgtgtataaatagagatgtgtgtgtataaatagatatatgtgtgtgtaaatagagatatatgtgtgtgtacagacagagacagtatttcaaggcattagctcaccgattgggggcctggcgggtctgacatctgcagggcagctggtgggctgggaattcagaggcgggttcctgctgcagcctcttgtccgaatcccacagggcagcggcttggagactttgacagctcttcatgttgccgccatctacagcaggattccatctccttcaggaaacttcgccctggctctgcagcctccgcctggatgagaccatccagcaccattgcctttaagtcagcagattcagcagatggtggtggccaccgcgtcttcccagggcctcacagcagctctccgccttcagctgcatccccgggcctggccgggccaagctgagctgacagggatgccgcagccccctggagtccagtccccccaggacccagagagtgctttccaacatcgtaacccgatcgcactccacttgtaaatgcgcccttggctaccgtcttacaaaacaagagttgtctttgtggtcaccatctgccttccagctctctggagcctgcggagaccccagcgaaggcagtgagcgtggtcctggccccacctcagccctcctgtggtgcaggatgagccctccctgacctatttggcttgcagatgtgatttcagtgtctatgtgaattgggcatctgtgtttacagttctgaaagtttcatggaaaggtttctggtctcccatgtggtaccaggagatctgtccgtgtgggccctgaagccagggcagccgctggttgaagctgaggccacttagggcaggactttcccagcctcctggggatctgggtcccggtttggcctcagaggcatttgggcagagcctcccgtgttctagaacacatgctgccacagagacgcgtcatcaaaagagcctgggcagacgcgatcccagagggtgagaagccacagtccccccatcctcagcccacccctgtggcgagtgcttaggtgggtgatcgggccgtgtggagtcgtgttcatcatggaggatgtggaagcaccttcccattcatctcccagggtggcagattgctaacaccttcccattcatctcctagggtagcagatttgctaaaactctggagagctgcattaacacttgaaaccaccacagcaagagctgggagtcgatgcagtaggagcctgtgaagggctgggctttctgttttttgttgcctgaacttgatcgctggtaggttgtacatctacatttggtgatggtggataagattggggattgaaggatccatttttttccaggttaaatgtttgggcatttggatgatcgacagtgtgttcagttatgctttctccaggttcatgtccccactggccccatctcctgcacccatccatagctataagctcccctgaccccatcaagctacctggaaaagtgcataccctggtcccgaggggaattggatgaatgagcctggatgaacggaggcagctcctgcaccatgggaggagggactcggggcatgggaggagggactctgggcatgggaggagggacttggggcacgggaggagggacttggggcacgggaggagggaggaggggtacagaaggagggactcggcacgggaggagggactcggggcacgggaggagggacttggggcacgggaggagggactcagggcatgggaggagggaggaggggcacagaaatagggactcagagcacaggaggagggactcggggcacgggaggagggacttggggcacaggaggagggactcagggcatgggaggagggacttggggcatgggaggagggactctgggcatgggaggagggacttggggcacgggaggagggaggaagggtacagaaggagggactcggcacgggaggagggactcggggcacgggaggagggacttggggcacgggaggagggactcagggcatgggaggagggaggaggggcacagaaatagggactcagagcacaggaggagggactcggggaatgggaggagggaggaggagcacggaaggagggactcggggcatgggaggaggggcacatctgctcatggagggaaacacagcagagccctcttcctggagatgaaatccatggtgttcaccacaggagagacgcacaaggtcaccaacccatcttcttcctggagactgtggaaatttagaaacggacttgaaaccgttttctggtatcacgtagctcatcagtagcaggcctgaacttgtgcttttctgtatgccagcatttgtaaactttgagtaatatctaaaccccattaaaagggaaaaattgtatggacctcctttgttgacttaaggcattattatcattaatgtaattgtttaaatcactgaaatgaaacaaggtgtggaattttatgctggattttaattaacaagaatgtttcatggatgcccaaacttctgattttccattttatctcaaaacagctctctttgcttgctatacagtgagattttaaagtagaggccaattctacttggttgttgcactttcacccttaatgtttcttcaaatcctttcaaaatctgaaatgtcatcagagtacatcttcatcggttcaattgaaacctttttttttccagtggtgtctttcttgccttaattggttgggactcttgtctctggaattgttcccagaattttatattaaagtagcttttgttacagtgggactcacatagtgtggtatgattggtttacaaagaagacatttaggttcttgtcgatgttatcagaagaggacaaatggtttcgtatttattattccatgcttcaggggcattggtgggagtgtggaacggaaaatttaaacatcagaaactccattaggggacgttgatgcactgaatggaagtcacaccagcaaattcttctgcggtgagggcggaagtcacaccagcaaatcctgctgtgggggcgggcaggtgattttactgatgcgcagcaaatactgctgtgagggcgggcaggtgattttactgatgcgcatagcccacatgctgcagaggtgcaccctgacatctgtgtttggtcggccctctgactcgtgaaaatgtcttctggcaattagtatttcagttttggtacctttggtaacttttacaaagagtgcatgtttaagggtcaaatgtaatcacttattagtaaatgaaattttttattttaaacacacagatgggtgttatgcacacagtttgcagtgatttttgatgaagggaaggttcattccctcccacaaacacccttctggcttaatccctcctgtaatacagggtttctctacattatactcatctgtcttggcttaagcagtaacacctgtgcctgttgaagcgccttcttcctaagtgtctggctttgtgtactttcatttgcatacagagatctgtaactgttaaggagcccctgccctctcacactgtggatactgtcagtgcctacctttcactgagatcagcgggaaaaacctctggaggttgggtgctgcccctggcatcttgcattaatagtttacagcccgcggtccccacatcccggctgcttctgccctgtgttgtgctcctgagagatgtgttggtgtctggccgaaaggtccttttggtttccagggtaccataaatcctcaaaattaatgggcaatgcaggcccttaccagctcctcctcctgtgtggtgacctccaaatgtggccacctgggtgacagcagacaaatagacatgtgtgccaagtaccttgagcgagcccagcaggttgtgatacagttggtgcacgcaaatcatgagtgtgtgagggacatggatgaccagcgatgagacagaggatgcgcgggatgcttcaagcagagtttaaagttctgtccctgaaaatggtcaaggttctcaacaggaagtaaccatccaaacagtggcattttcaagccaaggactcaagtgaaaaggattccttcagtgtgatcacgctttccggagcatagtggctctcatatgccaaagggtttaaaatactaatgacgttattacgtaattctgtaaaaaagtcattaacatcacaaactggccgtagttgtttgctgctactgtgtgcctctctgagacatatgtgtgcgtgaagacacctgagcaggtgggctctagttggggtttccataaactctcaccctgagactcttctgcaattgaacacaaacccacacctttctttcctgaccacttaaagttcttttgtccttctgttttgatgactttagttttatcttgacttttgaacttcaaattaaatttctgacagtaaagctggataattttaaaatatcattttttgggatcccggaggctatttaaagtctttggttccatgtaattaataaaaaattgaaagggcattccatggcaaaactctgcactttaaactggcagccacaaagggtgagggcaatctctcctttggaagagtatattatactttggaatgttaagtccatgctatttcccattttgtttatagggatgatattatgtgcatgattgctctgttctgaagcaaatactggccctgtggattatatcaaatagatacattcactaatagaagtgcctgaccctgcatgctgcttttgcctctgatcactttttttgaatgagttacaaaaataattcttcaaaatagttcttcaaattctgttgaataagagttctgcatgaggtgtgtcttttgaactcttgttggacgttagctcaggaggtgggtcttcagggcccctcatgtgttaataggagccttaatgttctccaggcatcatgtcatgatgaacattaatgtactgtgggatactgacggagtgtgccatttatcaataggctgtaagacagtggtccccaacctttttggcaccagggaccagcttcctggaagacagtttttccatggaccatggttgggggtgtggttttggaaagatccaagtgcaatatgtttattgtgcacttttttccaactcatttgccactctaaagcccactgatagggttttcatatgtgtctgcaagcaattgattgattgtgatctctgtgcagtcagacctctctgttcatgttaatctgtgtttgcagctgctccccagcactcccatcactgcctcagctccaccttggatcatgaggcattagattctcgtacagagtgtgcagcttctgtccctcctgtgcgcagttcacaatggggtttgcactcctgtaaaatctaacaccaccgctgatctgacaggcagcagaactcaggcgggaatgctcgcacacctgctgctcacctcctgctgtgtggcctggttcttgtactggttcatggcccgggggttggggactcctgctgtaagaatagaatggggctggaaaaattgtttttgcagaagacagatttatgcatttctttccttcatggcgactttctgaggagagaagaggggagtggggaggagaacagtcgcattcatgggatactttgcaaattccatgctgttttacctgttttacaccaaaaagtgggtgaggttgtgtggcttacccaggacatggtggaggggtcttcagcccagggtggtgatgcagtggccccatcctccctggtcctggcctcctccacatcctgacccccggggctgttcacggaggggagttggagtcatgaggctgtgctgagctgcgttgcccaggtgcctgcacatgtatgcccaccagggtggacctgtagtgggtcctgcccaccatttctctcctggctgtggctctcagggtgctctggtgagacaatgtaactggcacctgccttagggctagtgatatggtttggctgtgtctgtacccaaatcccatcttaaattgtagctcccacaattcccatgtattgtgggagagacccagtgggaggcacttgaatcatgggagtgggtctttctcgtgctgttctcatggtagtgaataagtcttacaagatctgatggttctataagggggagtttctctgcacaaactctctcttacctgctgccatgtaagacatcccttggtctttcaccatgattgtgaggcctccccagccatgtggaactgtgagtcaattaaatcactttcctgtataaattacccagtctcgggtatgtctttatcaacagcatgaaaacagactaatacagtaaattggtaccggtagagtggggcactgctgtagataaccaaaaatgtggaagcaactttggacctgggtaacaggcaggggttggaacagtttggagggctcagcagaagacaggaaaatgtgggaaagtttggcacttcctagaggcttgttgaatggctttgcctaaaatgctgacagcaatatggacaataaagtccaggctgaggtggtctcagatggaaatgaggaacttgttgggaaccagagcaaaagtgactcttgttatgttttagcaaatagactggcagcattttgcccctgtcctagacatttgtggaactttgaacttgagcaagatgatttagggtatgtggcggaagaaatttctaagcagcaaagcattcaaaaggtgacttgggtgcttggttttgtaggggaagcagagcataaaagttcagaaaatttgcagcctgacagtgtgatagaaaataaaatcccaatttctgactagaaattcaagccagctgtggaaatttgcctaagtaacaaggagccaaatgtgaatccctgagacaatagggaaaatgtctccagggcatgtcagaggtcttcacagcagcccctcccatcacaggccctgaggcccaggaggaaaaagtggttttgtgggttgggcccagggtccccatgctgtgtgcagcctagggacttgatgccctgcgtcccagctgctccagttgtggctgaaatgagtcaatgtggagctcaggctgtggcttcagaggggggcaagccccaagccttggcagcttccacatagtgttgagcctgcaggtgcacagaagtcaagtactggggtttgggaacctctgcatagatttcagaagatgtatggaaatgcctggatgcccaggcagaagttggctccaggggtggggccctcatggagaacctctgctagggcagtgcagaagggaaatgtggagttggaacctgcacacagagtccctactggggcactgtctagtggagctgtgagaagagggccacggtcctccagaccccaaaatggtagatctaccaacaactggcactgtgtgcctggaaaagtctcagacactcaatgccagcccgtgaaggcagctgggagggaggctttactctgcaaagccacaggggcagagttgcccaagaccatgagaacccacctcttgcatcaccatgacccagatgtttgacatggagtcaaaggagatcattttggagctttaagatttgactgccctgctagatttcagacttgcgtggggcctgtagcctctttgttttggccaagttctcccatttggaatggctgtatttaacaaatacctatgcctccattatgtctaggaaacaagtaacttgtttttgattttacaggctcataggtggaagggacttgccttgtctcagatgagacattggactgtgggcttttgagttaatgctgaaatgagttaagactttggggggctgttgggaagatatgattggttttaaaatgtgaggacgtgagatttgggagaggccaggggcataatgatatggtttggctgtgtccccactgaaatctgatcttgaattgcagctcccataattcccatatgttgtgggagggacccgttggaaggtaatcgaatcataggggtgggtctttcccttgctgttctcctgatagtgactaaacctcacaagatctgatggttttataagggggagtttccccatacaagctctctttgcctgctgtcatccatgtgagatgtgactttgctcctctttgccttccaccatgattgtgaggcccccccagccatgtggaattgtgagtccattaaacctctttcctgcataaattacccagtctcaggtatgtctttattagcagcatgaaaaaggactaatacagctagggggtccccatccacctgaacccccatgaacctcttgtgggtctactgactttggccttcttggagtctttctgtttcatctgtgctgtttcttaggaaccccgccccacctgtgggctgtgctgtgagtttgaatgtggagtcttctccatctttgtctgtgctatttcttaggaaccctgctccacccgtgaggtgtgagtttgagttcggagttgtttttgtctttcgtctgtaccatttcttgggagccccccacctgtgggctgtgagtgtgagtttggctgcagtttctgaggatgcagcttttccttcctgtgtaattagtgtggctctttgtcccacccttccttccctcccctcctctgttcctgtctttgctttcatcaaacatttactgaacagacaccatctatgaaggtgggtcttggctgccactgctgcagaggcgtgttgcacagcagaaccgtattccctaccccggtcctcctgccaaccccagtcacccccaccctggggtccgcagccccttctgcaggctgctggagggagcatcctacgtgtggacacctgaccttgctgttctctgctctagggggcagcctatgagccttccccactctgggggctctcccaccccttccatgcacacagggccaggcctggcaggtgcagcccctgtcctaacccagcacttctcaccccgcaccctgcctcaccctgcagggagctcttcccctccacagctctgagagacaggagtgcgtgcagatgcactgtcaataaatacttattaataacaaattcacagatgacaggactgggagcggggtcttctccccatcccattaaagtccccttgatcgtaacagccaaccagccttttctggtaagaattttgtcaagtattttatatataatatctcagctattactaataccagtgctgcatggaaggaattatcattatcttcaatgtattgattaaaacacctctttgacaaatgtgcctgcctgagcctataaccagaaagcaactgagttggatgttgaccctggaccctggaccctggaccctggagtgtgctggactccaaagcccaggagttttgcacactttctttggaaacgtggtgatatcaaggcagagaaccaagagtggggttttcagcataactggatgaagactgggcagcttgactcagggcattcgcaatagagggggcctgtggggagcagctcactgtggggagaggacagggggctgaagtcatcctcggatgcaggcgtgtggtcaccatgagtcactgggacctgcggttcccccttcagaaccattgctgtgtttctgtggaaaaggagcttaagtccctagtgggtccagggccctcctgcaccaagaaggaggtgcctggggaagcctctgggcagcaggcggggcttgcaggcccctttaggaaaactcatgccctggggagcgaatgtcaagagctgaggggacagcctccaaccattatgtaaaaaagccattgtcaaggtcaagggttgtcctgaggccaatagcttttatttgcttttgtgtcaggtttgttcaggtttgtataatcatatgatttgtatgcagtaaaatgcggtttctaagtgcacagctggaggagtcaggaggaggtgtatagtcccggagccaggtccaggacctgccgtgtcacacctggaaaacccacagctggcatcaggactggctgtgttacacccagaaaacccggagctagcgccaggactggctgtgtcacatctggaccacacagagctcttccttgccctcatggatctggttctgtgctgtgcttgctgtgtctgtgttgtagccacgggccctgtgctgtgtggactgtgggggaggcttctgcctgcaccctgcccttgagcaccctccgtgcagggccgtaccagcagcccgtcccttggtattaccaggtagtgtccctggaatgggtgtaagaaagtcagctctccagctgcggacatttggattgttccacttttcagctgtcgtgcgtaaagctgtgataaaccaccgatgccggtttcctgtgaactccattttcattcctcttgggtccatgacaaagcctgtgattgctgagtcccgggaaaattgtgtgtgcatttccacccccaagccgagccagccagttgcctgcctcctccctagcactctgcattgctggggtttcctccccagcctgtgggttcgtggtggtgtccaagtggggtccccttttcttatgcgtgatgatgctggctgtctcttcctgcacttactggccatcccttgctcttctttggtgaagaccgatacattttacatttaactatttttccataacacatggagattttattaacacacacgcacctaattgctaccagattcatgatgaaacaggagcatcccctgaccccgcgtgcttgatgtgtgacagggctgtgggggagtcccctgacccccctctcaggacgtgtgacagggctgtgggggagtcccctgacccccctctcaggacgtgtgacagggctgtgggggagtcccctgacccccctctcaggacgtgtgacagggctgtgggggagtcccctgacccccctctcaggacgtgtgacagggctgtgggggagtcccctgacccccctctcaggacgtgtgacagggctgtgggggagtcccctgacccccgtctcaggacatgtgacagggctgtgggagagtcccctgaccccgcgtgcaggacgtgtgacagggctgtgggggagtcccctgaccccgcgtgcaggacgtgtgacagggctgtgggggagtcccctgacccccctctcaggacgtgtgacagggctgtgggagagtcccctgaccccgcgtgcaggatgtgtgacagggatgtgggagagtcccctgacccccctctcaggacgtgtgacagggctgtaggggagtcccctgacccccctctcaggacgtgtgacagggctgtgggagagtcccctgaccccgcgtgcaggacgtgtgacagggctgtgggggagtcccctgaccccgcatgcaggacgtgtgacagggctgtgggggagtcccctgacccccctctcaggacgtgtgacagggctgtgggagagtcccctgaccccgcgtgcaggatgtgtgacagggatgtgggagagtcccctgacccccctctcaggacgtgtgacagggctgtaggggagtccactgacccccctctcaggacgtgtgacagggatgtgggagagtcccctgaacccctccctcaggacgtatgacagggccatgggggagtcccctgaccccccctcgcaggacgtgtgacaggactgtgggagagtcccctaaccccacgtgcaggacgtgtgacagggccgtgggggagtcccctgacccccctctcaggacgtgtgacagggctgtgggggagtcccctgaccctgcatgcaggacgtgtgacgggtgtggctcatctgtttggctgctgcgtgctcaaagagccttagggaagggagagcacacagataggcaggtgcaggagccggggtgagtgcttttgggctctggccctgcagtagcatccaggggtggggtgtctgtgactcccaaagccgcggtgggtgtgctacagtgctcttttagcagttgccacccacagatggcttaagtattaaccagctcagtgccctgttgatacccaggttcttatctggcgtccaggaagaatcaggtcacagggacaaattgaaggatggcaaatgtgggggattttactgctggatggaggtggctctcagtgggatggatggggagctggagaggggatggagtgggaagggatcttcccctggagtttggccgtcccgcagccaatctcctttctgactgtccccagccgaactcctcttgacattcacacgctccttctcttctctccttccctgacacgccactcttctgttcctccgctcttccactagtggagcctggggcttggcatttacatgggtacaggataggcaggcatgggaggccaaaaggcaacatttgggcacaaaaacaggaatgcctgttcccattgagggccacaggtttccaggcttgagggcggggcctttgccggggaactaccctcttctacccagaatttttctgccacctgcccatatcagtgatgcttttctcagggaaaactgtagttgcaatggatttaatgttcagctgtgctgtcccaccacatccccgagatggctgggtttggccacaccaggagcttgagcctggctgccttgcatgctctcctaaaatgtctgccccaagacacagctgccttgtctgctgccctcattgtgcctggactatgcctgtgtcctgggtactctgtaaacatttgctgaatgagggactaaatgagcagtgaatcacatgacaagccctctgctgatgccctgtgggcacttgcctggtataattctggtgagttgggagctgtggggaggcccagtgctgccaggtttaggcacctttctgacttcatgctctggccggccactgcctctcatatttagggtctcactgccacgtgaagcagctgagagctggtttcccccatgaaatacgtctgctgctgagcctcggggatgtggagtttctcatctatcttttcctctgcgcctcaggccaccatgctctgtgtttttaagcaggaagggattttagccccaccctttattattttctgttacattttcccagttaaatgttacatatagtagaaatctgtagacttgaagtattcaattctgtgagttttggcaaatgcacccagcatgcagcccctgcctgtgctgtgacttagaacatttacatcacccagaaagttcccatgaaaccacatccccgccccggaaatgacttctcccattcctttgcacgatatgcttggtttctccaggtctaaagcttgctgttctggatttccgcagggcattctttaatttctgcctccagcctccatctgtccacttgctgtgtgtggacggtttgtctctgttttgaggggagttccattgagtggatgcgccatgtttcaaacccactttcctgttgacgggctttgttctttctttttttctttcttcagtttttggcgcctatgaataaagtctctctaaacattcttgtacaatcctttttacagatcgtgttttgtttctctcgggctagtgtccaggagtggagtttctgcgctgttgatattgaggtgtgtgtctatgaggagctgcagggtctggtttcacaggagcgagtgagtgtgtgggtggctctgcagccttttgccagtgtgttcttggcctgcagcattggccttttgagttggtgtttgtggagagttccatttccagtggtctgtcctggaggtggctccctcctcctgacaagggagctttgtgattggatttttggtgtttgagacccagctcttccccttcactgctgcttggacccagagcaaacccctcagctctagattctgtttcctctgtttgcggtggggatggtaagtgcacttgccccaagggtcagaagggccactgcgagggtcagaagggcccgctgcctgagccctgactccagtgccgggcgcgtgggcgtcgtgttgccaccgtgggaacagtcatcacactctgcccgtttccctcagggcccagcccagcacccacagcgtctcatcttctcatctgtgcatttgagagttatccatgcaccaggtaggcagagacagaatgctgggcttggcaaaggctgagacgcagagagacgggagggccctccccacactcccatccagagagggcgcccagatgctgccggatgagagcgtctccctttcctggcctgcaggctggctgctactctgcaggtgcatgggctgaaacagttgctatttatttgaatatttccaatcctgctccttcttcaactttcatccggtgggaactggccgcactgcagtgtaattcttcatttcaaagatggatgaatcacattaattgcacagaaaaccatctccaaacctaaaacaaccaaatgtgggtgccaggagagacttcgtttgcttcagtggcagctggtctgtttttcctctgaagagattaagcaaaggaacccttagtaactgtgtgtgatacaaagatggtctgtcagcctttgggaatactagtttactaaaaagaaatatttctttctttcaatcaacagaactgtacttgctgaagataaacgtgcttaagaacatgcagctaacgctatgaaattagcgttactcacactcagttggaatagaagtgccttcaaccttttagcaaaggcaagagcaaattatagcaaaaaactcatttcagaagtcatctttgtgcagaataggccgggccccgaggtcaaggcatccatttggcactctatttccataatgcgattccgcagcgtacgggcgtcagaggaaagcacatctgctgtcatattagtcttataaatgccgatgttaacgctcctttacagacaaagccatcttgggggtgtggccacaggagtttcctctgcctggaagtccttgatttaagaggccgctgggtggaaccttcggccgtgctgccctgtgcagcgcatcctctggcagcctccctgtagtggccctgctcagtgttaccttcggtgttctagagtggccaggtggccccagattgcaggagggatgcccggaagctgtcaggtcggggagtcttagcagccctatgtggctgcttggaccctgggtgctgaatcacagcctggagaactctgcctgtcaggactatgcatgccttttgatttgtttgcttaatatatatattttttcctgcacttaaagataatgcaagctgtataaaaaacagaaataaaaaccaaaagggagatgcccatgaagctgaatcagagggtgactagatgctggggctgtcttggggcactctggggatcagcgtggtggagatcagctccgggaaccagcgtggtggggaccagctccggggaccagcgtggtggggaccagctctagggaccagtgttggggggaccagctccagggaccagcacaggggagaccagctctggggaccagcatggggggaccagctccgggtaccagctcatgggagaccagctctggggaccagcattggggggatcagctccagggaccagcattggggggaccagcttcggggaccagtgttggggggaccagctctggggaccagcattggggaggccagctctggggtccagcctgggggtgtccagctccagggaccagcgttggggggaccagctccggggaccagcgttggggggaccagctccggggaccagcgttggggggatcagctctggggaccagcactggggaggccagctccggggtccagcctgggggtgtccagctccggggaccagcgttgggggtccagctctggggaccagcacggggtgggcaggtgagactccacggggacctcttagagctgctggggctcggggcaagcctccctctgtgcctgcagtgctcagccagaggtgctcatccccggaaggtgtggccctgcgagggggtcttccgcacacagccagcgcccaggagggctgatggcagagggtgtctgtggcgtgactcacagaacctcatccccggggccacgacggacgctgagtgcgctacgtccagctgtgtgaggttcatctctcccttttagaaaattacatccatgggtttatattccttttctcaataagtactatatcttgagcatgtcacgttatctgttttataaatatgatctttaatgtggtgtaatttaattattcacctacggttggaaattcctttgtttctcaatgtctgattcttagtaagcacatctttgaaaacgaacggttttccgcatatgaatcatttccttagaacattcccctagaagtgaaattcctaggtcacttggtgtgtgcatttttgagagttgctgaattttccttccgagaacttgcataaagttcctctctcaagcgtgaggtgcttgttgcgtcacaaggtcatcaatgtggatgtttattagtgaagaattttaattgtgtaggaaaatatgcctcctcgttttggttttcatttcttatgctaagtttatgttttcttttatgaattttattggtaaaattgttacaaatgttaatcaaataaaacataaggatatattttattctcatgtatttaaaaatagaaggttaaatcttcatgaagtgaaattaatcttttttttttttgctttcctttgcttgtttaggaagtctctcttattataggatctgataactattcacctaattttttccttcctttttttcacctaaatttttcctaccaaaaaaaggttttacttgaatccatctaagccattggagatccatgttgctgtcagggtcacttggccgtgttatccttgtccacactgtgggcccgtgtttcttccctgcgcagtcacatacctggtcaagtttgttcctaggtatctgaaaatttttcgttatgaccgagtgagattattttttctcatatttcccaaatgacaattgctgctacattttttactttttttcttataatgggctgctctaccaaaactctttcattgtgatagttcgtttgattctttagaattcaaaaacagttgtgtgtaagggtgttttaaaaattgttaattttgtgtggtatttagtaaactctgaatcttcagatgagcatctttggaagtggaagtttttttgtattccacttttgcatgttgctttctttcatttattctggttctcccagcctttattgattgattgatttttaaaaatttttttgagacaggagtctcgctctgtcacccaggctggagtgcagtggtgcaatcttggttcactgcaagctccgcctcctgggtttatggcattctcctgcttcagcctcctgagtagctgggactacaggtgcccaccaccacgcccagctaatttattgtatttttagtagagacggggtttcaccgtgttggccaggatggtctcagtctcctgacctcgtgatccacccgcctcggcctcccaaagtgctgggattacaggcgtgagccactgcgcccagccctcccagcctttatttattttttctttttatttttgagatggagtctcgctctgtcacccaggctggagtgcagtggtacaatctcggctcactgcaacctctgcctcccaggttcaagcaattctcctgcctcagcctctcgagtaactgggactacaggtgtgtcaccatacctagctaatttttgtatttttaatagagatggggttttgccgtgtcggccaggctgctctcaaactcctgacctcaggtgatcggtgtgcctcggcctccctaagtgttgagattacaggcatgagccactgcgctggcctctcccagcctttaaaaggcagttgtccttatgccaaatccccagtcagtcaccgccgtgcaccagtttctcctgcagtgttgatcacctcgttcccatcgtctgtagctaagctcctgttcacggtggctttcgtgtgactgaggtgacttcccgggacagttctgccctcggtgtttctgactgggcctcctgcccgctgagaccacactgtcctcttcacagacttccttctcagtctgtctgccgcccagtcaggtcggggacttctggagtgctgttatcttgctttttatggttgtcattttcttaaatttgagaacacaaatcagatgctttttagaatttacatgggtttccaactgtaatttttaaaacctatttattttcctgtaccttcaatgtaggtttgccttttccgtgctacagaatcattttgtggctctcacatggtttttctgtttcagtgttccagtttctctgtgtatgtttgtaactatgttttcacgtttttatccttataacgggaaatgtgtaatcagggctgatatttaccaataaacagattggtgaatgagcagattccccttggcccttttactttctctactggacagtgggaggcgtttcctctcggttcaggcagatgccatgtgtggcctcaagtcagcctggtgctgatagcatctgcccagtggccccaggttgggggggtcctgttctgacccccggcaccctcaccatgtgttgagtgattcacttttggacactctgtgtattagtcagggttctctagaggggcagatatatatatatcatattagttacatatacgtgtatgtatataactttataggtatatatatgtgtgtgtgtgtgtgtgtgtgtatgtgtgtatatatatataaaggggagtttactaagtattaactcacatgatcacaaggtcccacaataggctgtctgcaaggagagccagtccaggtcccaaggctgaagaacttggagtccaatgttcaagggcaagaagcatccagcatgggagaaagatgtaggctgggaggctaggccagtctagtcttgtcacgatattctgcctgctttatattctggccatgccagcgactgattagatggtgcccacccagactgagggtgggtctgcccctcccagtccactgacccaaatgtgaatctccttcggcaacgccctcacagacacacccaggatcaatactttccatccttcaatccaatcaagttgacactcagtgttaaccatcacactctggttcctctggaccccacacaattcctgcctcttcacctctgtctggcagagctctcgtcctaaaattacagtttctgtgtggccacagcaaggaggaagacttggggggtcgaggatggtggggcccagctgggccttgggtctctgagggacctgcaggggagggggctgagtgctgtccttcctccctggggagccccccagctgctctgtgccttggtccttggacgtccctgtgcagcaaagcagtggcctcctggcttccacacctgtcatttctcatttactgtgcgggcgggccgggccaggaactaacagtttcatatgaacttcacctaaaagtccacactgagcttttcaaagtgtggctgtcggcttccatcatgtatggaaaccctacttcatctacctggtcatcactgtgatcagtgctagcccagccagtgatgctggtaggaataccattttttctttttcaagaaagtttgtaatgaaagctttaggtagtcgctaagaaaagtcaagatttgcttctctgaagtcaacacaagcgggggcctcccagggaagctgtggcagctgttacagggtcccgcttctctcctggtagggatgttccagttgggttcagcctgctgccgaatatcctgggaggccggtgcaggaggctctagaatcaacctgtactgtaaacgtttgccctgttgaagttatggaattacaggacaaattctctgacttagatatgcagtggtgtggacagtaaagcctcatcaataaggtttgtattaaaatgctcggtgacttctggtgctggtcaaatattgttctttcctcagctcaatttaaaggttttcctcctctgggaaacttgcagaagggaaagtcaaactcaggaatttggtgtcttgaaacaggaacatggccctaagttatggtgggagcagatgagccattcccaaatgctgctgccatggttgaaatttgtaaaccgtctggagaaacggtccatataattgaatcttttgaaaatgaactcattatggagagagttgcattttagaggggaatgactgagcatctgatgggctctgggccaaggaggtcaaacgacttttccttcattctgatagccatggatgggttcaagagcttattttttactctctggaaaaaaactaacattaatagagcttatcccagacttcttggggctatttccaaaggacagaatgctgaggctcacttacaacgtaatttcgtcatccttcgcccgcggagagctaacccatggtgaattaagcaggtgactgacgtgctccccaggagccagcctgactccagcacagtgtgagtgccaccgcccagcctcccagttggtgcctccatcctgtgaaccactgcgtcctcctgcccatgatggccgtggcctttccctttcccaccagtgaggatatctgagtaccacagagctcaggtgagggaagtcagcagttgtctagcatagcttccgtattttacaggtgagaacacaggacttggagaatcgggggctcatggccacatggggagtgaatgcctgtgtgtggaccagaggcctggccgtccacctggggcatctgtgcccccgccatacttcccaattcagctgccgtagcagcaggagcatgcttgtgcctgggccagatgcttccgagcactgggggctggttgaccgaggagaagtcagctctgtgggtgtccctgcagcctggggcacgagtcctgagcttgtctctcattccaggtgctgttgcctttcctggcaacttatctaggacttttctgatgcagaggtcactgtttctcccctgaacccctaagctatgcttttccagtcctgggtgcacgggagcggcactgcccagcacagacagggttatgtagcagaaacactccctggaattggcaaaggcaccgctttgctgttttaaatcctatttgctttccttgtgacgtcttcggtcattttcatggtttatttccattcacaatacccctggaaacagaaaccagctaaacgactgcagctttggatctctggtaaccagaagcaaagacaaaaattcaggaatgagaaccctggccgtcaatggcgactgatttcagaaattgaaaatgtccttaggacaagtcccagcaaatgtggcagaagaaccacccatggtccgcagcaccacgtccttccagccgtgtatgtctcggtggatggaggggctgccggggctctgcgttcggggaaacaaggcgctgtgggcttgttcccgggttgccatggcgattcctcattatctccagtcacagagccgtgtgcagggtattggcagcttacacatgtgctgcagcttctcccagggatgctgtgggtgtgtgggtgtgtgtgcgtgtgcacgcgtgcattgggctgtggcttctcccagggatgctgtgggtgtgtgggtgtgtgtgcgtttgcacgcgtgcattgggctgtggcttctcccggggatgctgtgggtgtgtgtgtgcatttgcacacgtgcattgggctgcagcttctcccagggatgctgtgggtgtgtgggtgtgtgtgcatgtgcacgcgtgcattgggctgcagcttctagggatgctgtgtgtgtgtgtgcatttgcacacgtgcattgggctgcagcttctcccagggatgctgtgggtgtgtgggtgtgtgtgcatgtgcacgcgtgcattgggctgcagcttctagggatgctgtgtgtgtgtgcgtgtgtgtgtgcacgcgtgcattgggctgcagcttctagggatgctgtgtgtgtgtgtatttgcacacgtgcattgggctgcagcttctcccagggatgctgtgggtgtgtgtgcatgtgtgcatgtgcatgtgtgcattgggctgtggcttctcccagggatgcagtgtgtgtgtgtgtgtgcacgcgtgcattgggctgcggcttctcccagggatgctgtgtgtgtgtgggtgtgtgtgtgtgcacgcatgcactggtctgcggcttctcccagggatgctgtgtgtgtgtgggtgtgtgtgtgtgtatgcacgtgtgcactgggcttcggcttctcccagggatgctgtgtgtgtgtgggtgtgtgtgcgtgtgcatgtgtgcattgggctgcggcttctcccagggatgctgtgtgtgtgcgtgtgcattgggctgcggcttctcccagggatgctgtgggtgtgtgtgcgtgtgcatgcatgcatgggagcagactccacgcatgccagttctaacgggcttcaacaacacctgagctctgctggagcacgtgctgtttccaatgggagcgaacgtgtttcctgtcactccagctgattgatctgaatatcagggaatcgatgtcatgtgatttcttttgtaggaagagagggaggagagacaaagggaagagaaggggaagggaggggtgaggaagggaagacagatgggaaaaatcacaccctcgttggttgtgaggagcacaaaaattgccgttgtcagaagtgccgatgaggtctgcctccagccccgctggcctccggagccctgagaaattcccacggaccgtccaacgcgatggagactttgtgcggtgactgtggctcacgtgaggcgctcgcaaggacggtttcccacttgcgtgattccttgtcctgagttatgggaaacgctttcgagtctggggttttttcagattgtgtctgaagagtgaaggctatttattaaaatagtgtggagtaaaccacccaatttgaccatgactttagggtgagaacgtgtgtgtctgtatgaatgtatgtatgtgttgtgtgtgcacatgcgtgtgtgtgtgtgaatgtgtgtgttgtgggtgcacacgcatatgtgcaagggtggttgtgtgtagtgaacctgttgctgttagctgcctgctcaggtgtgaccattctcatgccgttccgttatttcttttttggtagaagtcaagtgcctatgactttccaggccacagtccttggcagggtgtgtatttagaggtaaacatgcctggagacctgtgtgtgtggacagagagaggggaggagccccggctatagacgatgccccacaaacacatccgaggcttggatgacgacttcccagctgtgtgatcaaaactcccgggatctggggctgggacggagaattatgcatggagatcctcactctcagcgtgtcagcgtgaagtctgatgtttaattgaacatctgtctgcctttaatatgaacctcattattaagcttacatgtgactgtctctttgcttgtattctcagatcttaggagatctttaaaaaattgatttataaaccagaaaaagagacattcttggtcacacttacctgaatacgaagtgaggatgggggctctgcataccctgctgtgggaagcatggcgagaggcaggtgaagtgaggatgggggctctgcataccctgctgggggaagcatggcgagaggcaggtgaagtgaggatgggggctctgcagaccctgctgtgggaagcatggcgagaggcaggtgaagtgaggatgggggctctgcagaccttgctgggggaagcatggcgagaggcaggtgaagtgaggatgggggttctgcagaccctgctgtgggaagcatggcgagaggcagatgaagtgaggatgggggctctgcagaccctgctgggggaagcatggtgagaggcagggtttttggtcttaaggaattgatttggttcccaaagccccattggctagaaggtcactgactgcctcatcgttcgcctttcaaagagaagaatgaaacagcgtccggcaggaggcgatgtctggggaagcgtgtgtgtgtctccccatgtgcatgtgtgtctgtgcatgtgtgtgtgtggttgtctgccagcctgaagtccccttttctgtcatattctagtccactgtgatcaacaccagagactcctccatccactctctccatcggccacctcctctccctgacctgccagaggcatccgtggagacccagacactggggttcctgagctgcaggccagccgcttcccaggcccgtgccccgccccctcccgacctctcctggctctctcacctcagagctctgggggccgagcgccctgggacaccctaagtgtctcacctcggagttctggcaccctgcctgtctcactgtatcagcatgcgcggttctctcctaggcaggcacgattttatgtttgtctgggaaatgtgacgatcaagactgggtgaggcccttccaggtcaggtggtcaggaaagcgctcaccaggaattgtgtgcaggcttcgacggggctgcaggacctctctggtcagagaatgaattcagagctgtgggctgagtttcacttgtatgttttgttttttccgaaattgggctcgcagtggttccagcgtgggtgtgacttagttccagaggctctggaggaggcggcctccccaagcaaccgagcatcctcccatagcttctcagggcctctgcgagcacctgagcgtcctcccatagcctctcatggcctcccaagcatcctcctgtagcctctcgtggcctcccgagcgtcctcccgtagcctctcctggcctccctagtgtcctccccttgcctctctggtggaggctcagcgaaggctggcgagctgctgtccatggtgctggccatctggccccagggaaagggctttcgagagtggtgctccacgggtcctgtccccctcggctcatgacgcgcggtgcataatcctgcggagacagctggggccgcctctgttccatggatcatggggaccagggccacctacaacatggtggcctgaattgcgattgtgtctccagtggcgtcgttttgagacttctctttaattctgactcttaattctgactcaaggtccccagagggacggtgactgagccagtcccatctggggctttggggctactgcccctgggatgtttgggccccagaagtgaacactaacccttggaaatctgcagggctttcagacccctgccttccttctccactacctctcatctggactcgagttccctgattctctgcattttcaccaggatgagcgtggttgtgatggacaaacctgacttacggttttatacgcacatccagttatctccttagaatatatctttagcagagaaactggggctcctggggcttggccattttaaaacttcagtcaagttgcaaatttgtcccttgcagaggggacacctaatttgtgcccaacaaaatgtagatgagtccatgtcattcaccagcaacctgagttatcccacaaagtcctttgcctttctgaggtctgatgggcagaattgtcacattgccttaattaggccatctttaattacaaataaagtcaaatttttcttctctgtgagtaaatgagttgtggacatttttttcttcctgtgctttggggccagggtggcctgaggaaagtgccgggcacaggggctctgtcccttcatcctcttgccacacaggacagtgctggccttgggagacaccaggctgaggccgggcgggcaggggcggcctcttctgcctcctcctctggacagcccagagctgagttaggagagctggggcgatggaggtccaggaaaggtggtgcctgctggtgcagctgtggcttctctgcatttctagtctgggctgggctgtttgttaatggaaaagaggcccaggctgggaggttgatggtagcacaggtgcagggacgggatgagtgacagacagacggaggaaagatggaacccacgatggggaaggggctgggattcagggccaagaaacgaagggaggagagaagcggggatgagctccataggcagggtccaggctcagcgggaagagctgggaagagggggatgagggagaggcagggctcaggcagagacacagtgaggactgggcagtgccagctcaggttctcaggagggcctgccccagccagaccatctgtggtgaaggtgagcccacacctggctccaggcactgaccttcctggggcccttgttggtatctgtgttgggggaacacagatccatgcctgcctaggatcccccaggagggtccgggagtgcccccaaggtccatggtgggcatctgctaacagcctgtcctgagggcagggctggctccggggctccagatcgtctgtggctcagctctctctggagggctgtttgggtctcaggtctgaatattggagcccagggcttcagtggaactgggcagtggggatttctgccaggtgtggatggcctgagcagcaagaaagagcaaaagaggttttcacagcgtccttctccagccagctgtgatggggtctgggcaaggatggatgaagagtctgtgggttgtcctggggaggggtggacatggcgtctgtgggtcatcctgggggagggtggacgtagggtttgtgagtcgtcccaggtgagggtggacacggggtctgtgggttgccagggtgtggggtctgcgcatcatccttggtgagggtggatgcagggtctgtgggtcaccccaggtgagggtggacgcggggtctgtgggttgccagggtgtggggtctgcgcatcatcctgggtgagggtggatgcagggtctgtgggtcaccccgggtgagggtggacgcggggtctgtgcgtcatcctgggtgagggtggatgtggggtctgtgcgtcgtcctgggtgtgggtggatgtggggtctgtgcgtcgtcctgggtgagggtggatgtggggtctgtgcatcgtcctgggtgagggtggatgtggggtctgtgcgtcgtcctgggtgagggtggatgtggggtctgtgcgtcgtcctgggtgagggtggatgcagggtctgtgggtcaccccgggtgagggtggacgcggggtctgtgcgtcgtcctgggtgagggtggatgtggggtctgtgcgtcatcctgggtgagggtggatgtggggtctgtgcgtcgtcctgggtgagggtggatgtggggtctgtgcgtcatcctgggtgagggtggatgtggggtctgtgcgtcgtcctgggtgagggtggatgtggggtctgtgggtcatcctgggtgtgggtggatgtggggtctgtgcgtcatcctgggtgagggtggatgtggggtctgtgcgtcatcctgggtgtgggtggatgtggggtctgtgcgtcgtcctgggtgagggtggatgtggggtctgtgcgtcatcctgggtgtgggtggatgtggggtctgtgcgtcatcctgggtgagggtggatgtggggtctgtgcatcgtcctgggtgagggtggatgtggggtctgtgcgtcatcctgggtgagggtggatgtggggtctgtgcgtcatcctgggtgtgggtggatgtggggtctgtgcgtcgtcctgggtgagggtggatgtggggtctgtgcgtcatcctgggtgagggtggatgtggggtctgtgcgtcatcctgggtgagggtggatgtggggtctgtgcgtcgtcctgggtgagggtggatgtggggtctgtgcgtcgtcctgggtgagggtggatgtggggtctgtgcgtcgtcctgggtgagggtggatgtggggtctgtgcgtcgtcctgggtgagggtggatgtggggtctgtgcgtcgtcctgggtgagggtggatgtggggtctgtgcgtcatcctgggtgagggtggatgtggggtctgtgcgtcgtcctgggtgtgggtggacttgggatctgtgggttgtctgggtgaggaaggatgcagcgtccgtgtccccttcacacgctgctcttaaggagcgctgtgagatgtcccactgaggggcttgtcttctcactctccacagctgacatctccagtgttaggtcttgggcaccaaggaggggccaagctaaggtgctgtatattaaaaactgtcagaggaagaaggccattccatcaggaatgccttcttcaggcatctgggctctcgcttgggctgccattcttaatcatgttttaattttcaaataaattgctttcattatccgttcatcgacaacaccacgtgtacattactgctcattaatgtttgtcagctactgtgctgaggctgggtttttaaatagccatggtcacggtgcagtaattaatgatgacccatgttggttttacagaattattattatgtttaatctttgaaaaaacaacctagagtgtcgcggtgttgctgaaagttgtcctcaggctgcaaatctttgaaggccgcaggagtccttgggcaggccttcgtgttgacctgggagcagtccttttatggctccagctgggtccccccggctggccgagcggagtgcctgggtggcactgaggaccacctttcctttgtgactgtgtgttggcctcgccaaatgacctcttggccaatgtgataccaaattaagtttcttgaaaaaacatccattatttaaagcattcatttcgtgcttgaggtctgatcctgttcaaatcagaagccaagacattttcaacgttagtgatggtcgcctctgtagacttgtgtctggttaaagttgtgagtattgatagcgtcttcccacctgtgcgtgaatcactttggatttctggggtctgagcagggactcgccggccatggccttgctgatggggcctcccagatgctgcctgccttcctgtggttggattagctatgctggggccttgaggtcatgctcatcatcaacctcatagtccagactccttagagtggggatggcgtccctcccatccagtttctcatttattcagtaaaccttttatcacttcttaaagactttcagtaacttatacataagaatgaccattttaaccatttagggatatagttcagtggtataaaggatattcacactgctgtgtagccatcaccaccatccacctgccaactttctattccaaacagaacctctgtgcgcattaatgctgactccccctccccaaggccctggctgcactcagtgtaccttctgtgaacctgaccatctgggggccacgtatcagtgcaatcggagcatgtgcccggctgcagccgaacgctaaaggcagcaccgcgtgctcagggctggtgcaggtgtggactgtgtcagcgtctccttcctttctgaggctgagtcccattctgtcgtgtaaatagaccacgttctgtttctccacccctcagctgctgggcgcctgggttgtttctgtgtctggcttctgtgaataacatgctgtgtgcgtgggggtacatacacgtatttctttgagtcattgctttcaagtctggtaaattttcatgaaaccatttccgtcggccgaatattgtgataactgggctttcagtgtgtctctggaggccaggaagggcagagccgcctgcagccctcctccagcccatccttctgagaatggctgagcttccaggccatgctcctgaaaaaggtgaagctgagggcaggaaagagggccccccatggctacctcagcccacgcccctcccaccagtttaagaccaggccggaagaaaggtgggcgtagggcgtctcaggtctccctgtggttggtttggggcagcctcccgaggcttgctgggcacccagtccccgcctgcaggggtgagccgggctgctgttcccactgtcctgggctgagttcatgtattcgagtaactcacaaagttgggccttccattctaaggagccaccttaagccttgtgggagggccagagagagaaaaagagagagacagagacagaaagagagaaacagagacatgcacacacaaggggaggggaggagccccatgcacccctgattgtaagtgtgtcccctactttgcccttggcttggccggggccctctagttggtggtgggacggtgagccagagttgagggctggcggctgggttctgagagccgccactgtcccaatgggacacccctgctggacgcaatgcgcctcctgccttgtgagcttcctgccctgggaccaggcccttctttctccccggaatggtccctggaaccttacgggacataagagctgggtcccggttgcttggcagtggctgctacaggcttgctgatggctgacggctgcacagataagctgccttcctcctctcctgccgcttttcttagcacccgcagctgacggtgcctgtgtgacgccctcagtgatttgggtgggcctgggctgcgcagcaaatgcaggttgcccagcaccctgaaggccagtgttgggccagcccctggccttgtccggggtctggccttggggtgagcatagcctggcgtctaccgagcaagccaggaagccaccatttgtgtctgtgatggaggcacctcctgtcacctccacagaaagagtcaaaaccacccctgaaatcactgaggtgctgccacagggcgtcaacgacagcctggccctcgcctttgggtggtgccgctgggccagggaacccacagacctgccgcagaggcctgcaagccgggcacccactgccgggcgtcgttttgtctcctttctcttttatgtaatgtggatgctttcccccagtaaactctacctgcaaacaagccccgtgttcacatcattcgtccggttcctcttccgtcctcaaatcttggtttctattttctggttgtttgcacaggaccatggaatttcggaattggagatgttcctgccattgggttccactctgttacttgcagaaaaactaactctgcagtccagagaggcctggtagccagacggaggccgctctcccggccagcacagagcccacctgaccctgtgctggggcccaggatcttcccagccacagtttcgatgatgatcgtgatgggttttacttggtccccagaagctttctcccagtcagtccatttctcctgatttccccatagaaaagctaagagaaaatttatcagaaattatttctacttttttttttttagctcttttcaccttttgctttgttatgttatgaattgtgacctatctggcccctcaaataaaatgtgggctccttgcagcacaggctctgtctggctgatctttgtattttctttacgcacagcgctcagcatggtgcctggatggtggtgcctgctcagcatcagcctgtttatttaagaggtgtgcatggggttcttatctgccgggtgggaagccctgtgctccacagattgctggcagtgttgggtgaggacttcaccactgttgtttttgattatgttcaactttccttgtccaaaaaaacccaaggaagcaacaaaaagatactctatgagttgatgaatttgaagtgggaatgtgatagggaaggaaaaagaagcaaatgttcccacaaggtcaacagagttcctgcaactaagccttaaggttgcctttgagctcccagaattcaggatgaaaggggaaaaagataagttgagtggggctttataaataaaaaatgcatgtagtaggttagacaaagggaaatgagtgacttgttggttattttagattcccgaggaaatttttgtcaacagtgatgaccagcttgtattgtctttattttcagaaatggcagtcttttacattggatgtcctttatcccaactgtgaaaactttaatcatttacttaaataccataaagacagccaagaagacattttccattgatttatatgtgtgtgaaaactcattgtgaaaaaacttgtaattttccataataataaaaaagctttgattgagggctcaatcactgtgggcccatgacggctgctaggctgggtggtggcgcctggaaccacattctgtttcgagggcagataagcagagaggcagcagggtcatcatcagcctttggcaagaacagccttcccgcatccccacgtggaggattcgcatctgcctgtgagcgaggtctcaccccatcatcttggggttcacgctcacgctcttcccctgcgttccctggatgcttccttcaggctggctcctgtgcacgcagattctccctgttgccatctggtggtgagtactgggttttggatgcagccagtgtagttctgcagagtccagcaaatgaggggactctgtcctggctcataaggacatccctctgcactgctgcgggcttctccactgcgtgcttctggggcccagcctgcctgactgctcctgcctctcctgccgttgttgctggtggccagcccattgcagggctgcactgcagttgcatttcctcagttctctgttgacacaaacggacagatgacacagtgtgagcagctggcaggagagtgagagagaggcaggcaatgttcacagctcacaaaagctaaattacagacacttatgctgcagcaccctagctatcatcatgcaaacacagaacatttgattggaaaggatcctagaaaataccgaattcattggtctcaatttaggaaatggaagcacagagaagtgaagtgatttgcccaagtttgcacagcaggctggtggcaaggtggaatgagaatctgccctcttagtgccccattcgatgtatttttgttctttctgaatgaagagatctcttcagcatttattgtaaggtgggtttggtggtgatgaattctctcagcttttgttcgtctgggaaagaatttatctcttctttgtatttgaagggtagctttgctggatacagtattcttgggtgacagattttttttttttttcctttcaagactccgaaagtatcatcccattttctcctggtctgtatgttttccattgagatgtctgttgacaaacaaattggagctcctttagatgttatttgcttcctttggggtcttctctttgcccttgagctttgacagtttaattattaaaagcctgaggtggtcatatttgggttgaatctggtgttctctgactttcccgaatctggttatctatacctttctcaagtttcagaaagttttctgttactgtttctttgagtaagcttggtacctcttgttctcactcagctccctcttgaacaccagtaattcttggatttggtgttttgaggtaattttctctatcttgtaggttgtctttcattctttgttctttttcctcctctgattgtgtatttgagctcactgattctttcctctgcttaagccactctgctgttgggagcttgtcatgaatttcctcatttcgctaaatgtatttttgtttcaagacttctgtctgatttttaaaaattatttcaatctgttgttaactttctgaattgatttcctggtgttatcttggggatcaccgagtttccttagggctgccattttgatttcttgatgagagctcacaaatcgccactttgttgggccagtcactggttcttggctttgtccgtttggggaggccatggtcccgtctgctgctttctggtttgttgatgtgtgtctgtgtcttggcactgaacggttatttatttatctcttctctgtctgggtgttttggtttttctggggtatgtttgcttaaagattctttgtgatttacctgtggagtgttttcttgctaggttgcagcctcctttttggcactagatggcgccttaagcccaggttcaactcagctctggtcactgatgaaagtgctgcctgtcccaaagcagatgtcccaaaggggatgtcctgataacgtgggaaggctgggaggggacctgggagcacaggtcctgcagcgtggggctgcgagtggccactctgattgagtgcctcctttggccgagttgcagagcagagtttccagggctggggacagtagccccacccccacctttgtctctggccatcctcagggctgtttctcccttcaggcactcaggatgctccccatgggttgaggcagggagaggtctcctgccagggcacccaagagcagggcaagctgttgttatctcacctttctaagtgtagaaactgtgtcaagggaaaatcttttgtgtactggatgccaggcaggttatggggaggggccttgcagatgtgggggtctggttctcctgctgtctgtctgttcggggtttttctgttcctggtggccccaggacctgactcatcctcacctctgggttctcagatgttgctggtgaccatctcagcatctcagcactgcatgtttgctttcaggtttctgctggggtggtgagacagcttgctcctgtcctgccgtttggaaccagaaaccccatttcaattgctgttttctcattgtcctttaatagaactcagaagacagcagatggttttaggtgtgtatgacaagtgtggtcttaggcaaatgtaaagtaagctttcagccataacttcaacattgtgcttagcaagtgaatgtccactcatagttttaggacttgtttacatgagtcctggattttataaagccccgagtgatgtgtcatcttttgactctgaccttaacttctattgtgttgttttctattaaggaaaacagtgggatgctagagtgccccatcagggccaagagtgaggaccacatctgcatcgtggtattggatgatgtggtgtgaggcagggggtgctcccagtgggcagcacggctgtggaggacctcagttttcttatttgtaaaatgaagggtcctgagtgaaatacatgctgctgttctcttcaacttctgataaaaatcttgattattctaaatactaacagggtgtgatctgttggcctgctgttaggagacccggaataggagcgagtgtctggcctattggcccagggtggcctgaatgtaactgggtggcctggtgcaggccctggtgcggcgaaagcagctgccatgttccagaaacagagtaacaggcagagagagccaggcagctgcagctcagaaaggttaatgtctccattcgaaaaatctatctctgctctcacctgaaacatttagattgaagggattgaaagctatatttggtaattctaagagagagttttctttgcagggaagggctaagagctttgaggctcaggtgtgattcgtttttgtcaatcaatattgtactcaggattaccaataccagcctaccccaattacgcctctctgaaatgtgtggggcccagagccttctattcctagctgcacgatgcttctgctgcctgacctcaccttcagggggcaataagaagtttaatccagccacgaatcggctgcagcacgggaggggcctgacccacctcagggtccaggcatcatcacaggagggtgaagcagccattctaatgcacttctggaaaatgcctatcgaagctgatccttgggtcctgctgtgtgcttgtgtaagtttgctccagagtagctggccagggaggggagtggtcaggaggggagcggacaggaggggagcggtcaggagggtagctggcagggaggggagcagtcaagaggggagcagacaggaggggagtggacaggaggggagcagtcaggaggggagcggacaggaggggagcggacaggaggggagcagtcaggaggggagcagtcaggaggggagcggacaggaggggagcggtcaggaggggagcagtcaggaggggagcggacaggaggggagcggacaggaggggagcggtcaggaggggagcggacaggaggggagcggacaggaggggagcggacaggaggggagcggtcaggaggggagcggacaggaggggagcggtcaggaggggagcggacaggaggggagcggacaggaggggagcggtcaggaggggagcggacaggaggggagcggtcaggaggggagcggacaggaggggagcggacaggaggggagcggacaggaggcgagcagacaggaggggagctgggctgggagtgggtggtcagaaaggtgcactttcttctcagtacttcctgttctgctacctttgtagtaaccagctcttctgatggccagagttcaagcccccctgaatgaaaatgatatctgtcactcagaaggctcctcccgtggggccgtgactggctgtggactggcccggctgcctgcatgccagggcaggtgttcacatggagttgttgagttgcactctcttgcccttgagaaggatgaggcgttaataaggtcattccttctgccatttcactcgtaggtaaccatgtttcgtgtagtaagaaacgcggggctaaagtgcccgtaatgttttagcattctttaaaaggccacttactttcacaaatgggagttttgagtgactgtgtcggctgctgtgtgagcaacgaaggaaagcaggtacagtgtacgagtcgccccagacagctgcaggcctgcagggagccctgggcttagactgtgcccaacaattaggaacccaaaagggactcagggatggggcccaactgagggtggctcatggggtgcagtaggagggagctggggaatagtgtgcagtggccaatggtgccagcgggtgagtccccctcctggaccctccttctgaaggggcagaacccctgggggtgggtggaggtggtagcacgagttcctcctgcacctcacccgtgccctcgaggtggcgagagatgccgtcggtgaggtccttctgcctcccgcataacagtttgatgctgacacatcaacacagcattccccaaagcagcttttcatttcgtaatgggataactgtgggctctggaagaggctcaggtgtgccgttgttctctgcagggatttccaggcagttgacggaactggcacctgaatgggccacaggtgtgccgggtgggatttggaaacgctgggggagagaatgagctttggtaaacagcagacaaattgatttgtattccaacatttttttcccttttggaaaatcagggttttttctgcctttggcattttgttgatagcctagaatccagctacttgctccttctgggtctgtttcctcatctgaactgtgaggctgggtgaggtgaggcgaggcactggcctggccggtgatgagcgactgatccactgggcgtggatccagtggccggcaggaggcaggggctctcctgtccctagggcaccttaggcagcagctctggcaccttccttcctgcacagcctggctcacaggcagccctgagatccaatggggtgatggggacaaatgtgttatgggactctaagtcactatttgtctccagctccctcacccccaggagtttcaaaatcattgaagacaaaattgacaggcagattctgggtgcagacggcagtcagacaccagaagcaggcccgcagtcagcatcttctgagcagcctctccatccttctgaggtttcattccaacctccctgcacttcctgggtgaagcaggtaccctgtacatgtttcctgggaacacggcaaccagccagtcctgcccctgcttgggaaagagccgcctgtttcagtggagtttgttcctgccagagggagcggagatggaagtgccggctgatgttgagcatctctcctcgggcagcaactcttagggcctcagggtcaatgctcaatggagcctccatctgtggggcttttgagtaacaatcaggtgaacatgccagggccttctttttacccatgtcttggtacagatcccatacatcttggtgcagccattctgtttgaggatgttttaggggagacacaggatgctgcaatccactttactgagcaccttttgccggaaggaatccgtgctgtatcctgtgacctagtctgcaaaggggaacacgtgagcgctagtaacgcccttgttcttggacatcaggaagggggtgggcctcatgtggcccggggggccctcagggaccacccagggagcacagtgacgtgggccatcctcagcactgccctcaggggccacccaggggtgcagtgatgtgggccaccctcagcactgccctcagggaccacccaggggtgcagtgacgtgggccaccctcagcactgccctcagggaccacccagggagcacagtgacgtgggccatcctcagcactgccctcaggggccacccaggggtgcagtgacgtgggccaccctcagcactgccctcagggaccacccaggggtgcagtgacgtgggccaccctcagcactgccctcagggaccacccaggggtgcagtgacgtgggccaccctcagcactgccctcagggaccacccaggggtgcagtgacgtgggccaccctcagcactgccctcagggaccacccaggggtgcagtgacgtgggccaccctcagcactgccctcagggaccacccaggggtgcagtgacgtgggccaccctcagcactgccctcagggaccacccaggggtgcagtgacgtgggccaccctcagcagtgccctcagggaccacccaggggtgcagtgatgtgggccaccctcagcactgccctcagggaccacccaggggtgcagtgacgtgggccaccctcagcactgccctcagggaccacccagggagcacagtgacgtgggccatcctcagcactgccctcaggggccacccaggggtgcagtgacgtgggccaccctcagcactgccctcagggaccacccaggggtgcagtgacgtgggccaccctcagcactgccctcagggaccacccaggggtgcagtgacgtgggccaccctcagcactgccctcagggaccacccaggggtgcagtgacgtgggccaccctcagcactgccctcagggaccacccaggggtgcagtgacgtgggccaccctcagcactgccctcagggaccacccaggggtgcagtgacgtgggccaccctcagcagtgccctcagggaccacccaggggtgcagtgacgtgggccaccctcagcactgcctcctcctgagggagggtaatgatggaatctgtccaggaggctccaggatggggatggaatgagtgagtggggattagcatcccagaactgttcaccttgttggggcaggagacacagtgacggtctctttgagaagtcctgtgctgtggtggttaggattcgggcctgtggccatcaccatacctcacaactgagcatgaaaactctgtgagggagggaaggacctcaggtgttgggggcctggcccagctcagcactcaggactgcaagtgacagaagccaacacagactcacgtggggcatactggactgtgaatggggaccccagggtggctctggggctgtgaatggggaccccagggtggctctggggctgtgaatggggaccccagggtggctctggggctgtgaatggggaccccagggtggctctggggctgtgaatggggaccccagggtggctctggggctgtgaatggggaccccagggtggctctggggctgtgaatggggaccccagggtggctctggggctgtgaatggggaacccagggtggctctggggctgtgaatggcgaacccagggtggctctggcacagtggccgggatctgcagcatctccccgctgcttttgtctccagtttctctctctttgtgtggtgttgggatggctgcttgtccacctgttcactcctgttcacagggcttagcaaccaatctgcatgaaaagagagaatcttccaccagagaaaagcatgtaggagggggccgtggtttggaatgggtcagggcctgcacctgaccagtgactgggcagggaatgagatgttcttgtggctcctgggccgcaagggagcaagtttagggattgacagccatcctaggataccacaacagcagagggggcacccccaggaatgcaaggcccttgacaagcaaatgccacaacctccatggttcactcaagaaggtgagtgctgccactaaaaaaatgtgtgactgcaatagataggaattaatttaacccagacggtgagacctgtacactgaaaactatgagatggtgaaagaaatggaagacaaggcaaataaatagaaggtatcccatgttcattgattgaaagaattaatattgttaaaatgtccgtactacctagagcaatctatagtttcagtgcaacccctatcaaaattccaatggcattttttttacagaaatagaaaagcaatcctaaaattcatatggaaccacataaaaccctgaatagccaaggcaatcaggagccaaaggaacaaagctggatgcatcacaccacctgatttcaaaatatactatgaaactataataaccaaaacaacgtggtactggcaacaacaaaacaaaatagacacatcaactaatggaacagaatagagagccaggaaatgaatccatgcatttatgctcaattcattttcagcaaaagtggcaagaacacataatgggaaaaggacagtgtcttcaataaatggtgccagaaaaactggatatccacatgcagaagaatgaaattagaacttatctctcaccacatacaaaaactcaaaagggattaaagacttaaatttaagacctgaaactgtaaaactactagaagaaatcacagggcaaaatgacataacattatcctgggcaacaattttttttatttgatccccaaagcacaggcaacaaaatcaaaaataaacaaatgggattatatcaaatacaaagctctacacagcaaacaaaacagttagcagagtgcacagacaacctaaggatggggagaaaatatttgcaagctgtacatccaataagggcttaatatccaaaatatataataagctcaaacaactcaatagcatgaaaatgaaaaacccaattaaaagacaggtaaagaatctgagtagatatttctcaaaagaagacataaaaatggccaacatgtatgtgaaaagatgctcaactgtgctaatcattagggaaatgcaaatcaaaaccacaatgggatatcatatcacacctgttagaatggctattattaaaaagacagcaagtgttggtgaggaagtggtgaaaagggaaatcttgtgcactattgggaatctaaatcggtacagtcattatggagaactgtatggaggcctctcaaacaacaaactaccatatcatctagcaatcccactatgaggtatttatccaaaggaagtaaaatcagcatgttgaagagagatctgcaccctcatgtttactgcagcactgtccacaatggccatgacatagaatcaacctaaatgtccatcgacagatggatggataaagacacagtgggatactattcagtcttaaaaaggaaggaattctgtgatttccagcatcatggatggaattggaaagcattacgctgagtgaaataagccaggcacagaaagacaaataccgcatgatcttactcatatgtggaactgaaaacaattgaactcacagtagcagagagtagaactgaggtcgccagaggccaggggtggagggaatggggagataacaggtggagggcacaaatctcaggggcaattttttgagttcgattgtacagtgtgatgaagataacagtagacggttatacatctcaaaactgctgagagaacaaattccaaatgtttttgccacaaaaatgttaagtatttgaagtgatggatatgttaactagcttgatttaattattccacattgtattcataaatcatagcattgccttgtacccattgatatggtttggctctgtgtccccacccacatctcaccttgagttgtaatccccagcgttggggagggacctggtgggaggtgactggatcatgcgggtggtttccaccacgctgttctcgtgatagtgagggagttctcatgagagctgatggtttaaaagtgtagcactccccccacccccactccttctgccgcctcaggaagaaggtgcttgcttctccttcgccttttgccatgactagtttcttgaggcctccccagccctgtggaactgtgagtcaattaaatctcttttcttcaaaaattacttagtcttgggtagttctttatagctgtgtgaaaatggacacccatatatatatacaattgtaaattataaaatgtgtgtgaccaagtcattttgcttcctcagcctcagtttccccacctgggatgagtggacggcattggaaagctctgggtgaccactgctgccacaccagctttggccccagcttgtagcttcaggaggtttttccacgggggtggaagaccctgtctccttctacctggggcttccaaaaccggtggcctttgtctttgttctttctcttgctccaccctgctcaaaaatacaagtcctcctgagcctccgaagcttactcttcataaaaccctctgtggcctcctataagaacacgctgtctccagacaaagctctggttaccagagtagcccacaaaaaacccaaattaagacaaaacccaaagtaagacaaaaaacctgtcttcccgttggccaggagacaggcagttaggttttctctccttgttaacgtctagtcactcagatgacttctttagtttcaaggctctgctgggaggggtgtttatgccatcatagttgagcagacataggcctagaccatcagtcacgtggactgtgggggtcctgccaggactgctcccaggcagcagggtccaccctcagagatggagcactggggcccaacattttatcctccagaatttctcccgcccactgcggtcccaggtgtccgcaccatactttccctccatggcctaactgaggccttgggtccaagctgtcttctgcctaaagctctgttttgggtatcgtccatcagcttctgggttctcacctcacagggctgacaggacatgtgcaaaccaacagggaagcagtgatttccagggaaacagatgcacaagctggtgcctgatttctcatcagaggagtgccagggtcccctgggcccctctcctaaacccaccgatgaaaggtgctggggtctgttcctgcacattgcaaatcgtgcaccgtcagagcgtcatttctgtcaggactgagcttggggagagcgaccacctccagcaacacagcctcacttgttctttcttggtgggttacgtgtgggacctctttgatttttacatctcactcattcttgggctagaaaagtctggttttccacgttttatgcgattccagattcctgtgtggcatttcagcccagactccagggtgtcttgtattaaatgccggcgagtataattagcattcaagacctgggtgcaaggcgttgcaagtgttaatttaacaggaaattatgtgtcttcagtttggtcgaggagctgcctcttctggaggcctaaacttgaaacagcctcccttgcctgcgactggggccaatgctccccactggacggagctcctgatgatggctcagccccatcccatattgcttctagttactaaactgccttgttcctgctgaagacagctcttcccgagcctggtctggctggtggcttcttggggcctgtgtggggttgctggagcttcccccgtctgtgctgtcctgggtatctcttgggtgaggccctgcgctttgctgctcgttgtcacggcttctaagggcccaggtgctggctcctcggcagggggacattttgtgtttttggaaggtgctggggtctgacactctcgtatgggggtctgggtggcatgtaagaggggctgtctttccctgaatgtgagtttctgggtcttatcttggggtgtggcagtgtgaagtgtatgttcattggtgtgttcactggtcttctttgggagctgaatttaaactcatcctggtgcctggaaatgcagtctagaccctccatggaagcctttacctgagctcgattgtagctgtgattccactgggagcagccgcgacagcccacgtgccacgagcatggctgcctgagcctctgcgcgagccctgcttgcaggtgttgggtgtaaaatcagaaagggggctgattccaccgggagcagccgcgacagcccacgtgccacgagcatggctgcctgagcctctgcgcgagctctgcttgcaggtgttgggtgtaaaatcagaaatggggctgattccaccgggagcagtcgcgacagcccatgtgccaccagcatggctgcctgagcctctgcgcgagccctgcttgcaggtattgggtgtaaaatcaaatggggctgtcggatcatctgctacttccacattgaacttttcccgtgtgctttccacggcgactgcatcaggttacgttcctgcccgcggagcacagggccctattttctccatgttctcacccacacgcgttattttcggttttgcttcgtttcgttttttgatagcagatgtcctgctgagcgggcagtaggtctcactgtggttttgatttgcgttgccttgacgctggtgatgctgggcgccttccctgtgctttcagctgtttgtacatcttctctggagaaaagtctactcaggtcctttacccgtttttaatcaggttttttgttgttgttgtcgagttgtggttctttatgtattttggatacaaatcccttatcagatagatgagggcaaatatttccccactccctggctgccttttcctgctgctaatagtgtcctttgatgcacagaagttttaattttgatggttacattctttctttttgagatgaagtttcactcttgttgcccaggctggagtgcaatggcgcaatctcagctcactgcaacgcagagctggtcatcggcatgtgctggctgaaaagaacccagcacttgtccaccctgccgttctccttcgcttttgaagcccctaaggacttaatatttcctggatcttggctcaagtgagcacgatgatgaggtttcctgagctcccggtggtctggaatggttgatcctgtttccgtacctccctcatgggtgctaagtgtcagtcagactttcctgccgctgcccattcctctatgggctccagcaaggcacccaacctctctgggctctagtttctgaatatggaatggggaccatgacagtttatgccactaagggttatcataaggactgactgagttgactgtgtgagtgatgtctgtagatgtcagctcttatggtgagagtgtgggtgtgagcgacgtctgcaggtgtcagctcttatggtgagagtgtgggtgtgagtgacgtctgcaggtgtcagctcttatggtgagagtgtgggtttgagtgacgtctgcaggtgtcagctcttatggtgagagtgtgggtgtgagtgacgtctgcaggtgtcagctcttatggtgagagtgtgggtgtgagtgacgtctgcagatgtcagctcttatggtgagagtgtgggtgtgagtgacgtctgcaggtgtcagctcttatggtgagagtgtgggtgtgagtgacgtctgcgggtgtcagctctatggtgagagtgtgggtgtgagtgacgtctgcgggcgtcagctcttatggtgagagtgtgagtgtgagtgacgtgtgtgggtgtgagtgacgtctgtgggcgtcggctcttatggtgagagtgtgggtgtgagtgacctctgcgggcgacagctcttatggtgagagtgtgggtgtgagtgacgtctgcaggtgacaccccttctggtgagagtgtggatgtgagtaacgtctgcgggtgtcagctcttatggtgagagtgtgggtgtgagtgacgtctgcaggtgtcacctcttatggtgagagtgtgggtgtgagtgacgtctgcgggcgacagctcttatggtgagaatgtgggtgtgagtgacgtctgcaggtgtcagctcatatggtgagtgtgggtgtgagtgacgcctgcggggcacactcttatggtgagagtgtgggtgtgagtgacgtctgctggtgtcacctcttacggtgagagtgtgggtgtgagtgacgtctgcaggtgtcagctcttatggtgagagtgtcggtgtgagtgacgtctgcgggcgtcagctctatggtgagagtgtgggtgtgagtgacctctgcgggcgacagctcttatggtgagagtgtgggtgtgagtgacgtctgcatgtgttacctcttatggtgagagtgtgggtgtgagtgatgtctgcgggtgtcacctcttatggtgagagtgtgggtgtgagtgacgtctgcagatgtcacctcttatggtgagagtgtgggtgtgagtgacgtctgcacgtgtcaccaattatggtgagagtgtgggtgtgaatgacgtctgaaggtgttacctcttatggtgagagtgtgggtgtgagtgacctctgcgggcgacagctcttatggtgagagtgtgggtgtgagtgacgtctgcatgtgttacctcttatggtgagagtgtgggtgtgagtgacgtgtgtgggtgtgagtgacgtctatgggcgtcggctcttatggtgagagtgtgggtgtgaatgacgtctgcaggtgtcaccaattatggtgagagtgtgggtgtgaatgacgtctgcaggtgttacctcttatggtgagagtgtgggtgtgagtgacgtctgcgggcgtcagctcttatggtgagactgtgggtgtgagtgacgtgtgggtgtgagtgacgtctgcaggtgtcaccaattatggtgagagtgtgggtgtgaatgacgtctgcaggtgtcacctcatggtgagtgtgggtgtgagtgacgtctgcaggtttcacctcttatggtgagagtgtgggtgtgagtgacatctgcgggcgtcagctcttatggtgagagtgtgagtgtgattgacgtgtgtgggtgtgactgacttcgggtgtcagctcttatggtgagagtgtgggtgtgagtgacgtctgcatgtgtcagctcttatggtgagagtgtgggtgtgagtgacatgtgtgggtgtgagtgacgtctgcaggtgtcaccaattatggtgagagtgtgggtgtgtgtgacgtctgcatgtgtcacctcttatggtgagtgtgggtgtgagtgacgtctgcaggtttcacctcttatggtgagagtgtgggtgtgagtgacgtctgcgggcgtcagctcttatggctagagtgtgagtgtgagtgacgtgtgtgggtgtgagtgatgtctgcgggcgtcggctcttatggtgagattgtgggtgtgagtgacctctgcgggcgacagctcttatggtgagaatgtgggtgtgagtgacgtctgcaggtgtcacctattatggtgagagtgtggatgtgagtgacgtctgcgggtgtcagctcttacggtgagagtgtgtgtgtgagtgacgtctgcgggtgtcagctcttatggtgagagtatgggtgtgagtgacctctgtgggcctcagctcttatggtgacagtgtgggtgtgagtgatgtctgtgggtgtcagctcctatggtgagaatgtgggtgtgagtgatgtctgtaggtgtcacctcttatagtgagagtgtgggtgtgagtgacgtgtgccggcatcagctcttatggtgagagtgtgggtgtgagtgacgtctgcgagtgtcaggtcttatggtgagagtgtgggtgtgagtgacgtctccaggtgtcacctcttatggtgcgagtgtgggtgtgagtgacgtctgcaggtgtcacctcttatggtgacagtgtgggtgtgagtgacgtctgcatatgtcacctcttatagtgagagtgtgggtgtgagtgacttctgcgggcgacagctcttatggggagagtgtgggtgtgagtcacgtctgcgggcgacagctcttatggtgagagtgtgggtgtgagtgacgtctgcaggtgtcacctcttatggtgagactgtgggtgtgagtgatgtctgcaggtgtcacttcttatggtgagagtgtgggtgtgagtgacatttgcaggtgtcacttcttatggtgagagtgtgggtgtgagtgacgtctgcaggtgtcagctcttatggtgagagtgtgggtgtgagtgacgtctgcaggtgtcacctcttatggtgagactgtgggtgtgagtgatgtctgcaggtgtcacttcttatggtgagagtgtgggtgtgagtgacgtttgcaggtgtcacttcttatggtgagagtgtgggcgtgagtgacgtttgcatgtgtcacctcttatggtgagaagtgtgtacgtgagtgacgtctgcaggcatcagcttttatggtgagagtatgggtgtgagtgtcctctgtgggcctcagctcttatcgtgagagtgtgggtgtaagtgacatctgcaggtgtcaactcttatggtgagagtgtgggtgtgagtgacgtctgcaggcatcagctcttatggtgacagcgtgggtgtgagtgacatctgcatgtgtcacctcttatggttgagagtgtgggtgtgagtgacgtatgcaggtgtcagctcttatggtgagagtatgggtgtgagtgacatctgcaggtgtcacctcttatggtgcgagtgtgggtgtgagtgacgtctgcaggtgtcacctcttatggtgacagtgtgggtgtgagtgacgtctgcatatgtcacctcttatagtgagagtgtgggtgtgagtgacttctgcgggcgacagctcttatggggagagtgtgggtgtgagtcacgtctgcgggcgacagctcttatggtgagagtgtgggtgtgagtgacgtctgcaggtgtcacctcttatggtgagactgtgggtgtgagtgatgtctgcaggtgtcagttcttatggtgagagtgtgggtgtgagtgacatttgcaggtgtcacttcttatggtgagagtgtgggtgtgagtgacgtctgcaggtgtcagctcttatggtgagagtgtgggtgtgagtgacgtctgcaggtgtcacctcttatggtgagactgtgggtgtgagtgatgtctgcaggtgtcacttcttatggtgagagtgtgggtgtgagtgacgtttgcaggtgtcacttcttatggtgagaatgtgggtgtgagtgacgtttgcatgtgtcacctcttatggtgagaactgtgtacgtgagtgacgtctgcaggcatcagcttttatggtgagagtatgggtgtgagtgtcctctgtgggcctcagctcttatggtgagagtgtgggtgtgagtgacgtctgcaggtgtcacctcttatggtgagagtgtgggtgtgagtgacgtctgcaggcatcagctcttatggtgacagtgtgggtgtgagtgacatctgcatgtgtcacctcttatggtcagagtgtgggtgtgagtgtcctctgtgggcctcagctcttatggtgagagtgtgggtgtgagtgacgtctgcaggtgtcacctcttatggtgagagtgtggatgtgagtgacgtctgcgggtgtcagctcttatggtgacagtgtgggtgtgagtgacgtcagcaggtgtcagcgcttatggtgagagtgtgggtgtgagtgacgcctccggacgacagctattatggtgagagtgtgggtgtgagtgacgtctgcaggtgtcacctcttatggtgagagtgtgggtgtgagtaacgtctgcgggcgtcagctctatggtgagagtgtgggtgtgagtgatgtctgcgggcatcacctcttatggtgagagtgtgggtgtgacgtctgcaggtgtcacctcttatggtgagagtgtgggtgtgagtgacgtctgcaggtgtcaccaattatggtgagagtgtgggtgtgagtgacgtctgcgggcgtcagctcttatggtgagagtgtgggtgtgagtgacctctgcgggcgagactcattatggtgagagtgtgggtgtgagtgacgtctgcaggtgtcacactcttatggtgagagtgtgagtgtgagtgacgtgtgtgggtgtgagtgacgtctatgggcgtcacctcttatggtgagagtgtgggtgtgagtgacgtttgcaggtgtcacctcttatggtgagagtgtggttgtgagtgacgtctgcgggcgtcagctcttatggtgagagtgtgggtgtgagtgacgtctgcaggtgtcaccaattatggtgagagtgtgggtgtgaatgacgtctgcaggtgtctcctcttatggtgagagtgtgggtgtgagtgacgtctgcaggtgtcaccaattatggtgagagtgtgggtgtgaatgacgtctgcaggtgtcacctcttatggtgagagtgtgggtgcgagtgacgtctgcaggtgtcacctcttatggtgagagtgtgggtttgagtgacgtctgtgggtgtcacctcttatggtgagagtgtgggtgtgagggacgtctgcaggtgttacctcttatggtgagagtgtgggtgtgagggacgtctgcaggtgtcacctcttagggtgacagtgtgggtgtgaatgatgtctgtgcgtgacagctcttatggtgagagtgtgagtttgagtgacgtctgcaggtgtcagctcttatggtgagaatgtgggtgttagtgacgtctgcaagtgtcacctcttatggtgagagtgtcggtgtgagtgacgtctgcaggtgtcacctcttatggtgagagtatggctgtaagtgacctctgtgggcctcagctcttatggtgagagtgtgggtgtgagtgacgtctgcgggtgtcagctcttatggtgacagtgtgggtgtgagtgatgtctgtgggtgacagctcttatggtgagagtgtgggtgtgagtgacgtctgcgggcatcagctcttatggtgagagtgtgagtgtgagtgacgagtgtgggtgtgagtgacgtctgcgggcgtcggatcttatggtgagagtgtgggtgtgagtgacctgtgcgggcgacagctcttatggtgagagtgtgggtgagtgacgtctgcaggtgtcacttcttatggtgagagtgtggatgtgagtgacgtctgcaggtgtcacctcttatggtgagactgtgggtgtgagtgacgtctgcgggcgtcagctcttttggtgagagtgtgggtgtgagtgacgtctgcgggcgtcagctcttatggtgagagtgtgggtgtgagtgacgtgtgggtgtgagtgacgtctgcatgtgtcaccaattatggtgagagtgtgggtgtgaatgacgtctgcaggtgtcaactcttatggtgagtgtgggtgtgagtgacgtcggcaggtttcacctcttatggtgagagtgtgggtgtgagtgacatctgcgggcgtcagctcttatggtgagagtgtgggtgtgagtgacatgtgtgggtgtgagtgacgtctgcaggtgtcaccaattattgtgagagtgtgggtgtgagtgacgtctgcatgtgtcagctcttatggtgagagtgtgggtgtgagtgacgtctgcaggtgtcacctcttatggtgagagtgtgggtgtgagtgacgtctgcgggcgtcagctcttatggctagagtgtgagtgcgagtgacgtgtgtgggtgtgagtgatgtctgcgggcgtcggctcttatggtgagattgtgggtgtgagtgacctctgcgggcgacagctcttatggtgagaatgtgggtgtgagtgacgtctgcacgtgtcacctcttatggtgagactgtgggtgtgagtgatgtctgcagttgtcacttcttatggtgagagtgtgggtgtgagtgacatttgcaggtgtcacttcttatggtgagagtgtgggtgtgagtgacgtctgcaggtgtcacctcttatggtgagactgtgggtgtgagtgatgtctgcaggtgtcacttcttatggtgatagtgtgggtgtgagtgacatttgcaggtgtcacttatggtgagagtgtgggtgtgagtgacgtctgcaggtgtcagctcttatggtgagagtgtgggtgtgagtgacgtctgcaggtgtcacctcttatggtgagactgtgggtgtgagtgatgtctgcaggtttcacttcttatggtgagagtgtgggtgtgagtgacgtttgcaggtgtcacttcttatggtgagagtgtgggtgtgagtgacgtttgcatgtgtcacctcttatggtgagaagtgtgtacgtgagtgacgtctgcaggcatcagcttttatggtgagagtatgggtgtgagtgtcctctgtgggcctcagctcttatggtgagagtgtgggtgtgagtgacatctgcaggtgtcaactcttatggtgagagtgtgggtgtgagtgacgtctgcaggcatcagctcttatggtgacagcgtgggtgtgagtgacatctgcatgtgtcacctcttatggttgagagtgtgggtgtgagtgacgtctgcaggtgtcagctcttatggtgagagtatgggtgtgagtgatatctgcaggtgtcacctcttatggtgagagtatgggtgtgagtgtcctctgtgggcctcagctcttatggtgacagtgtgggtgtgagtgacgtctgcaggtgtcacctcttatggtgagagtgtgggtgtgagtgacgtctgcaggcatcagctcttatggtgacagtgtgggtgtgagtgacatctgcatgtgtcacctcttatggtcagagtgtgggtgtgagtgtcctctgtgggcctcagctcttatggtgagagtgtgggtgtgagtgacgtctgcaggtgtcacctcttatggtgagagtgtggatgtgagtgacgtctgcgggtgtcagctcttatggtgacagtgtgggtgtgagtgacgtcagcaggtgtcagcgcttatggtgagagtgtgggtgtgagtgacgcctccggacgacagcgcttatggtgagagtgtgggtgtgagtgacgcctccggacgacagctattatggtgagagtgtgggtgtgagtgacgtctgcaggtgtcacctcttatggtgagagtgtgggtgtgagtaacgtctgcgggcgtcagctctatggtgagagtgtgggtgtgagtgatgtctgcgggcgtcacctcttatggtgagagtgtgggtgtgacgtctgcaggtgtcacctcttatggtgagagtgtgggtgtgagtgacgtctgcaggtgtcaccaattatggtgagagtgtgggtgtgagtgacgtctgcgggcgtcggctcttatggtgagagtgtgggtgtgagtgacctctgtgggcgagagctcttatggtgagagtgtgggtgtgagtgacgtctgcaggtgtcacctcttatggtgagagtgtgggtgtgagtgacgtgtgtgggtgtgagtgacgtctatgggcgtcacctcttatggtgagagtgtgggtgtgagtgacgtctgcaggtttcacctcttatggtgagagtgtgggtgtgagtgacatctgcgggcgtcagctcttatggtgagagtgtgggtgtgagtgacgtgtgggtgtgagtgacgtctgcaggtgtcagctcttatggtgagagtgtgggtgtgagtgacgtctgcatgtgtcagctcttatggtgagagtgtgggtgtgagtgacatgtgtgggtgtgagttccgtctgcaggtgtcaccaattatggtgagagtgtgggtgtgtgtgacgtctgcatgtgtcacctcttatggtgagagtgtgggtgtgagtgacgtctgcaggtgtcacctcttatggtgagagtgtgggtgtgagtgacgtctgcgggcgtcagctcttatggctagagtgtgagtgtgagtgacgcgtgtgtgtgtgagtgatgtctgcgggtgtcggctcttatggtgagattgtgggtgtgagtgacctctgcgggcgacagctcttatggtgagagtgtgggtgtgagtgacgtctgcgggtgtcagctcttatggtgagagtgtgggtgtgagtgacgtctgcgggtgtcagctctatggtgagagtgtgggtgtgagtgacctctgtgggcctcagctcttatggtgagagtgtgtgtgtgagtgatgtctgcgggtgtcagctcttatggtgagagtatgtgtgtgagtgacctctgtgggcctcagctcttatggtgacagtgtgggtgtgagtgatgtctgtgggtgtcagctcttatggtgagaatgtgggtgtgagtgatgtctgtaggtgtcacctcttatagtgagagtgtgggtgtgtgtgacgtgtgccggcatcagctcttatggtgagagtgtgggtgtgagtgacgtctgcgagtgtcaggtcttatggtgagagtgtgggtgtgagtgacgtctccaggtgtcacctcttatggagagagtgtgggtgtgagagacgtctgcaggtgtcacctcttatggtgacagtgtgggtgtgagtgacgtctgcaggtgtcacctcttatggtgcgagtgtgggtgtgagtgacgtctgcaggtgtcacctcttatggtgacagtgtgggtgtgagtgacgtctgcagatgtcacctcttatggtgagagtgtgggtgtgagtgactcctgcgggcgacagctcttttggggagagtgtgggtgtgagtcacgtctgcgggcgacagctcttatggtgagagtgtgggtttgagtgacgtctgcaggtgtcacctcttatggtgagactgtgggtgtgagtgatgtctgcaggtgtcacttcttatggtgagagcgtgggtgtgagtgacatttgcaggtgtcacttcttatggtgagagtgtgggtgtgagtgacgtctgcaggtttcagctcttatggtgagagtgtgggtgtgagtgacgtctgcaggtgtcacctcttatggtgagactgtgggtgtgagtgatgtctgcaggtgtcacttcttatggtgagagtgtgggtgtgagtgacgtttgcaggtgtcacttcttatggtgagagtgtgggtgtgagtgacgtttgcatgtgtcacctcttatggtgagaagtgtgtacgtgagtgacgtctgcaggcatcagctcttatggtgagagtatgggtgtgagtgtcctctgtgggcctcagctcttatggtgagagtgtgggtgtaagtgacatctgcaggtgtcaactcttatggttagagtgtgggtgtgagtgatgtctgcaggcatcagctcttatggtgacagtgtgggtgtgagtgacatctgcaggtgtcacttcttatggtgagagtgtgggtgtgagtgacgtctgcaggtgtcacctcttatggtgagagtatggatgtgagtgacctctttgtgcctcagctcttatggtgagagtgtgggtgtgagtgccgtctgtagatgtcacctcttatggtgagagtgtgggtgtgagtgacgtctgcaggtgtcagctcttatgttgagagtatgggtgtgagtgacatctgcaggtgtcacctcttatggtgagagtgtgggtgtgagtgtcctctgtgggcctcagctcttatggtgagagtgtgggtgtgagtgacgtctgcagatgtcacctcttatcgtgagagtgtgggtgtcagtgacgtctgcgggtgtcagctcttatggacagagtgtggatgtgagtgatgtctgcaggtgtcacatcttatggtgagagtgtggatgtgagtgacatctgcaggtgtcggctcttatggtgggagtatgggtgtgagtgacctctgtgggcctcagctcttatggtgagagtgtgggtgtgagtgtcgtctgcagatgtcacctcttatcgttagagtgtgggtgtcagtgacgtttgcggttgtcagctcttatggagagagtgtggatgtgagtgacgtcttcagttgtcagctcttatcgtgggagtgtgagtgtgagtgacatctgcgggcgtcagctcttatggtgagagtgtgggtgtgagtgacgtctgcgggtgtcagctcttatggtgagaatctggttgttagtgtcgtctgcgggtgtcacctcttagggtgacagtgtgggtgtgagtgatgtctgtgcgtgacagctcttatggtgagagtgtgagtttgagtgacgtctgcaggtgtcagctcttatggtgagaatgtgggtgttagtgacgtctgcaagtgtcacctcttatggtgagagtgtcggcgtgagtgacgtctgcaggtgtcacctcttatggtgagagtatggctgtaagtgacctctgtggtcctcagctcttatggtgagagtgtgggtgtgagtgacgtctgcgggtgtcagctcttatggtgacagtgtgggtgtgagtgatgtctgtgggtgacagctcgtatggtgagagtgtgggtgtgagtgacgtctgcgggtgtcagctcttatggtgagagtatgggtgtgagtgacctctgtgggcctcagctcttatggtgagagtgtgggtgtgagtgacttctgcgggtgtcagctcttatggtgagagtatgggtgtgagtgacctctgtgggcctcagctcttatggtgagagtgtgggtgtgagtgacgtctgcgggtgtcagctcttatggtgagagtgtgggtgtgagtgacgtctgcgggcgtcagctcttatggtgagagtgtgggtgtgagtgacgtctgcgtgtgacagctcttctggtgagagtgtgggtgtgagtgacgtctgcgggcgtcagctcttatggtgagagtgtgggtgtgagtgacgtctgcgggcatcagctcttatggtgagagtgtgggtgtgagtgacgtctgcaggtgtcacctcttatggtgagagtgtggatgtgagtgacgtctgcgggtgtcagctcttatggtgagagtgtgggtgtgagtgtcgtctgcgtgtgacagctcttatcgtgagagtgtgggtgtgagtgacgtctgcaggtgtcagctcttatggtgagagtttgggtgtgaatgacgtctgcgggcatcagctcttatggtgagaatgtggatgtgagtgacgtctgcgggtgtcagctcttatggtgagagtgtgggtgtgagtgacgtctgcgggtgtcagctcttatggtgagagtgtgggtgtgagtgacgtctgcacgtgtcggctcttatggtgagagtatggatgtgagtgacctctttgtgcctcagctcttattgtgagagtgtgggtgtgagtgacgtctgcagatgtcacctcttatggtgagagtgtgggtgtgagtgacgtctgcagatgtcacctcttagggtgagagtgtgggtgtgagtgacgtctgcgggtgtcagctcttatggtgagagtgtgggtgtgagtgacgtctgcagatgtcacctcttagggtgagagtgtgggtgtgagtgacgtctgcgggtgtcagctcttatggtgagagtgttggtgtgagtgacgtctgcaggtgtcagctcttatggtgagagtgtgggtgtgagtgacgtctgcagatgtcacctcagggtgagagtgtgggtgtgagtgacgtctgcgggtgtcagctcttatggtgagagtgtgggtgtgagtgacgtctgcgggtgtcagctcttatggtgagagtgtgggtgtgagtgacgtctgcaggtgtcagctcttatggtgagagtgtgggtgtgagtgacgtctgcgggtgtcacctcttagggtgagagtgtgggtgtgagtgacgtctgcgggtgtcagctcttatggtgagagtgtgggtgtgagtgacgtctgcaggtgtcagctcttatggtgagagtgtgggtgtgagtgacgtctgcagatgtcacctcttatggtgagagtgtgggtgtgagtgtcgtctgcgggcgtgagctcttatggtgagagtcgccatacaagacctgaggattttgtgagttggttgcagaataggacactctgccagtcactccatgtagctatggtgaccgcattttctcagtcagacgctggcatctacagtctaaagtgaaagtgagtctccgtagaggacacagcctcgagcggtgaagtgggaccatgtggacagatcttgggttgcgactcccaggccaactctgagcaagttccttaacctccctgtgccttaatttccacatggcgtcaatgggataataatacgcagtgtcttagtccatgaaggctgctcaaagtaccacctattgcggggcttagaaacagcagacattgatttctcagttctgaaggctggaagccaaggtcaccgccctggcagggttgacgtctggtgtctggcgagtcccctcctggctcatcgacggtgcctcctcacgtgtcctcatgtggctggagcgtgagccgtccttggggcctgtgtaaggaaggccccacctcctcgcctctcagccgtccgcctgctaacagcagcacccggggctggtttcggcacacagcctgttgcatggaggaggagcctcatgggcttggggtgggggtttaaggcatccttaaaggtaaaaggctgggaagtgctgggcgcgctggtgctccgtgagggaggcatgactggctgtgttctcggcactgtcttcactgtcctcccctcctagcctgctcctcacctcccagaagggcctcccacccgccacgcttccccctgccccgcctggccggtgtctgctgggctcctcagtactgccggctcacaccctcaagctgtggcttctgtcgtgcgcctccctcggtgcagtgggctgtgcgccgctggatttgccatcccaggcctcactgggatccctgggtggcgggaggaatggaggccccactcatagtgacttgcagatgtcactcacacccacaatctcatcataagacctgatgcttgcagacatcactcacactcacaagggaagctggcctctcctggatttaccgtcccaggcctcactgggatccctgggtggcgagaggaacagaggtcccgcttgtcgctcagggaagctgggatctcctggatttactgtcccaggcctccctgggatccctgggtggcgggggggggggaatggaggccccgctcctagtgacttgcagatgtcactgacacccacactctcaccataagacctgacacctgcagacgtcactcacactcacaagggaagctggcctctcctggatataccatcccaggcctcactgggatctgggtggtgggaggaatgggggccctgctcctcacacaagggaagctggcctctccggacagtgaggctcccgctgtgggtgcaggtgctgcccggacgtggggctcctccccagtcagagcctcacgctgctctgcagatgcataggctgtgctggccgctcccaggcactgtcactctgtcccctgccttctgctgcctgtcagtggctgctctgaactgtaacgaaatccttgaaaataaaggaatttccagcgatatagggtctcggcttatcttcaggtttcattacgaactaagctgctcagacttcacagcagtcctgccttggacgcagcccacggatccaacggctccttaaatctgacctgggtgtgtggtgagccagtgcctgcttccttgggcctcagaagccattgctgtctctcaggattcacctttggcctcctggaatttttgcagcagttatgactggatgccatgacagcagtttctactccctgagaatgggagcacttttacagcttccttgcagaatgggagcacttttacagcttccttgcagaaatgtgcatggcaggtgcttgatcagttcagataaagggctttttctccctctggagaattcctttcaacagggcagtgattctgagctgtaattacttttccctcctccaaaaatagctggggagatttttttcttgttgctgcacccctggggaccctgatggagcagtgggctcctccgtctgtggtgctgctttgagaagccccatgggaccgagggaaccctggcaacgctgccagctccctgcagggaggggacttcagaggcagctccagtgtcccagggcaccgggatttacagattgaaggtactttggcaaggcagcctccaccaggagggggcagtgggagagaggcagggtcctgagggaccccagcaggggaggcaggaaagaatgaaagggtgacctagcctggtacagcaggacacctggagcatggcggtcccaggctggtgagggctccttctgctattctgagtgtgagtagtgagtgtgtacatgagaacatgtacatgtgtgagcatgtgagaacagatagtgtgtacatgtgcatgtgtgtgagaatgttcatgtgtgtgagaacttgtgcatgtgagaatgtatgtgtgagaacgtgtacatgtgtgagcaggtgtgtgcatgtgagaatgtgtgtgagaacgtgtacatgtgtgagcatgtgtgagcatgtgtgtgcatgtgataatgtgtgtgtgacaatgtgtacatgtgtgagcatgtgtgagcacgtgtgtgcatgtgagaatgtgtatgtgtgagaatgtgtacatgtgtgagcatgtgtgagcacgtgtgtgcatgtgagaatgtgtgcatgtatgtggatatgagaatgtttacgtgtgtgtttgagaatgtgtgcatgtgtgagaatgtgagcatgtgtgtgtgcatgtgagaatgtgtgcacgtgtgtggatatgagtgtgtatgtgtgtgcttgtgtgagaatgtgcatgggtgagaatgagtgcatgtgagaatgtgtgcatgtatgtgcagatgagaatgtgtacatgtgcatgtgtgagaatgtgtatatatgtgagaatgcatgtgtgtgcatctgagaatgtgtatgtgcatgtgaatgtgtgcgtgtgtgcatgtgtgaaaatgtgtatgtgtgcatgtgagaacgtgtgagcatgtgcatgtgtgagaatgtgtgcatgtgtgagaacgtgtgcatgcgagaatgagcatgtgtgtgagaatgcatgtgagagcatgtgtgaggatgtgtgcatgtgtgagaatgtgcatgtgtgtgcatgtgagtgtgtgagcatgtgtgaaacgtgcatgtgagaatgtgcatgtgtgtgagaatgtatgcatgtgagagcatgtgtgaggatgtgtgcatgtgtgagactgtgcatgtgtgtgcatgtgagagtgtgagcatgtgtgaaaacgtgtgcatgtgagaatgtgcatgtgtgtgagaacgtgtgcctgtgagagcatgtgtgaggacgtgtatgtgagaatgtgcatgcattatgtggttgtgtgtctgcatatgtgcatgtgtctgcatacattgtgtgtgcatgctgtgaatgtctgtgtatgtggttgcttgtgtattgtgcacacgtgtacaagtgtgcattaattctcctgctgtactgggcagcagtgtctcgtctcctggcccctcacactggccgactgagtctgccactggcatcttcaggcctgagccagagcagggctcctgagcgatgtctcggatgaagaactggcactgcagggaggcagccacgaggggtcactggtgctgcttggtgctcactggccacctgggtgaccgcagcctctgggccttgccttgtttggatgcagggagggagtgagtgacagaccagcttgaagaagcacagcagggtgccattgtttcatgagaggcggctgtgctccctccctggctgccagactcaagacctgcggcgggtatggcctgtggggccctggatgtggtcccattctctctggaaagtgcgccctgagccctgcaacgttgctgtttctaggctctgggttcagtgcctgggacacccccaggaggccgcgttcccctcctgggcttcccaggtgtgttcccagggagctgctgtgagactgactgcccgttccttttgtctgggcagggtcagctggcagccgcaagagcggatgcatttggtgtttactgtagacagtattctgcaaacctgagtgtctgtctcagcgatggctttgtgacgattctagaaatggtcgcagtccctgcccagccctggaacgtgctagtgcttgctccgccggggttctgcctgcccggtggtttgccgggtgtctctcgcctgcccttcttgtcggaatacagcctcccacgcctctcatctgcaaaggcttcgtaattggggtgccttttctgcccatcccttcttgctcacaattcaagaactttgttctgatagtttccaggcagctgagataaatcagttttcacgtgcataccatttaccttaatatgctgtttacacaaatgattgaataggtatgcgcattgtggttatttcaaacaatgccctaagctaattgcctcactttgaaatactaaattaagtgatcatattgtattcattaattcccaagtcctgttatatttccataaataaataagaaatgttaaaaaaaaaaagacatataagtaaaagtaggtaaagatattagaaaaaggggaaaagcagatggttagttcactggaatctgtgccacaggcgcctgtaagcaggaggtgtccctgcccaggagctggtcgtgttcacggcgtttggtggaaggaagatgctcctggctgggggaccccctgtggatctctgtggagattgtggggcctgggggacccccttggatctctgtggagaattgtggggactggaggaccccctgtggatctctggggagaattgtggggcctgggggaccccctgtggatctctgtggataattgtggggactgggggaccccctgtggatctctgtggagaattgtggggtaacgcagtgagtgacgtttctcagcagatgcacagttagcgtctctgggccatttctcctaggatatcctctagggcaggcctggacgtgtcactcgggatgtcgtttagtgcaggcctgggcgtatcacctaagcaaagtgtggcaagagtactttcctcacagggtatcaaagccaccttgttcggtccacagctttccggtgctccaattggatggttctgggtcagtgctatgggtgtcacagagagtggaggctcagtatctccaagcaacaggaccctctgggggcaccctgggcagcagagccccacccttactctgaagaacagaggtccactaggatcacctgcttcacttatggagctggggatagaaatgctgggggtcaatcggccctctgagcccaagcagagagacagtacgggatggggtggaggcgcatggccacctgagaacttgcgagactcatgccagcccctcctagggtgcccccaccaccagcctttttggtccccagtgagtctttcatccaagtgggtcactgccaggggtgaggacttgtaaatctatgtgagatttcaacaaatgaggcttctagctgatggtcttaaacacttccacggacatctccattttcttttagacaaatgggaaaataccagttatagtcattcactaacatccttttagtccacaccgggggcaaggcactgtaccagatgctgtgggggcgtgaagaggctgtagctgtgatccctgccttccaggaactcacggtgtcaccggggagagggtggtcctgcagggcggtagaggcgaggtgccgtcttgtctatgcggagactgtgtgtgagcgtacgcgtgtgggcgtgtgagtttgtgcatgtgcgcttgtgtgcacctgtatatgagttagtgtgtctgggtgtgtgtgtgtgtgtgtgcacgtttgcaaatgtgtgtgtacgtgctcctgtgtgtgtgtctgcataatcaagtgcatgcaaatgagtgtgtgcacacttgtgtgtgtgtacatgtgttggaatgttcacgtgggtgcgtgtgagtgtgtgtatgtgtgagtgtcccgtgcatgggagaagtgtgtgaaaatgtgtgtgttggttcatgcaggtatgaatgtgcatacatgcaccgtgtacacacgtgtggtgtaaggttggagggaggtatgcagccccacagactatatgagaatagaagtgggctggaagcttggtcctggaggaggcctgtgtttgtgttttggggacagtgacgcttgcgaatgaaattactttggcctgtgggaacagtgctctaaggaccactgtttaaaacaaattaccaagataaatgagctctttttcttatttctccaaaaatccaaccacagaaaatgctcaatattttctttcaaatgaaagaaactgaccacccaattctagattactgttaataaaagtgtctctaagcaaaccttttgctcctcaaagcttttgtgtccattgtcctgggccctgttcatccgctgctctgcatcctgggcattccttctctcactgtctttagcactgtccattccggtcccagaggcagtggggtccagccttctgtctgcacagtgaaggggttgcgtcctagaactctgaaatgtggggccccctggttcactgagtccctgagattggagttctgtggggtccagccttctgtctgcacagtgaagggggttgcatcccagaactctgggggtgtgaggccccccagttcgttgagtccctgatatcggagttccaggccaggcagaattcttgtcgggggacgccttccatgtctcgcctctcccagccagggcagcaagaagcctgccttccttcctgttttggaaaaagactcattctacagaacgtctcccagaatattcccctcccccacaagcctgtctgtgcatgggctgggtagcatgtggaaaggcctggttgctgctgccggcagagggatgtgtgttgtcctaaggttcaccttgcagatggctccagtctatccaggtctctggtctccatgaccaccatcctcacttagccaccatcccctggttggggctgctctgtttacccgccatgggctcctggcaatctccagcccttgccagggagatctgttttaaaacgcagacccattcaagagcctgccctgcctggaacaccacccaagtggaggtggcctcctctagctcctgggatgaaggccactgcctctgattcccgcaggctctgcacaatctgcttgagtggcttgaccagcttggtgtcctctcctgcctgatccagaactgcaaggccttgtccccactgcccactggggctgaccagggccaggtgctgccatgcacggagctgctccctccccgttgcccactggggccaggtgctgccatgcacggagctgctccctcctggccgcccactggggccaggtgttgccatgcacggaactgctccctccccgtcgcccaccggggctggatgctgccatgcacggagctgctcccttagcctggagtgtcctcgatgtcctcaggtcggccgctgttcgttctctgaccgctgggtgaggtcagtgccctctgtcaggtgctctcgtgcccttttttgcagcctgtccacaattataaccgaaccatcagtggtgaacatctgttgccccaggatcctggaagctctggagcatggagcctgcagtgtctgctttttctgtgtgcgtgtctcccggctgtcctggcctggccatgcaagcaggatgcagggcagagctgtggcttccctgggacgagggtgtggggcggaggcagccaagcagcaggcatagcactgacctgctcccagaacaggaaggggctttgcaaggctcaggcaatgctggggacagagatgatgagcctcgttgatgagagcacccaacgctgcagggaagacagagggagaaggcacgaagccgtcatcgaggagcacctgggggttaggcttccgcgcagaggcacgggcagtgtctgtttgccggaagggtttatgatgttggattggcggcatccttgggcacgcacagtaagtttggcagttaaacacgttagcggctgtgcttatgtgcgtgtatgagttagcagctgtgcacgtgtttctgtataaggattgacacgtacacatatatttgcacacatgagtgttttgatggtgacagtagccaaggacgggtggacagggagcccacagttttcataggcaaacctgttctcatctcccatgattttcagacagcccccaatttgaactcagttgccagcagtgagacttggaattaaggttgcgcatggaatgcccgttctggacgaagagcaggaccctggttctgaaagtctcgtggatgggctccatcacccaaggcctcctgcctccactgcggtgcggtgatgcacttccagctgggagctcagcatggcccgcagggctgcagagctggacgggtcagtccgggcttcgacgatagggtcatgtcgacaggctgcagggccatggcacaggaaacagagtccgaagtagaagagagttcatgaggaaaccccaagcaagctcagatcccaggtggggtcctggctgtgtcccaagaacacgaaggcaggagtcccgcagaggaggggcctgagggttacgggctctgggtggtttctagggtgattaaatggtcggcggtgaggcgacttcagtgtgccacttcccgggattgtttcagaggccgcactgcacgtctgagacggtggagctcagcctggactggtgggagctttggttctctggctccggcacccctgctgtgtagatcacccctggcgtcccgactccggagtctcatcgcacctgatgctttcctgattgagatttgactttccagtccttttctctagtatgttcatagagaccttttggggtcctgcctattagccaagtgacccggaagaacaaagcaatagtttcaaaattctggccacataaaaatcaattctaccagatgtatttagaaatttccttaattttctatttcactgctaggcacgtatccatatttgggggaatccagtatccccttaaaatcaagcaggtagcagcgaacctgggcatgatctgtgggagcttctgggctccttccttctggtcacaatcatcttcaacaagccttattgctgagtatttactagaataaaggacacccacatcatgaagtcctttaaatacggagataaggatgaatatcattgttgaaaaatgcattggataaaaaatcatgagataccgatacacacctatgacagcagccaaacgctggaacatggacgcctccaagtgtcacccagcgctgccgaggacgtgggaacacggacgccacccggcgctgccgaggacgcgggaacacggacgccacctggcgctgctgaggatgcgggcgatgggggcgccatcacagctgctcggagtgaaaaatggcacggccaccgttaggctgattgtcactgtggtgaggacatgggcgatgggggtgccatcgcagctgctgggagtgaaaaatggcacggccactgttagtctgattgtcaccatggaggacagtttggcggtttcctacaaaactaagcatactcttaccatatgagccagcagtcactcgtgttggtctttacccaaaaaagtggaaaattaatatctgcaaataccctgtgagggaggctgtgtgtgtgtgtgagggaggctgtgtgtgtacgagggaggctgtgtgtgtacgagggaggctgtgtgtgtacaagggaggctgtgtgtgtgagggaggctgtgtgtgtgtgtgagggagactatgtgagtgtgtgtgagggaggctgtgtgtgtgtgtgagggagactgtgagtgtgtgtgagggaggctgtgtgtgtgtatgagggaggctgtgtgagtgtgtgtgagggaggctgtgtgtgtgtgagggaggctgtgtgtgtgtgagggaggctgtgtgtgtgtgtgagggaggctgtgtgtgtgtgagggaggctgtgtgtgtacgagggaggctgtgtacgagggaggctgtgtgtgtgagggaggctgtgtgtgtgtgtgagggagactgagtgtgtgtgagggaggctgtgtgtgtacgagggaggctgtgtacaagggaggctgtgtgtgtgagggaggctgtgtgtgtgagggagactgtgagtgtgtgtgagggaggctgtgtgtatgagggaggctgtgtgagagaggctgtgtgtgtgagggaggctgtgtgtgtgtgtgagggaggctgtgtgtgtgtgagggaggctgtgtgtgtacaagggaggctgtgtgcgtgtgtgagggaggctgtgtgcgtgtgtgagggagaccgtgtgtgtgtgagggaggctgtgtgtgtgagggaggctgtgtgtgtggggggaggctgtgtgagtgtgagggaggctgtgcttgtgtgtgagggaggctgtgtgcgtgtgtgagggaggctgtgtgtgtgtgtgtgtgggaggctgtgtgtgtgtgtgggaggctgtgtgtgtgtgtgcatgtgtgaggatgcatggaaaatatccctactttccactcaagtttgcagtaatctaaactgctctaaaaataaagtctattaacaatgcactggggatggtgtctgtgtccactgcattcagcacagggatagtctaaggcaaagagaatcaatggttagtttatttcaactgtcaagtagctaaaattattagctaaaactgattttaaaagcacaaactatattatgcattatattgtatatattctaaataaatgtttaaaagaaagttttcaagaaagtctaatataattttaaaatatatttatgacattgtatgcaagaaacaaaatttaaagaatgaggctgttatgcttgagaaatgctttgcttggaacgttccaaaattgataggaattgtcctgggccatttttctttatgaaaagctgaatgatttgatgaggttgcctgggaaggggatcctcagctgcatgttgcgaagcgttggctactcacagatgtgcttctcttatatttggcaccaaatcaccaagccctgtgtgcagacacccggagtggccgagtggggcccggaccagccaggctctgccatgccctgagctggccacgcacgtccaccccgggggtgcattttccaatgtgcgcaagaggccggggagctgcaggcagccggcaccgtcactgctctggggccggccgagagcgccttccttctgagggtggggagtgcagctcgcgggctctgcggctgagtggagccctgggcttctgagcctccctggcctcagggatcggaagaggccgccggccctggcctaggattaggtggtcactgacttgggccccgcttgggggtccaggaacctggcttttggttcttcctggcccgtggctcactccctcctctggggccccaggccttggtcctgaggcctaggattgttctgcattgtgagcacgggagctgggccgtctcgacgtgctgcccagttcctgcttgttgcctttctattttcaagatattttcattcgaaaagcagagtaggaacactgggtatgtttgaagtcgctccttattttccctctttgcccctttctccctcctcccccctttcccactcctgcttgcactgaatggtgcgtgtctgaggaaggcaaaggagcgggcacatctgcctgtgttcccgcctgtggtgcggcctgtccatcacggacggtggggggcgccgggctctgcagacgcgtccccgagagccctccgcctttgtgtggcctcgcaggcatctcgggccggctctcggacaggaggcggcgcggccgggctgcacggagggaaacggcgcgggcctggcgtctcctccttgccattgtccgcccgcccgcgcagctgccaggctgcctcccggattccctgggctttgcaaagtcccatagaaacccgcaggacgcttgcaatactcgaggttattttctgctaatcacccggccccgtcgtcgtgagcatatatgcaatatcagaccagcaattaccgtcagcctggccctgggcaaatgtgtttctgctaattacacttgttgcatttgaatggctttcttcagccaagctgcacggcgaaacctagtgaacaataaaagagaccatttccccttccgccccgcccgaagctgcagatggccgccctgtgtggaagcagtagcgcctgaattaaccttttgtgtgcaccaaagaaggtaatttgaatgtttgaaaccccacaggaagcttgtctcaaagtgaacaattcgccgaataaagactaattggggactaaattaattagaaggtgtggttggaaaggatgttgatgagcagagtctgccatttcagacaaatggaatcgagctaaataaattagtccccattagtcccacaccgttcgccagccccgcgcctctcctgcgccgccggaaaggagcccgggaagccgtgcttgcctcccacgcagcccagggagaggcgtctccgccgatccttgtagctcctgcaaagtaatatttatatttcctgggtgttctgtttttcatctggaaaactggcctggaatgttattgactttgtttttttgttgtcactgagttgtcagaggcaagttttacataaaaaatgtgaaattacataaaaggagggctcggggggtatggaggaaagtggagtgacaacattgcagccacactggactttctctccaccttggcatttgtgttttccgtgatgctcggtttttatctcacaaaccagcatcctccgggtgctcccgggtcctaacagccctctggtgacgccgtgctccaaaacctcacggcggcacatgatcagaacgcattgcaaggacgtgtgtgacaccttcctgctctctgaaaatgaaacgtctcgttctgtcttatctccttcccttctcacagatggagtgtttggaaggtgccagaaggttccggcaatggacttttaccgctacgaggtgtcgcccgtggccctgcagcgcctgcgcgtggcgttgcagaagctttccggcacaggtagggcgggcgtgggccgaggctcggcggctgccgcactgagcgaccgcacgggcttggcttctcctcctgggcggtgaggagctgggacggactgaatccacgagtgtggtggtggaaggggcaggtgggagccgggcgctgggctcatgggtgcttcctactgggatcgtccgttcctgggtttggaggagcccaggcctgctgcctcctgtgtctgagggaggagatgccaggaggctgcagtggcccgcagctgggcctggcacaaagtaggcaggcgtcggctgcttatctgggcctggctgggtccagtgcaggcgtggctcggcctggagagaatcagcctctgcctgtcactgttgtgaaatttttgttgcaggtggtccctgcaggggtgatgagaagataatttttaaaattatgataatttaaaaattatatatggcaacatggtaggaccagggaattcccacagcaccggcccactgctgcgcttctttgactgtgaagtgagggctcttggtcagaagcagtgctgtgtggacaccatggtgatggataaggcgttctgactccacggagggtagttctggcaggagcactgtgcgtagggaagggaaatccacatctggagtaagcgtctagtccagcaaggaccattccccaccccttccacaggggaagctgcctgcggaaccacctgccccccggcggctggctgatcacctcggggaatgatgtcatgttggggactcagggatggtctttgtggtggctgactggggactcaagggtggccacagcagggctggccttgttgagtgggagcccaggcatcacctccaactctgccaccgcgaccaccttgttcatgggcccatggggcaacggcagggtggctggggaaagaggctgactggtgtccacagaacaggtcaccctatccacttggttattaaaatcctcctctgctgaggtcactctttggagaacattcacacgggacattcatatcttagtacttcataccacttcatagacgtctatctaatatgtctcttccccagttgcccttgtcaacaatgtttccaaccatattctctccgagtccctggccctccagccaaaccactggccacagcccattaattcataagtaatcacacatctggccgtttctccttccaggcggaatcaccagccaggtgcactgctggagattctgctcacaggagggtttccaatcacctctgttcttcaggggtcccgggttcacctctgtccttcaggggtcccgggttcacctctgtccttgagggcgtcccgggttcacctctatccttcagggagtcctgggttcacctctgtccttcatggggtcctgggttcacctctgtccttgagggcgtcctgggttcacctctgtccttcaaggggtcccgggttcacctctgtccttgagggcgtcccgggttcacctctgtccttcagggggtcccgggttcacctctgtccttcagggggtcccgggttcacctctgtccttcagggggtcccgggttcacctctgtcctttagggggtcccgggttcacctctgtccttgagggcgtcccgggttcacctctgtccttcagggggtcccgggttcacctctgtccttcagggggtcccgggttcacctctgtccttcagggggtcccgggttcacctctgtcctttagggggtcccgggttcacctctgtccttgagggcgtcccgggttcacctctgtccttgagggcgtcccgggttcacctctgtccttcagggggtcccgggttcacctctgtccttcagggggtcccgggttcacctctgtcctttagggggtcccgggttcacctctgtccttgagggcgtcccgggttcacctctgtccttaagggggtcccgggttcacctctgtcctacaggggttccgggttcacctctgtccttcagggggtcccagcatgggtggtgtgtagtgctacacgtgtctgcttttgggtggtgcctgtgcattacacagaaccacccacaaacaaagcccaagtcacctgagcccaaagtccatggggaaccctccacaaagccaaactgcgggttgagagaaacgcgtgtggcggtgtgggccagggcgccgggcagctccctgatgcacactccaggccacactggactcctgagccctttccccacgggagcctccagggcggcttgggcccagctcctgctccatatgtgccactgtcgtttggcgatggggtgctgtgcgcaggccagtgccaggcttggcagggcacgtagatatgggtatcaatgtagatgacacagacggaatgctgcccacgcagggacaaacatggagcgagccatattgaaggaaggttgtgtaaatattcaactgtgtcacattttctgagtttgcttgtcttgtgagccttactctgtgtttcacccttcactttattatcttgagaagagggaaaagcctcatttaaggagcaaacagatgagcttttgccactctgatggctggacgtgcgagtggaggccaggggtctttcaatgagaatgggcgtgactctttcagaacttcccctgagcgtaatttcagcccggctctaggtatgtatgtagctatcaccatgtgctggcaactggcactgaacatcatcacgtttctgtgctatcctgtgctgagatgtggcgggggcagggtgccggagttcacctgagctcccttgtcatgggagctagtgccacaagggctccggggccctgcctgggtgggcgtcctgggatgaaatgaaaccagagaatgcacaagactctcagcctgacaaactagaaaaaaaccaagaaatttaaggtgagtttcaaaaggagggatagaaaaatatctagtggccccgaattccccaacagagatgagttttctcacctatgattttaaagcaatagctttttctagtttgtctcatatatccatgaatttaaattacatgacaataatctaaccaaataatggcaaaaggtaactcctaaggaaaaccatctcagagaaaattaatattgtgccgagtgtcaggctatgtccacattcctggcacctgttcttgaggataagagcatctttatggagacggagtcccaggcagccccacatggggataggggggtcccaggcagccccatgtggagatggggggtcgtaggtatccttgcatagagacagaggtcccaggcagccctgcatctccagtcttgctcaggccctggctgagcgtctgcccaggtgtatcagaactgcccatggcctgggcagctggagccctctgcccagctccatccccagggactgtgtgtcctgggctgttggactctctagacagtgaaaagtcatcttctgcattgtggggacacagaattgctgacaccttcccagctggttctgacacagctgtggggtgtgtcctggggtgggcatttccagcaaaccctggggatgaccccgtggcaggaggacgaccctgtggcaggaggcctctttggttgccagggccattggtgtgtctagtccaggatgcaggcttctggaaggtgggcatgctgcgaaggcacacgtacctgcacatgcattcacatgctcacgtgtagacacagacacatttgcacacacacttgcacactcatacacatgctcacatgtagatacccacacgcagacaaacctgcacacacattcacgtgctcatgtgtagatacccacacacgcacacacctgcacactcacctgcacacacacatgctcacatgtagacatgcacacacgcacacacccctgcacactcattgacatgctgacatgtagacatccccacacatgcatgcacacctgcacacacacatgctcatgtgtagacatccacacacatgcacacacacccatgctcacgtgtaggggatatctacacgtgagcacgtgaatgagtgtgcaggtgtgtgtgcgtgtgtgggtatctacacatgagcacgtgaatgagtgtgcaggtgtgtgtgtgtgggtatctatatgtgagcacgtgaatgagtgtgcaggtgtgcatgcatgtgtgcaggcaggcacacatgcatgcacacttgaaggaaagaatctcaaatcctggtgtcttcctgagttttgtcagcctcacatggggggagtgtttgagtagggaggttttgcgtgtgggtgtctacactggagcacatgtgtgtgcaggtgtctgtgcgtgtgtgtgggtgtctacacgtgagcacgtgtgtgtacatgtgtgggtatccacgtgagcatgtgaatgagtgcgcaggggtgtgtgcatgtgtgtgtatgtctacatgtgagcatgtgagtgcatgtacaggtatgtgtgcatgtgtgcatgtgtgtgtgtctacacctgagcacgtgagtgcatgtgcagatgtgtgtgggtgtctgtgtgagcacatgtgtgtgcatgtgtgcgtgtctacatgtgagcacgtgagtgcgtgtgcaggtgtgtgtgcatgtgtgtgggtgtctgtgagcacgtgtgtgtgcatgtgagtgtctacacatgagcatgtgagtgcatgtgcaggtgtgtgtgcatgtgtggctgtctacacgtgagcacgtgtgtttgccttgtgtgggcgtctacatgtgagcatgtgaatgagtgcacgtgtgtgtgtctacatgtgagcacgtgtgtgcatgtgtgtgtctctacacgtgagcatgtgaatgtgcaggtgtgtgtgcatgtgtgtgggtgtctacatgtgagcacgtgagtgcatgtacaggtatgtgggtgtctacacgtgagcacatgtgtgtgcaggtgtgtgcgtgtgtgggtgtctacacgtgcaggtgtgtgggtgtctacacatgagcatgtgagtgtgtgtgcaggtgtgtgtgcatgtgtgtgggtgtctacacgtgagcatgttcatatgcaggtttttcaggattccagaaatgattctgtcttggtaactgcgcttgaaacagagttgatcctgtgcttctgcctgtcgtcttcatccaggccacttcttgcaggtgcagttgtcagattcattgacagacagctgcttgcgcggccttcagagtcttctgcacgaagaggagggtaaatgggagttaatttcacaaccttcttcctccaggtagatgtgtacatcacagaacaaaatacgttcactgtgtttttaccattcttgtctactacaggcagcattatttcatgggcagacacactgctctctcatgtatgatttttttttaaatacatttcactttttctgacaagccattaaaattcagcatttaaatgtcactcgttggcatgcaatttgctgtcatgaaaacgactgtggattcatttcctggtaagaatcttctgacttattgagctgcatgtcagaagcaaaaagcaaaaaaaccaaatatgtacataaaacagtgttatcattccttaaaagagaaggaaaataaatccctaaataatgtggactggaacacagaaatccaaggctggccgcacgggtcctggctgggatggcatccggggagctgctgctggggacgtgcttgccggcacaggtcaggggagccgggttctgcctcctccttgcccactctatttgcgccctccctgtgctcgcctgtcttgttttacctcccatcctgggcccttggagcttggaggctttccttcttgctgagaggagctgagatccaccccctacccgacctccaggcagatgtgtggtgtggggttggggagggagaacgtctggctcacgtctggtgagcacaggtgggtgtgttggagtcacgcgtggtgctcaccctccgtgtgactcgcgctctgtcaggctcagggctcgccctccgtgggatttgcgctctgtccggctcagggctcgccctccgtgggacttgcgctctgtccggctcagggctcgccctccgtgggacttgcgctctgtccggctcagggcttgccctccgtgggacttgcgctctgtccggctcagggctcgccctccgtgggacttgcgctctgtccggctcagggctcgccctccgtgggatttgcgctctgtctggctcaggctgcgcagggcaatggaggaacctcccgagcaggcccagtggctccttccacccagcccccatctccggccggccatttgtgaggccctctgccactgaggtgcactgtttccaattcctcattcacaagctctaccttccacaggagcccagagcatgaacgcattcggccatggtcctcaccactctgcgaggagcacagcctcttctccaccgtccgatagtgtgttcctcctttcccaggcctcacagaatgctctgtctgcatcctcccagcattccattcatgatggccgagctgttctctaagagatactgctttgtcttccttttgatctctcaacacaagcacttttaaaaattcatccatggcgaaggaggcttgttccagcacacacctcaagactcagcctcaacaagtttcccagacccaaagttgcttctgcatttttaggaatttgtcacagccgtgctgctacttcccggtgccaatttttctcttgttcgagttgctgtcacaaaaatcacatggcgtgggtggctgaaacagcaaacattgatttctcagagctctggaggctcccccatatttggtgtctggtggtgggtggcttcctggttcatgggtggcatcttccccccgtgtcctcatgtggcagacggggcaagggagcgctctgggatctctttcgtatggacactaatcccacctgcatgggcgccgtcttcatgacctaattacccccaaagccttcacctcctaatgctgtcacactggggatcagaattccagcacgtacgtttggggaggatgtcaacattcagtctgtatcatagcatgtgtattctatgaccatagtgtatctcattggttagtttttatatttgaactaatcttatattcctgggataagtcttacttgaccatgctgtataattctttttatatgtttctggatttagtatcttagtgtttcgttgagaatttttatgtccgtatttataaaggatatctcttaatcttttgatatctttggttttggtattatagtaatacataacttgtcaaatgcattagtcagggttctctagaaggacagaactaataggatagatgtgtatataaaggggagtattttaaggagtattgactcacgatcacagggtgaggtcccataataggccctgaggagcaaggaagccagtctgagtcctaaagctgaataacttgaggtccgaggttcgaaggcaggaagcatcccgcaggggagtagcgtgtaggctggaagactaaactacttttgtgttcttctgcctgcttttattctggccatgctggaagctgattagatggtgcccacccagactgagggtgggtctgcctctcccagtccactgactcaaatgtgaatctcctttggaaatgccctcacagacacacccaggatcaatactttgcatccttcaatcccatcaggttgacactcaatattaaccatcacatcaagttaattgaagagtattctttctttattttttttggaagactgtgaaagaatgatgttaattcttccttaaacatttgaagtgaagctattgcaaatggaagccatctgaccatgggcttttctttatgaggttttaaattactcattgaatttccttaattattataggcatattcaaattttctatttcttcttgagtcagcttcagtagttcatgtcttcataggaatttgtcaatttcacctagattatctagtttgttggcatatgattacttatagtatttctgtatagtccttgtaatttttatgtctgtaagatcagtaataatgtcttttcattcctgattattttttgagttgctttcttagtgtttgctagaagattaatattatttaattttattaacaccaagttaatattaatttaattattaattcaaattaacattaagatctttataataatctagttgaattaataccaacttaattttcaaacactctctgtcattttttctctttccctcctttgtgctgttattgtcatgaaaattatatctttatagattgtatgtttatcaacatggatttataattattgctttatgcaggttttttaaagaaaattaggagaaaataaatgttacatactcaaatatttgttctgtctttcatatttactaaataatgacctttactggtgctgtttatttcttcatctggatacaactcactgtctaatgtcctttcatttttgcctaaagtactccatttagaacttgctagggaagggttgttggaaaaaattctctttgttttttgtttgggaatgtattgatttctcctttagttttgaaggatcgattttctgaatatagaattcttggttgatagacttttttcttttaggactttgaatatatcattccactgcctcttggccttcatagtctcagatgagaaattagttgttaatattattgaggatcattgcctattttctgttgcttatcacagaatatctgaaactgggtaatttataaagaaaaggaatttatttattacaggtatctgggctgagaagttcaaggttgaggggcagaatcaggtaagggtcttcttgctgttggggactctctgcagagtcctgaggtggcacagggtatcacatgatgaggaggctgagcatgctagtgtgctagctcaggtctcccttcctcttcttagaaagtcaccaggtcccctcttgtgataacccacatgaattaattcattaattcatgagtggattaatccattcatgagggcagagccctcatgacccagtttcctcctccctcctgatactcccaaattagggattaaacttcaacatgagttttggaggggacaaatatctagtccataacatgtgtgacaagttgcttctctcttactgctttcattagatttactttgtctttgggttttgaaggtctgattttgatgtatctaggtgtggctgtcttagagtttattctacttggagttcattgagtgtcttagatatgtagattcatgttttccatctagttttgggaattttgggtcattatttcttcaaatattctttctacctcattcttcctctcctacatctgggacttcctttacgtgtatctcagtacattggatggtctctcacaggtttctaattttttattattctttttttttctgttcctcagactggataatttcagttgacctatcctgaagtttgctgattctttcttctgctgctaagatctgctgttgagctgctgtactgaatttttcaattatttttgaaatataatttctatctttttattcatattctctatttgatgagacactattttcctacttttatttagctctttagacattgttcttacagtttttggagcacattaaaaatagctcatttagtctgggcacagtggctcatgcctataatcccagcactttgggaggccgaggcgggtggatcacttgaggtcaggagttcaagactagtctgcccaacatggtgaaaccccgtctctactaaaaatacaaaaattagctgggcatggtggtgcatgcctgtaatcccagttacttgggaggctgaggcaggggaatcaattgaacttgggaggcagaagttgcagtaggctgggatcacaccactgcactccagcctggatgacagagcaagactctgtctaaaaaaaaaaaaaaaaaaaaaaaaaaaaaacaaaaaacagctcatttaaagtctttgtcttgtaagccatttggcttccccaagaacagcttctattgttttcctgtggaagaggcacatttgcatgtttctttgaatgcctcaaaaatttttagtaaaactcaatattttaaataacatagtgtggcaactttgaaaaccagaatttccctctccttaggtgttgttgttgttgttgttgctgtttattgttgtttgcttgcttagtgactattctgaactaattctgtaaagtttgtgttttttcatcatgtgtggccaccaagtctctgctcagtttggttagtggtcagatgaccagacagattgccttaaatgcctagaaacaagcctcagtctctgctgagggttctgtgtgagtgtggggcataccttcagccatcagacaggcagttcacagctctgttgtagccttcacttcatgctggcccagagcctctacatcagccagtggtgagagcttagagcctcatgtcttccctgagtgtgcacagcctgggcaggcacacagccctccatgtgttgtggccatccatattccaaggatcgtgtcagagctttgcaaagcacctgtgcacatctcattttccagcttttccttcaagctttctggttagcctattgtttgtcccaaccattatcctctacctcaggtggctggtaagtaaaacattgtctctaaatgttttcaacaaatgcccccagggaaagacttttcacatatgtgagctttgagttggatgaaataaagacagcctttccagtgggtcctccagggaacaaccagacaggtcaagtagtgacaattctctgggaatggggctttgaaggcactctaaccccaccctgtgctttctggtggcttccaggctgttggtttttactgccattgtgggctgctcattttcaagcctgtggcagagctgaggagagggagctggaaatagggtgagttaagatgccaggaagttcgctgttcttgctgagattcagccatttctttctttttctttctttctttttttttttttttgagtaaattgctctgatttctgctagcctttagttaatttccagagttctgtaaaagttgattctgatatttttgggtggttttctcattgcttttatgaaggagggaatgtttaaggttctttgccattttcactgatgtctacagctacttcctaaggctgcttttctctggtcctctcctcaacgttcatctggacatcgccttggggatcactagctggggacagcttcacttcagtttgatttaagtgtgatcttggtttgttgatttccttgtctagttgctccgtctgttttatgtgggaattggggaatacccaaaaacaatgctgccatggccacatccatctttttttctctttctctctccacctccctccaccactgtctccctccctccctctctccctctatctttagctctatgttttgtctaatataaaaatgaatccctattttttctgttgtcctttccttgttaaaaatatccgttggattcctctgcactgaaggaaagaagccactcttggctttagagtataaaccaaaaataaaattctaagtcccccagccagctgaatggacccttcctcttggccaagggcactctaaagtaaacctgaaacactagttcaggccatgatgggaaggggtgtttggacacaccttatcctaccctcctcccttggtgtccaggcacagctgaccagcgttaacattggaacagaggcgtgaagacagacaaagcagaccttttgcagctataaggtaccaacatggcagattgcaggccctgaaagaaatggaagtattttaccccaaaatatatttctgcgatatatttaaatggcttgcaaagctgtctctcctgggaaatgtctacattctgtagagaatcccttttcctttccaggtcttttccctgatccaagagggaattaattaagagtctggcaccttttcaagtctgataaacattgaccatctattctctctgaagcctgcaacctggaggcttcatctgcataataaaaaccttggtctccacagtcccttatcttaacccagacactctttctaccgattcccagtccttagataaactcaaccaattgccattcagaaatctttgaattcacctatgccctggaagaccctgcttagtgttttcccatctttctggaccaagcctgtgtacatcttagggtattgatgggtgtcttatgcctctctagcatgtagaaatccaagcctgtgtacgtcttagcctattgacgggtgtcttatgcctccctagaatgtagaaatccaagcctgtgtacatcttagtgtattgacgggtgtcttatgcctccctagcatgtagaaatccaagcctgtgtacgtcttagcatattgacggatgtcttatgcctccctagaatgtagaaatccaagcctgtgtacatcttagcatattgacgggtgtctgatgcctccctagcatgtagaaatccaagcctgtgtacatcttagtgtattgacgggtgttttatgcctccctagcatgtagaaatccaagcctgtgtacgtcttatgtgtattgatggatgtcttatgcctccctagcatgtagaaatccaagcctgtgtacatcttatgtgtattgatggatgtcttatgcctccctagcatgtagaaatccaagcctgtgtacatcttatgtgtattgatgggtgtcttatgcctccctagcatgtagaaatccaagcctgtgcacatcttagtgtattgttggatgtcttatgcctccctagtgtgtagaaatccaagctgaagcccatccaccttgggcacatgatcttaggctctcctggggctgtggcctgggccattggtcacccacatgtggctcagaatacatttcttcaaatagttttcagagtttgaccctcttcatcaacaggagcagtagttgtcagccctgacgttatattaaaataacttgggagcctcggaaaccatggtgtctggggcttacccttcaaagattctgaattgatttgtctcatatgaggcctgccatcagcatctcctaaaaattctccaggtgatttcagtgtcttcatatttattttcttccatgaataaaatgggactaacactctctgaagcttgttttatataccaacaatatgaatggctttcttcttattcctgtcttaaatttttatccagctgttttaaggtttacacattgcaagcttaatgacattttaatcctgtatggtaaattagtataatgcattttgttaaaattttcatagaataatggagaagggaatactggatatagtatagagcagtaaaattttaacagtagttttaacttacagaattctactggtgctttccttttgctgtagggaagttacatctctttatttagcagattaaagagacggaatcacagagggattacagggtgttcctggggtccttcggctggtgtggaatggagagcggaattccaaactcccagcagcagagtgcagagccgtgatttttaaaatgttgttctcaggatcacatcctattattgaaaattactgaagactccaaagaatttttttttttttttttggtgggttagtgctatccacatttgttaccttagaaattaaaattgccaacactttagaaaagctgtttattaattcactttaaaataaatcataaaattatttcattataaacacagtagctatattttccaaaacataaaaaagtgctaagtgtgacatttttgttttacatttttacattcttgtttcacgcttttgcatatctcattgtttcatttaacagaaaacacttggattctcatctctgcctcccactcattctgtgtcatttcctgccacatagcctctggactgttccaagttctctcataaaagagtacacgtgagaaaggcaaagtatgtcttagtattttatgaaaatagttttggcctcatggaccacttgaaagagcttaggggcctcttacagttgcaggctgtgctctgagcattgattgtggagagacaacagggtggccttggagtccggatggagtttaagttccagctgcggcacgtgtgagtcgtgccatcttacgcacatcacgtaactgccctgttttggttgtttatcgtgaaacgagggtggtcctacatgccctaggttgaatgtgctgggaccaaactctgagacagagatttgcatgcagtcggtgactgggggtgatctggggtaacccccgtacaggtgagggaagctgaattgggcagagggagaaggtgagctggaatgcagtttaagaggaccgagctgatcctgtgaggtgctctgcagccggagctggggttccccttcagggttgacccaaccaaggctgggggctaggcctttgtgtcccacatgagggatcactgatggtggttcacctccagggagcaagagactgtaacttagggagtggctgttcccttgggctcaggtggtgatggggagggattcagcggctaacccctagccctcaacagctggtgtctggggagaggatgcagagtccccaggaagcagcagtgtggctgtcacagtacccaccaccctgaatgtcatcatttctcaggtgtgtattgttttcccatcactgaaattaggaggcatcttttataaatagcacatcatagtttaactgccagcgggtttgtttttccttagcagtactagagtaatggtctgtcttgcaatcaatagcttcctagattggaggaggtcataccatctcatgggacaggggattgctttttttgagacaggctcttactctattgcccaggctggaatacagcggcacaatctcggcttactgcaacctctgcctcctggactcaagtgatcctcccacctcagcctcccaagtagttgaaactacaggtgcaaaccaccatgcccagctaattttcgtattttttggcagagatggggttttgccatgttgcccaggctggtctcaaactcctgggctcaagcaatgcacctgccttggcctcccaaagttctgggattataggaatgggccaccacgcccagcaaatgggattgttcttaagattaatttagatggtgccactcattaaatcctcaggaagtgtgaatgcactttgcttatcagtactaagtgtggtagaagcttccctaatgatgttgaaggttcacataactcaaaccagcaagagctggggagtggtgtgtaggttaaccgggaagctgataaatacagagcattctgctaagcacctcgggagctaagacgatgactcagaattgggagttctagttagctgcttgggaattctgaataaatacatctgttcagcttcttacaattgagcgcatattaatgcaaacagatcagaacagggaggaggggagtgtgtcaggagccgttaacacagagcctcgggacagctgagttggtcgtggttcgtctgtgttcatgccctgcaatgctgtctgtttaatttgcacggcccgtgcaaagtgcaaatacaggtccttagttcagaaatcaaggaaaagtgcccctaaaggaactagttatagtataagatgtttcctttcacaatctccgtcttgacttgtcatgggatttttatttgctattcagcatcattctaaaaacattaagatttttgaattattaacatgaaggttaccattcatctgtatatcgtgcgttgctggtttcaaatgcaaatgaaagaacatttaattcacatgcagaatctgaacaactacatagttcatctgtcacagctcaaacatgcatatgtatttcattctcattacagcggtggaaatgctgtgtgaaactcactcggctgtgtttatttcccttcatgaaacagcccctgtccaccgagattctccacctttgctcacacatgagaaggactgtgggctgcccacctcccctccctccacacggccacgttcagcataaatggtggcttatgtgggaaagcaatgtgagtgggagagagggtgggacccttggtcgtttgtgtttcttagaacactgttgcactttgtggtttgcagcaagctctgggtaagcagaggagtggcctcttagggccacatgagcacagacagacacgtggggggcgaggcgctgcgggactgggtggcgggcgaggcgctgtgggcgtgcagattggggtgtcttctctgcaggtgcgcgcaccacgtcgcctcatgggatgtctcacacaaaatataggttgggagataaaatctttgagaatttcaagacagcaacagcagcgtgtcaaagcaaatgagaaatttttctgcacacaggcccctggcgactacctaggtccatgctcccgtgaggctgcccaccttccaaccctagccgtcggatcagacgatacgaggggacctttggccgtttgctttatggccttgactccaagggctaggggtagagcctgactgtcaccattgggaaatgccacagtgggcccatccctcataattacaatcatttccgcatttgtttctatgaaatggacttcagttaagaaactttgcttcttcattgacccatatcatcatttcagaggcattctctgtggttcaaagtgacataaattgcttgctgccaaaacatcctaggtttctacaaagtaaacaaatattttcaactgtcagacagtgggaaaaatgtgtttcttgggaggaaatggtgctcgttttgcctgctctgaccccatgaaccattcagtggtgttaaccggaaaaggcctttccagaacctgcccctgagctgctaatactgtccaagggcctttcagggacgttctcctcccagaccaaggtgctcattttgctgggttctggggtaaagacccaaccccagcaagcacctgccagggcttccctggggggcctgggaaccgccaactgctctgccacttcctgagggaggtgagggagctctgtggcagtgaaggatgaatgcagccagcagctctaggactgaggaatccatgtctgctgaaaactgtcagagaggtgagaagctcatttacagctctcagaaggccctggctatctgtctttgccatgttaatgagctaaaaaaaattgcttcctggtcaggcgtggtggctcacacatgtaatcccagcactctgggaggctgaggccagcggatcaagaggtcaggagtttacgaccagcctggccaacatggtgaaaccccatctctactaaaaatacaaaaattagccggatgtggtggcatgcacctgtagtcccagctactcctgaggctgaggcaggagaattgcttgaacctgggaggcagaggttgcagtgagccaagaccatgccattgcactccagcctgggcaacagagtgagactccatctcaaaaaaaaaaaaaaattgcttcctgagagccctgcgtgcatctgcagaaaggtgggaaggacagacttgcatggcagtttccccagggcagcccaggtctgcaagctattcagtaaccactgagatttgtctcgggaatatgccagtcttgggtgggataaaaagcattgattagtgtcaaaacttcccctccagtttgaatttaataatgcactgacatcatcgctcaccagactgctgtgacgttctgtccattagtgtctgcagggaggtcatgaacatcctgctggatttgaaaacgggctgagctgcaccctccttcctgtgcggttccctgaaggcccctcccaggacaatcggcagtggctgtcagggccacagaggcatcgtgttcctgtggctcaggaggtatttgggtgctggcccaggaagaagtgatgacatgaattttacccctgggtctgggctgtgctgtttttacttttttgaaggtgggaggtccttggacccaggggctcagcaggaagaggagagaggacaggcaaccccaggaggtgcttggaggtgacattgtggggcctgatttcctcctgatgtgcccgagcacaactttggcacatcctgctgggcccttgcgccctcctccaatctgaagcctcacagctttttcacttgggaagtttctcggccattccttcagaggtggcctcccccgcaagctcttcattcttttcttccagattcacggcacataaactttgttatgtgcacaaaattattaaaaattacataacattaccttcaggccttctatataaggtataaggaaacacaagtaatttcatgtttcgacttgggtcctgtccccaagatatttcattatgtacatgcaaatattccagaataaatccaaacatatctgaaatccaaagcacttctagtcccaaacatttcagatgagggatattcaacctgtgtcatattattttattcctttttgtgtgcctgaaacgtttcataataagaataaaaggacgaacaaagcaagcaaaagacattaaaaagaagaaaataatgaagacaagagcagaaaatactgaaataggtacgaagaaatgagggcaagcatcaagaacacaaacagcagaaatatctctgggtctttgaaaagacttacagagctctttttaccgacaatgacaaaaaagggcataagtacacaattaatgagaggaaaaagggaattccaccataggtaaattgaattcaagaatcgtaggaaaacactactaatgactttgttctaagaaatttgaaaaggcaattagaaaaaaaacctgtaagttgataaaagtgactcaaaaagtaaagaaaacttgagttagtctatattcattaaaacatgcattccttaaattttcagtcaacttgttttgtaacttcagtaagagtagtccacattcacaataggaaattcattctgtccacaaaccatcctattgtgatattctccaaaatatatgtggagaggtgagggaacagcataactggggtatgtggttaggtaggatgggggttagttattttaaacataggcacgtgtggtgtgcacctgtagcactcttaacctctaaacattggccattctctgttttacaagaaacctgattatattttttactaagtccatatttctttgggacctgtccttaatgactctgaaagacccctccttactgctgggttttgtagtcaaaggagaaatgagggctgtacgtgaagacccttcccaagacaagatgcttctgtgtctgatgaagaatgaagcctcaagtcaagctcaccaggtcatgggctgagggttgctgaaccacaaggagataccgtatcacaaatgaacggactttgcagtgtcatcactgtggctccaggggcgtcttcccttcccaaagggtttctggcagatccctttgaacagagagtttctctggtacatttcagaataggttcccagattgttaacaccaggacagaacggctgaaagccagagagttagcagctctctctgaatgatgatcaatctgaaatgaagagaaagtcattctgtagctaggaaacatgatcagtttttaaaagcttatgcccagccattggcagaagctgtatatgtgctgtgctggtccctccgggactggatcctgagagctcccaggattttcaccgttaccgcttcagaagcagaggaactagtaaggcgcacgtttgtgtttggatggaatgctatccatggacattccaaatgttgcccccggccacatctgctggtctctcctgccccaccaccccaactgctccaccacccaagctccacctcccttagagttccctgagtgccgggcgtgtccacctgtggtcttcccatggtcttcctgtgggccaggtggccatgtgcctctgtgaccacagcctacatgcttggctccatctgctgcctcagaaaggccaactgccacccagaagagagtgggtcaggagggttgagatgaagtgaaacaggaaaagttcccttattcccctcacagggcgtgcgatggaggagtgggttgcttcttcagtgccccactgctcccacctgcaggggagcatacagacgggcaggctgtgggctcagaccccacggccgtgtctaggggtgaatgcttacagctcctaaagccccagtgggcgtgtgttacagggtgcttttttagtttcgccgtctgtgggcggcttgtgttaaccagctcaattagaccctctgccttattgcaaggacagggggctttctgtgtcctggagtttcttgccttggtgtactggaagaatcagatcgcacatgggcttggagaatgagcgcaaggttttatagagtggaagtaactctcagcaggagccagagggagatggactgggaaggcagttttcccctggagtcgggccgctcagcagccaggctctcctccaactacctagtctgctggtgcctgtcagtgagttcttctgccggtgtgctcctcttgacatccagcccttgtgtctttgcccactagggtcttggggagctgcttgtgtctctgcctgctagggtctcagggtttttataggcacaggatagaggcatggtggaccagggtggtcttgggaaatgcaacatttgggcacaaaaacaaaaatgcctgtcctcgcctaggcccatgggaaaggtccaggggtagagcccttgccagagacccgcccttctccacccagcacttccctgcccatctcccatatcagaagcaatccaaactcatctttctgtttatttaactaagcaaccatctcagacaaggtgcctgatgatgtgaaaatgaaaagtgagaaaatgaggattcgacagctcacctcagctgctagtgcacaactgggtgctatggagatgtggggcagcatctgggcagacaggcagggtcagcgggcgccgtgggcttggaccctcagaaaggcgggtgaaccgtgcggatggagagtggtgcagtgtttgggcagacaggcagggtcagcaggcaccgtgggcttagaccctcagaaaggcaggtgaaccacgatgtggtgcagtgtctgggcagacaggcagggtcagcgggccccatgggcttagaccctcataaagatgggtgaaccacgcacatggagagtggtgcagtgtctgggcagacaggcagggtcagcgagctccatgggcttagaccctcggaaaggtgggtgaaccacgcgcatggagagtggtgcagtgtctgggcagacaggcagggtcagcgggctccatgggcttagaccctcggaaaggtgggtgaaccacgcgcatggagagtggtgcagtgtctgggcaggcaggcagggtcagcgggccccatgggcctagaccctcagaaaggcgggtgaaccacaatgtggttcagtgtctgggcagacaggcagggtcagcgggtgccgtgggcttggaccctcagaaaggtgggtgaaccatgcgcgtggaaagtggcgcagtgtctgggcagacaggcagggtcagcgggccccatgggcttagaccctcagaaaggcaggtgaaccacgatgtggtgcagtgtctgggcagacaggcagggtcagcgggtgccatgggctctgaccctcggaaaggcgggtgaaccatgatgtggtgcaatgtctgggcagacaggcagggtcagcgggcgccatgggcttggaccctcagaaaggtgggtgaaccatgcgcgtggaaggtggtgcagtgtctgggcagacaggcagggtcagcgggcgccgtgggcttggaccctcagaaaggtgggtgaaccacgcgcgtggaaagtggcgcagtgtctgggcagacaggcagggtcagcgggccccatgggcttagaccctcagaaaggcaggtgaaccacgatgtggtgcagtgtctgggcagacaggcagggtcagcgggtgccgtgggcttggaccctcagaaaggtgggtgaaccatgagcgtggaaatagaagcacactgaattctgggcgacccgtgctcccaggtctccttgtggctggatgtctttcctgcctctcactctcccccgggaacactcctccctccccgcttgctcctgcctggcctggctcagccctgcctctcgcatcctcctgtgtcagaggcacacgcatgtctgatgctgttgctcagggatatcagttgaggagctgagggccgggaattacgtgacttattcccaaatgagtagatggaagaaatggaacgtctgtgattccaggccaggagggaatagttgacgccagagtaaacctttaatttacatgaaaaacttacaaaaaatatgggagccagacatgaaaacaacaaactctcatgtaatttcatcactttgggggaaaacaaaaatccttcttatttttatgtatttgagaatcaagcttttgtgtctcagaaggtccttagatattcttgtaggttcaagtgatgttgagaaactgtaaacagcaagcacaacataacaatgtttccaccagcagcagatcgcgtacatgatggtggtcccatatggttgtagtggagctgaaaacccctgtcaccgactgaccttgtggccctcatgatgtcacagtgcagtgaattacatgtttgtggtgatgctggtgtagacgagccaactgcactcccacttgtatgaaagtctagtctagctgtgcacggtacatgtgtatttgctgtacttttatcattattttagaatgcactctttttacttattaaaaagcaaaactaacactcacacagactcaggcaggtccttcaggagatatgccggcagaaggcattcttctcataggagatgatggccccacatgtgctattgcccctgaagaccttcctgtgggacaagatgtggaggtggaagacagtgatattgatgagcctgccctgtgtaggcctaggctagggtgtgtgtttgtgtcttagtttttttttttttaacaaaaaagttttaaaagtggaagaaaagtgtaaataggaaaaagcttatagaataaggatataaagagactatttttatactgctgtactatgtgtttgttttaagctaagtgttataagaaaaagttaaaagtagttaaaacatttataaagtacacaagttactatttttttttttcgagacagagtcttgctctgtcacctaggctggagaacagtggtgcgatctcagctcactgcaacctctgcctcctaggtttgaacgattctcctgcctcagcctcccgagtacctgggattacatgtgcacactaccacacctggctaatttttgtatttttagtagagacggggtttaaccatgttggccaggctggtcttgaattcctgacttcaggtgatcacctgtctcagcttcccaaactgctgggattataggcgtgagtcaccgtgcccagcccaaagttactatttaaaggtaatttattattgaagaaaaaacatttttataaatttagtgtagcctaagtatacagtgttgatagtctagagtggtgtacagtaatgtcctcggccttcacactcacccaccccaccctcactgatgcactcagagcaaatttcagtcctgcaggctccattcatggtcagtgctctatatagctgcaccattttaatcttcttttttagactgaatgtcactctgttgcccaggctggagtgcagtgacgtgatcttgactcactgcaacctctgcctccgtggttcaagtgattctcctgactcagcctccctagtagctgggattacaggtgcctgctgcctcgccaggctaatttttgtatttttagtagagacagggtttcaccatgttggccaggctgaactcaaactcctgacctcaactgatccacccaccttgacctcccaaagtgctgggattacaggcgtgagccaccatgcccggcccatttttatcttttataccatatttttactgcaccttttaatgtatagatgatacacagatacttaaccttgtgttacaattgcctgtagcattcagcacagtaacttgtaggacagatttgtagcctaggcacaatgggctttaccatccagcccaggtgtgtggcgggctgtcccatctgggggtgcgtaagtgcacccgtgatgtttgcacagtgacaggatcacctaatgaggaattactcagaatgtacccctaccattaagcaatgcaactgtactactcttaggattaaaactacatggcttacctgtgaatgctttaaaagcttgcattttcttttctgatgcaacccacagtttttaccttttaattttaaagtatgaggtcagttagacttcatccctatttaaaactgaaaagcttgatttagggcattctttagtgttaatggaaaagcctcaccaggaggcgggctccatctgcttttgaacatcctggaataggggcagtctttgtttaatagaagcttcatttcagacaaggaagaaccgtcaccctcaggagaattagatgtctcaacagaggaggaaattgagacctatcggaactggaagcttaccagatggcagcacagaaaaccctggcatttctgaaagaagcaggaaggtggggagaggagggatccatttgcgggctgtatggaatgtaatcttgtcttaagcctcactaaaagctagacaggtcatggagacaatcaggcttttattctttgaaataattcacattacaggcttgtgtattactggccttatcaaataaaagcctttagactcatgtgggcagataattacaaattgatgtctgggcctcttgttttggaaatggcttttacactcccctcttctttctctccctctttcatctctctcttcttgagttaaactttcttgtgattttgttagggttctggtagtgttagctggctctaagagtaaatggcaaagctatatgaagaagtcacttttatttgaagtcaagaatcgagttacaaagtgcaggaacattggtgcagacagggaatttcatttaacactgtattcagcctcagaaattattacaaatcagaagtaataagtcagacaaccaaagacagcagcactgtccagggtcagtttcatctgtcagggttgtttcttgccacagaactctattttactttacccagtgaatcttaactttaaagacaaaaaccaatgaataaacactttttggaaaacattagaaatcaaccaaaatctagttaatttataacaattgggggaggggaagctcctagagcttagactaaaaaaacccaaacaaaatataaattccaataaatgatatcctcatatccctattgtttctccagatcaacaaatatgtgtgattctgtatcatatgactttgtatatcaagggaagagtggatagtatcagaaaaatccctagaaccctcaagtgtgaaaatgattagacatcttgaataatacaaagcaacacagctagatccacatcaaaagagtcatgaagaccaagtgggttgatcctggtgagtacattttgaaaactgtgaaacacaaatggaagctgttacatcatcaccaagtggggtggaatgaaggcaagccttggaaactcctcctgccatgaggttctcaactccccaccccagagcagaaatgccccatctctgcatcctgctcttggctcagcagacctcctcctcctctgtcaaagagcatccacattttatctgctgacttcttaaagaatcagatgctcctttccctgaatattttaaagagagtcacatagtcaacattcgtcagagatggacatcagcaaggcagcaggagaggactctccattgctcatccatcacagaaacaacaatttgaacatctatctgtgtgcaaaaataccttcacaagtgctaaggaaaccaggtgagaggtgatagcacctgggcatggcacagaaataagatgcactgaaaaggcagaaaaaacagttttgcatgactgggtcccctctcacccaggcctagcagcatgttgtggtgagagatgccctctatgtgggggaaggaaagagaagtgagtaccagactttgcttctaactctaaaactgcctcctgatcccccaccaaccaagttaaacccagcaccagacatgcccccatagcttcctactccaggctggtacccaaggacggaggcttcaggcctgccccaataccaggtaggatcatgcaggcccaggccccacacctgcccagtggacttagtctctgggcccactccgcatacaggttgaccccattggcctcaggctccacatcatctctggcaccaggctggccctgcagctccatggttagcagacaggacccaggcctatcctggtaggccccagcactgaaccagccctcactgacctgggctccaggagtgtccctgtggactcaggatccaggctggtccccagtgctccaggctccagaactcagagtccaggcccactccaatagacccctggtgccagccagcccctttggacagaggctccaagaccacttctgcagacttaggctccaggccaacccttgtggatccaggacccaggctcacccccacaaattcaagctctgggcccaccttagccccaggacagccccttcagactcaggtatatggcctaccctagcaccagtcctgccttaacggatgccaggctctaagttcacccttgcagactcaatcaacaggtccactccagtggatccaggccaaggctcactcacctgctaacccaggcattggaccagcctgcgtgaggaccccaatagcaagcctacctatggagcatgccagatgacgcccagaatctgcatgggcttattgatgaagggcttacccaggcgaagccattctacaaagaatagaataagtccctacttcccaaaatgtgcagacatcaacgtaaggcaacaacaacaacaacaacaacaaacatgaaaaaccaaggagacacaacaccaccaaaaaccacaataatctcccagcagcagactccaaagaaatggagataaacaaatggcccgataattcaaagtaagtgtttgaaggaagttcatgaacttcaagaaaatatagaaaaacaattcaataaaatcaggaaaacagtaaatgactgcaattagaaattccacagagaggtataaattattttttaaaaattctagaaactctggatgtggaaaacacaataaatgaaatgaaaaatgcagtagagagtgtcaactgcagaattgatgaaacagaatccgtgaacttaaagacaggttatttgaaaacatacagtcagaggagaaaaagagtaaacgggaatgaagaaagcttatgggatttgtgagataacaccaaaagatcaaatatttgagttacaggtattcaagaaggagaagagagaccaagggactgaaagcatatttaaataatatgagaaaacattccaattctggggaaatatataaatatctaggtacaggaagatcaaaagtctccgattagattgaatccaaataagactatactgagatatattataatcaaactgtcaaaaatcaaagacaaagaggatcttaaaagcagtgagagaaaagaagcaaatcacatataaaggagttacaggaaggtttatagcagacttctcagcagaaaccctataggcaagagagagtagaatgatatattcaaggtgctgaaggaaaaaaatggccaaccaagaatactgtacttggcaaagctgttcttcagaaatgaaggagaggaaaagaccttcctagccaaccaaaagctgagggattaatcaccaccagagctgtcctacaagaaattctaaagagagttcttcaagctgaaagaaaagaatgctaactagcaacatgaaaacatacaaaagtatagaactcactgataaaaataagtatacagtcaaattcagaataatactgtaatggtggtgtacaaatcacttaagtctttagcatgaaggtaaaaagagaaaactatcacagtgatagctatgaaatttcttaaataatagctacaacaaaaagatatgaattgtgacattaaagtttatgcgtggggtgggtggagtaaatgtgtagagattttaaaaatgtgatcaaagttaagctgttaccaacttagaaaagcttgctataactgtaagatatttttatgtaagcctcatggtaactacaaagcaaaaaccttagtagatatgccaaagatagaaagtaaggaatcaaagcatatcactagagaaaatcacccaatcataagggaagacagacacagaggatgaaaggaaaaaggacttagaaaataccagaaaacaatgaacaaaatggcattagtaagaccctgcctgtcaataattactgtgaatgtaaatggattacattttctaatcaaaagacagagtggctgaatggctgaaaaataggacccaactatatgctacctacaagagattcccttcacttttaaggacatagactgaaagcgaagggatgaaaaagatatttcatgcaaatgaagaccaaaagagagtagaagtgctatacttaaataaaatagacttcatgtcataaactgtaaaataaagtcattatacagtgataaaggggtcaattcatcaagaagatataataattataaatatgggctaaaaactggagaacctaagtatgtaaagcaaatattaatatgtctgaagaaagagagatggactgtaatgtagcagtaggggacttcaatacccactttcggcaatggacagatcattcagacagaaaatcaataaggaaacatcagtcttaaactatacttttagaccaaatggacataacagatatatacagaatataccatataatggtagcaaatacacattcttctgaaacacagagaacattctccaggatagatcacattatgccacaaaacacattaataaatttaagaagattcaaatcacattaagcatcttttctgaacatcctggtatgagactagaaattaataacaggaggaatttcagaaaattgacaaatatatggaaattgaacaacatgcttctgaaccaccaatatgtcaaagaagaaattaaaaagagaattaaaagatctcttgagataaataaaaataaaaacaaagcataccaaaacctatgggatgcagcagaagcaggtctaagagggatgtttatagtgataaatgcctacatcagaaaagaagaaagaatccaaataaacaacctaatattacacctcaaggtactataaaaagaactaactaagcctaaatctaataggaaagaaataataaagatcagaacagaaagagattacatcgaaactagaaaaacaatagaaaagatcaatggaactaagagtttgtttgttgaaatgataaacaaaattgaaaacctttagactaagaaaaaagagaaaagtcaagtggaatgagaaatgaaggaggaaacattacaacaaataccacagaaatgtaagggaccatgagactatgaacaattatatgccaaaaattggataacccagaagaaatggaaaatccctaagcatatgatacctaccaagaaaaattatggagaaacagaaaatctgaacagaccaataacaaatatggagatttgattagtaataaaaagtctcccataaaaagagttcaggacctgatggctttactgctgatcttacctaacatttaaagaaggactaatactcatccttctcaaactcttccaaaaaactgaagaagaggaatacttccacactcattttacgaggtcagcactaccgtgataccaaagctgacaaaggcactataagaaaagaaaattacaggccaaaatccctgatgaacatagatgcaaaaaccctcgaaagaataccagcagactgaattcaacagctcatgaaaaggatcattcaccacgatcaactgggatttatccctggtatgcaaggatggttcaatatatgcaactctattaatgtgatatgccacattgagggaaggataaaaaccatatatcatctcattagatgtataaaaaacatacaacaaaacacaacatcctctcataataaaaacactcaataaattagatatactgtagaagggatgtgcttcaacataataaagaccatatatgacaaactcacagataacatcatacgcaatggtgaaaagctgaaagcttttcctctaagatcaggaaccagataaggatgctaactctcgccacttctttcaacactgtattgcaaaacctagccagggcaattaggcaaaaggaagaaacaaaaggcatccaaattggaacaaaagaagttaaaattgtccctgtttgcagatgacatgatcttacatatagaatcctaaagatgccaccaaaaacactgttagagctaataaattcagtaaatttgcaggatacaaaatccacagacaaaaataaagagcatttttatacactgagaatgaactgtctgaaaaagaaatcagataataatcccatttatagtagctcaaaaaatataaaatacttaggactccatttgcccagggagcctggagaacatgtgagagctggagggcatgtttcccgatggctgttgataaatgttcattctcgtggtctgccctgctgcttgttaatcccaacaccaggaattggttgtgtttagcttgctgcatagcagacacctctgtgtggctggatccaacctcagaggtgtgtggagctctctctgtgaaacctttggtgtcctctgaggggtgtggacacaggtatagagcatctctacttccctagctcagaggcgaatggggttgtcacctgtctccctaacccaaggactgaggttttgccggagttagccggtgtagctgacatagacagcccgcgctctacgctgttccactcctcattccaccctgatcagacaaggttgagagcataagggctcttcacacctggcctcttacagcagcatgctctgtggtgtgggaatggcaggcctgatgaggagaagctgtggaggcagggctgggacacaggatgctggtgtcagaggagggggctcagctgcctgctgtacccaggcaagagcaggtccagcctcctggggcccgcctgcaggagcagcatggatggaggaggacctgagcgctcagctctgcttgtgctggggttgggcgggagagttgaagccggcgtgggcacatccctgtccttctgaggagagtggctattgtcatttgctggtctctcctgcagccttgcattagttagcaatgcttggcctttggaatgtcttgttcaccaggagtcctggcaccttctcctgtccctacatagcacaggatcccccagaccactcttttgtttggcccatgggaccgcgagtgcccttttcttcccacacattctgggcaggagcgcagtgaaggtcatttcacaatggcaggatacatttgcagcatggcccaaagcctgggcacgtcagaaatattgtatgttttccactgagagcaacagcaagacagatgcagggagaaaaacaaaacaaaaaacaaacaaaagctcccagggaattactgagatgacgagcgtgatgaggagggttcctgtcatcctttttgtacccagtggaggataacgtcagcatatgggcacagccgggctcgtgggggcacaggcagactgctcaccctatgcaatctaggcaggcggcgtgtgccagccaggccaggcatattgaggcactgctgctttaaaagtccagctcaacgagctcaggcagcatgtggtagatacacatatgtagtagaagttccaaaattattggtgatagtacattcatcgcctgcacctgctcactccattggatgcgggcagaggagctgggtgggaatgccttcctgcgggaggtgtgggtagaggggacagaggtgggatggcagggagggtcaggaataagcggagtccgtacgccaaactatggagtgggacaggaaggggcacctgagagcctcctaaattctcattaggaagttcagaaagagtccataatttctgtcaaaaccaccgacagtggctctgcctgagctcaaattctcactcttcctattaccagagtggcactgggcaagggtttgcagagtggatctctgtctcagctttagtacctgtgaaatgggtgtgtcccagcagcacttactcatagagcatcaagagggccaagtgcattcatgtacactgactcggagagtgcctggcacacacacagtgcccagtgcccggctgacttggagagtgcccagcccacaacagtgcccagtgcctggctgactcggagagttcctggcacacaacagtgcccagtgcccaccagctgtttgtctggattctctctaaatgtaggacgctgccaatactgagtcttgtgagtccggtgcacacttggattgcacctgtgcacgacacacattggacacaaaaacacacaggcaaacaagtgtgtgtgtaaacgcgcttgagagaattgaagagcatcagtccatgttggaaaatccaacgacatcgaatatagctatgaacatgtctttcaggcgttcttaaacgtgtgattgattaacgtgtgatctgatcttgatgcccgaaccctggaaatgttttaggagcaggacacagccctcctgaggaaaaggctcctacgctggctgcctttgggtttgcttctctgtgaggtggcgattctgaacgacgtggtgattctaggtctgtgctcacagtgtgttctgagacatgctgtcacccctctgcatttctggtgctcaggaggccattagggaggggctggtggctttgagtggcctgaggagtggtggtggcctgtctctgtggctgccacggcactgctgatcacctgcatgggcgtgtccactagggctgcgggtggggtgaggtccggtcattatgccattggcggccaacaccgttgatgattaaagcttccatcagggtgccgtggacatgctgtgaccccggcgggtggccacagcaaggtccctatgtccttgtcacctgcatgccattccctccaccatgggcagctgcagactccacgacgtggccagtcagagctcccgtccctgcggcaagcccctggttctactgagaagcctggttaccctctcagtggtggtctcagtggttttgctctgtctcctgccccgtcttggctacaagaggctgggctctgggacggatggcagacggtgtgaactgcagacggggcctgctcggtcactgctccctctcctcttgggggtctggggagctgcctgaggctcacagcctcggttcatttcccacataggagtttgtttacctgtgacggctgccgcctgactgaagtacttgcttggttttcttattgtggcgaatacaaaagcatggcatgaacgtaacaagaagtgttttttttcatgcgtgttgtcgaatgcgtcttcccctgacatcagcgctacctttcctcagttctcttctctcaagagtgttttcctcctgagagctgaggcccctgcatgtgggagcacgaggagggatcagccatctgtgtccggctgctgtgcgtgtgggagcatgaggagggacgagccgtctatgtcctgctgctgcgtgggagcacgaggagggaccaccgtctatatcccgctgctgtgtgggagcatgaggagggatgagccctctgtgtcccgctgctgtgtgtgggagcacagggagggacaagccatctgtgtccggctgctgtgtgtgtgggagcacgaggagggatcagctgtctgtccggctgctgtgtgtgggagcacgaggagggatgagccgtctgtgtctggctgctgcatgtgggagcacgaggagggatcagccgtctgtccggctgctgtgtgtggagcaccaggagggacgagccgtttgtgtctcgctgctgtgtgtgggagcacaaggagggatcagccgtctgtcctgctgctgtgctcacttcagcagtgctgtctccttcagaactcaacatgccctgcagagtaagtatggctgccacagctcacaaactcagccgcagcctcgaccccgctgctctgcccgcggcttcctggctgtggacatctgagccaggccagactcctgatctgcgtctcctagacccacacacctctgacgcatggccccgcagtacttctacattcactggcaagttcccacattgtgtagtcaaagacagttgcttcattatagagtttaacaataaaatactcttttttcatcttacttttgataagctactttcccaagacagacggaaaagaccagttactcaattgttggtttttatatcttgggtttactatgctgagtgacgatttgtctgaaaatagaaaggaaaaaaaaaaaaaaaggcagagccactcctgagacagttgggttcttagcggcaaaggaccctgttaacacaggctcagtttgacttgagttcagggcttctcaggagaggatcctgaggcctgactgtcccttctgggaacacagtgttctctaaccctagacaggaggccaggtctcttaagaggcagatttccatgcgacccaaaatgtctgggagacgatggctgggctttgagctgggagcctctggaaggagaaatggcttttgaccctgtaaatcctgctcctctggtgaccaaagtgagttatgcggggctcagagtagctgagactgttcacacctcaaaagaactagcagggtttattctggctttacccatggttgactcagacctttgtcaagaaacttcctttctaggagcatggatggggattttgggctctcctggctcctggactccttggggtttggggcgtggcaggaggtgggtgcaaagccagcaccaatgcaaagggccccaggcatgccacacacctgagcgtttgcacgggacgtggcaggaggggggtgcaaagccagcacaaatgcgcagggcaccacgcacaccacacacccgagcatttccatgcacctctgtgctcttagccagtctggatctgtgtcttcatagcagactgtgggcatatgacaatgtctcttatactgtaaagttacatgcaaatggctgtgcccatccgcttggattttggtgactatgttcttgatgaaaacacacaaagcatgcactcctggtattcctatttgcctttgttatttaggagtatgtgtatgactctactactgttttatatgcttttaaaccatacacaaaatgtatttgcttattttcatttttattttttgagacggagtcttgctctgtcacccagactggagtgcagtggcatgatcccagctcattgcaacctctgcctccccggttcaagtgattctcctgcctcactctcccaagcagctgggattataagcgcggctaacttttgtatttttagtagaggtggggttcactatgttgatcaggctggtcttgaactcctgatctcaagagatctgcccgactcggcctcccaaagtggtgggattagaggcgtgagccactgcgcccagccctcaagatttaaatggaagctgtgatgacgagcacatggctttgagcctgcaccacctctttagactctcgctagcctatgtttccagagcaccgtgtagccgtgggccggcgcagggcctggcgcctgttcacagcgtgctggttctgggcacagctgccgtgaggcctcccctcccgctttccatctttgtcatttcagtctcgggagaccttctatttctctactttagacagttgagctctctctgcaaacaacacttccattgttcaacatttgggaaaattttaaaattgataacacgttcctcagcaaaaaaggggtttaatgacggtggagaaactccacggccgcgtctctacgcagtgtcgggccgcacccgtccggctcccccaggctctctcggctcctcctttcatctcctggttctctctccatctgccctctccacccggtatctcagggctgctatgaaaggtcttcaaagacctagtttcaaaaaacatcccctggagaggaccaattaaacgcagaaggatggtttgtgtgcagaggctgagccgtcagagtagagatgatcctgcgttcccaggtagagccgcggctcctgccctcgtcgctgtccctccctgccggtgtcagaccaaagccagcgtccttaccgacccccaggcaggctctgccggcctcccctaggcagccatggcccccgacggggttagccaccttctcatggctgctgcctctcttcgcagcttcaggccggagaggacctgctttccgattgggcccgggaaaaccagatgtgcttgaaggctgtggatttaggatttggtgttccagatatggaagggacacaattcatattatgcggtctgtgaaacaatgatttgacaggccagttaaagcattagacgagtttaaactgcttgagagcaaactgctgtgtcttggtgcagtttgggggcagcggtggggcgtgggggccgccgcggggctctgtgggttcgggggcagcggtggggcgtgggggccgtccggggctctggattaagtgcacagacctcgactgtcttcacggaactaaggagacctttattttacctggcacaccgtggggtcaagtccacattgagaggtgataacgtgctagcagccctcgctcactctgggcgccttctctgcctcggtgtctgctctggccgggctcgaagagcccctcagcccgctgctgcactgtgggggcccctctctggggcttgctgaggccggagccggctccctctgcttgcggggaggtgtggagggagaagcgcggatgggagccggggctgcacacggggcttgtgggccggcgcaggttccgggtgggcacgggcttagcgggcctggcactccgtgggactggccggcacctgctgggcttgattggaggctggatcccgtgagaggactgccattccctcttccctgggtcgttggccatgatggtgggtctctgtctctttctcgcttcccctctttttctcttggttgtctgggacgagctcccattgggctgcctggagtgcccgggctaggggccacaaagtcctgcagcgagtaccagtgagaggtgaagctggctgggctgctgggagggtggggacttggagaagttttctgtctagctaaaggattgtaaatgcacccatcagtgctctgtgtctagctaaaggattgtaaatgcacaaatcagcactctgtgtctagctaaaggtttgtaaatgcaccaaccagcactctgtcaaaacggaccagttagcctctgtaaaatggaccaatcaactctctgtaaaatggaccaatcagcaggatgtaggtgcggccagatatggggataaaagcaggctgccagagccagcagcagcaaaccggttgggtcccattccacagtgtggagggtttgtttttttgctgttcacagtaagttttgctggtgctcactctttgggtcctcactacgtctgtgagctgtaacactcacctcgaaggtctgcagcttcactcctgaggccagtgagaccacaaatccaccacgaggaatgaacaactccggatatgctacctttatgagctgtaacactcactgtgagggtcttcagcttcactcttgaagccatagagaccacgaacccactgggaggaatgaacaattctggatgcgctgtgtttatgagctgtgacacccactgcaaaggtctgcagcttcactcctgaagtcagggagaccatgaacccaccggaagaaagaaactctggacacacctgaaggaacaaactctggacacaccatctttaaaaactgtaacactcaccgcgagggtccgcggcttcattcttgaagtcagcgagaccaagaacccaccaattccggacacaacatgtccatctacatcaggaagttgtgggttctgggcttattggtttgtattgattgttggtttcgagagagaatttcagtttgttgcccaaatggtgcgatctcagctcactgctaccggttcgagcaattctcctgctgcagcctcccacgtagctgggattacaggcgcccaccttcacccgcagcctcccgcgtagctgggattacaggtgcccaccttcacgtccagctgaatttttttttttttttgtattttagtagagacggggtttcatcatgttgcacaggctggtcttgggatttgaccttgtttcctcctccctggggtcagaggtcccctggcaggtggtgggtggtccctgcattcgattcccatttccctgtccactgggaagtgtattctggaaggaagttcctacatccttctggctctaggaatgttctagacatgttacgtgctgaggctggtggggcaggctcaggcctcctgcagacgcctgttttctcataggagccatacttggtccccggccaccccgggccttggatctgatgattctctgggtgtgtcagacaaggacctggcctccctgttatgtgctggaggtcagggaggtcaggagcagggctggcacctctaactcccatcccccccttgtgtgcctggtggtcctgcccggctgagagcctttctcttagactctgccgcagccgtgatgccagacaggagaagccagggagggcatgggctgctccctgaaggcggattcctctccccaggtgggaggaggagcctctgtagctgccctgggctgctcctctttcccagggtggcctgaccacaaccccggccgggcaagggagtagggaggaccgtacagagtttctcttccccagctcattgttttggagacagacttggaggcaaggccagagctatatgtcccagcccctgcgtgtgcacctcgtgcagcagtgtggcaaggccctgacagtgccttcaaggggtgcttctggcaggcctcgggagctgtgtgatgaggaggagacttgggagagcgcgggttaggtcctggcactgtagccgcctcctcttgctgatttcaggggtcagtgttttcagggttcatctcctttatagggcagacttgagggcttcaggtacaaacgtccgtgtctccatcaggcctgggcccggcctcctccgtctggagcacattcctctgtggtcttcagcattggtgcccgtggagtggctgaagccctgactgcccgttgtggctgaggtgtgggaccgaatggcgaacagagtgggcaggaccccgaggaggctggaggccgattcgcacaggctgccgtcatctcaccgctctgacagttcttaaagcaacagtgcaagagaaatccactgcgacgtgagaagagcatgtttatgtgcacgtgtatgtgcgcgtgtgtgcgtgtgcgggcacgtgtgtgtgtgtgtgcacgtgtgtgagaggatggcttctgacgaaggggctgttcatggagctctgatcagccactcttgcccgtggggatcttgcagggtccgaccagtcagtgccccccaccccaccctgttagaggggacggagcccggtcctcaccccgctgtgggctgcctgagagtttggcttctccctccagagctgatagacagcacctgagcatatggccccctcggccccagctcacagtggcatgcctcgcaccctccgcccctgcctccactacgaggaggccgcccgcacacctggggaggcatatcctgccagctgagcgtccccaggccgacgtccttcccagccatggcatcagggccccgcagcagctggtgtcatagcacccacatccatcagcttccctggagcccctggcacagtgctgtgtgggcctggaaacgctggaagcatggtttcatccctcaggaagctggtggttaataaatggggccaagttaataaagaaggaagctaccaacaaggccatgcggtcaccacgactgcccagggccagggtgtgggggtgctgccttacagcctgtcggggccggggtgtgggggtgctgccttacagcctgtcggggccggggtgtgggggtgatacattacagcctgttggggccggggtgtgggggtgctgccttacagcctgtcggggccggggtgtggggggtgatacagcctgttggggccggggtgtgggggtgctgccttacagcctgtcggggccggggtgcgggggtgatacattacagcctgtcggggccggggtgtgggggtgctgccttacagcctgttggggccagagtgtgggggtgctaccaggaccgggatgtgggggtgctaccttacagcctgccggggccagggcaggagctgtgcttcaagggcagagaggctttccaggtggacaagggacgaacacttggggagggagggaaggttcagatggaagaggaagctgagaggagacgcacccctggaggcagctggctgaccggtgggctcccaggagactgtaggatttgtgcagataaaagtcaggcagcagagtcagagggcagccatagcacgtgtaaggcggcggggatgctgacagcaagacgttttctggagaatctgggttttactgcaaatacaaattcactgttctcaggatggcggagggaccagctccttgggaaggtcacccccttggccacctgttgtccctgaggggctgatggagggaggaggccaccttatgaactgcaccaggtccgtggctttggcggtggaggccccatcactgcaactcttcttctgggagttcggctctgcctgccacacgtggaggtgcgcagggtgggggccagccctggcaaacccaccccacataacgtagtacctcgattctcaccaaagaacaaaaattacttgcgattacgtgcaattagcaattttaaattattaatggtggtgaaagaatgtgtctattcaacaagtaatttattgcaatttttgtaattgaaagtaatttctagcaattaaatcctaatttagagcattttctgggcgacgcctttattcatggggtgcacgccagttttattgttggctgctttgttccaggcactttgtccagtaaaatttgctgggtaggctctttgggaagagaaaaatagccgaactctaggcaatgtagaaaaaacagagtgggtctgccagcacagtgaagctgtggcttccctggagaggcgtgaggaggtgcgcgccttcccatggagacagccctgcagcttgttcagaggccctccgaggaagtgggcaggcacctgggccaacgtccagggagcacgtctctgtggccccgaggcgctgtccccactgtccccacagccacggtgctgtccctgctggaggctggtccaggcttggccactggcttgagctcttccccggggctcctcggcactgctgccggcccctggggacttcattgttctgtctcctctttcctggtaagaacaccctttaccctcagaaggcagctttttgaaccccacaatcagaaagtgctccctattttggggggagacaggactctgctacgccccaggagttgatctgtggtggatttgaatataaaaggcagccaggagatggtctttgtcgagatcttatccctgatgaagtctcttctttgtcaagtagcaaataaatattcggaatgaattcttcagaaacaaaatgacctgtgtttctatgtgaaatgcaaccacgttctcctccagaaagctgcagtcaggctccctgtgtgtggccacagcgtgattcctggtcatggggtgactccccccgtagggtacctgagcccctctgggccccacacctcaaatgcagatgcagtaatgtcgtcccaggcagcaggaagccacgcggcccctccacacatttccacagcgttcccaggaaggctgctgacaagctgggccgagcgcctcgggctcgtccacacacgctagatcccggagtgtgagggtgtctgtggctccccctgtgcctgcggctcccccgtgcctgtggctccccctgtgcctgcggctcctcgtgtgtctcctcctgtgtctgcggctccccgtgtctgcggctcctcccatgtctgtctgcggctccccctgtgcctgtggctccccctgtgcctgcggctccccctgtgtctgcggctccccctgtgtctgtggctctcccgcgtctgcggctccccctgtggctgcggctccttgtgtgtctcctcctgtgtctgcgtctccccctgtgtctgcggctccccgtgtctgcggctcccgtgtctgtggctcctcccatgtctgtctgcggctccccctgtgtctgcggctcctcgtgtgtctcctcctgtgtctgcggctccccctgtgtctgcggctccctgtgtctgcggctccccgtgtctgcggctcctcccatgtctgtctgcagctccccctgtgtctgcggctccccctgtgcctgcggctcctcgtgtgtctcctcctgtgtctgcggctccccctgtgtctgcggctccctgtgtctgcggctccctgtgtctgcggctcctcccatgtctgtctgcagctccccctgtgtctgcggctccccctgtgtctgcggctcctcccgcgtctgtctgcggctcctcctgcgtctgcggctcctcgtgtgtctcctcctgtgtctgcggctccccctgtgtctgcggctcccccatgcctgcggctccccctgtgtctgcggctccccgtgtctgcggctcctcccatgtctgtctgtggctccccctgtgtctgcggctccttgtgtgtctcctcctgtgtctgcagctccccctgtgtctgcggctccctgtgtctgcggctcctcccgtgtctgcggctcctcccatgtctgtctgcggctcccccatgcctgcggctccccgtgtctgcggctcctcccatgtctgtctgcggctccccctgtgcctgcggctccccctgtgtctgcggctccccgtgtctgcggctcctcccatgtctgtctgcggctccccctgtgcctgcggctccccctgtgcctgcggctccccctgcgtctgcggctcctcccgcgtctgtctgcggctcctcccgcgtctgtctgcggctcctcccgtgtctgcatccacgacgctgggacagggctgcaggcagtgcttctgcccttggttctgcatctcctggcctccccagcaggcaaggagctcacagtgtgggcttgcggtgggtgctcactggccataaacgttcggtgtcattttcaagacagagaaacagcacacgcagggccctggagaggctgcctggagctccacgtgccctgtcctaggagggttcctcccctgcgagctcactcccgaagggcactcgaatcctgcagctggggcctgagtcctctctccccttcgtcccacagccctgggtcttgtcttccttgtggctggagttgcagctacagcacagagctcttcccctttacattctgagctgtttggaggcccatggccactttcatattccctgatgctcaataaatgatgaatgagtgaaacgagagtcccaaaccgtgggactgtcagcagagtctgcatgcaccgggctggggggcaacacagccaagccccatcagctattgactgtagcttcctcctggtcattcctgatccttccatccactcagccttcccacctctccttctgccggcggcacctccccgatggccctcacacctatgaggccctggtttcacctcactctgcagtctggtgaaagggatctggcagatgcgactgtctccatcctgagggcttatcccggcagtggcgctgagacctcccctcacctggtgctccgagatttgactctgtgaggttggctcctgcctggactcaggctttcaaccctggtgtctggggtgcaaggcaggtgggccgcgtgcggtgtctttgaggtgggctgccgttctggtagagagtgaggggatgtggaagttccatgcagactgtattttctgggcaaacctgctcagtgtttttggtaagtaatgcctaaaattcaggactctaattgaaggtatatccctacttctgactcaaaccacttgaaaaactcagtcaatagacagtgacgttgggacccaagtctttaaagctctgctgcaattctcatccttgaccgttggtaccgggcagttgcaaaaggctgagcaagtacagcccaggcagggagaccacagggcctgcccgggccccggagacgcggctctccgaagacaagacgtcccggggggctgtttttccatttggaccagttccacttggcttgagatgggcttcactctagaccctcctctgccagctcagcacgaagtgtgcatagtcacctgatggcaccctgtgatcattttcacgttgtaggaggaaaaatcgttttaaaattggcttaaatgaggagggaacaacctgaccgtcttttgatggtgcagcttttaaccctaaaagaatgtcaaacgaattcatttttgtatataagtacaaattacttattagtcacaattgccatagcgactgaaggtttgtgtccgcctaccccacgcctccagttcctacatggaaatcctcacccaaggccatggtgttaggggcctttgcaaggcgctgaggccctgaggaagagcctcacggatgggctaatgcgcttctgaaagaggcctcaggacgcttcttcaccccttctgctgtgagatgacaggggaaggcccaaccaaaaagtgggcgctcaccgacaccgaatctgtgggtatctccagaactgtgagaaagaaacctctgttgtttatcaattacccaagctatggtattttcttatagcagcctgcatgggctgagacacctatcaagtgagttattaacgtttattaaaatttggcacaaactaaaagccagcagtgtctgcagagaagctggattgccccatggggcttggctgtgttgcccccgtcccgtgcatgtggactctgctgagagtcccacagttttgggaaggaccctgatgaattgtgaccattggtattgcttagcgttgattgtggcttttcattataaattatgtaattgaatactttaatgataagttgtggctagtccagcttcaacagtatggatctgccgattgtcggatattcagttaattatgcagtgtgtggagaggatatatgtgcatcaaaagcatttaatccaagaattccagtgactgggtgtcatttggtgttttgcggctgaccgctgcattcacaacacaagagaagcagcacgtgacctctcctggccacccactagagtcgaattttgtttccatcccacagttactccctctggcacaccccaggtggagggggtggtccaggtggagggggcagcccaggtggagggggtcgtccaggtggagggggtggcccaggttggggggaggcccaggtggagggggccgtccaggtggaggggtggtccaggtggatggggaggcccaggtggagggggtggtccaggtggaggggtggtccaggtgggggggtggtccaggtggggggggtggtccaggtggggggggtggtccaggtggagggggtcatccaggtggagggggcggtccaggtgggggggcggtccaggtgagggggtcatccaggtggagggggcggtccaggtgagggggtggtccaggtggaggggtggtccaggtggacggggtggtccaggtggagaagacggctcaggtagagaaggcaccccagggagaggggcagcccagtagaggggtggcccagcaagctcccagggagagggacagccaggtaaaggggttggcccttctgcagctaacagtggtcgaaaccttcccttattactgccctgaaaggactcagtttcccctggggtgttcagccctcaattgtgatagcagcacccactgcagggggcctggcctggtcataggcagagggagccagggggtcgggggcacgttatggccagtgagtgaggctcatctgtctccggtaggatcaccctctgtgaaggtagcagcttgcaccttgttgaccagtcaccagtgacatggagtggggccaaggaggcgtcctcaccccgagaaccatgcctgtgctcccagtgcccccgcctggctcccgctctgcacctataaagctggcctttgtgctggcccttctgccttctggccatgacttgccttgctgacctgcccttggccggtggagccttccaggcagcctctgcccacggggctctccaggccctgagtcactgctggcctgaccagttcaggtgtcctggcttttgctgtggggcgtctgtcctgggtctcctgatggtccagctctgggctcccctccacagtgagcagcccctcctgcaaaagctctggttggggcacatccaaggtcagaagaggcagattgcaggtcaggcagagagtggacgggcaactgctgggactctgtctctgctgttctctggctatctctgtctctgattctttctctctgtctccctgtgtctctctatctctgtctctctgtttctctgtctctatgtctctgtctctctgtctctctctgtctctttctgtctctctctgtctctgtgtctccgactccctatccctctgtctctttctatctctgtctctgtccctctcctgctccctttgtctctctctctgtctctgttcctctgtctctgtctctctctgtctctgtctctctgtttctgtctcttggtcccagccgtcagctgactttgctgtcctcctgggccctggcagaaccacctggcaggctcccgtcctgtgccatcctggacccttcaccattgttcctactctggctcagagcactttcttcttgaagcatcctttacccaccccagggacttgaaaactggatttgaaaatgccaaatagttttaaaattagagctgcagaatgtcttccccagagcccagacttcccaggtgtctgggaagcaaagacagccagcctgggctgcaggtatgccccggggactgggcacaggatggcagctgctcacatttattggcagcaaaggtcaaagcagaaaccaggtgtgatgacggggatggccgcgcctcctgaggctggtgtttgggcctttctgcaccaggcatggccttggcattcagggttacactgctaggtgagggccgtctccttgttctccttccatagatgaggagacgaggtttggcgatgggagggagcatctggggcggggtcgggcaggggctcctaggaggcccctttggggcattttccctgaaggccactccaacagaaggtgggggtgaccggaggcaacagtggcgactcctgaggggccttggagctcctcctgtgctcctccgttcaaagttgggcagcagccgccacgtccttcctagaaaacaaagccggggaggttcagtgtgtgcgttcaaaaagctgcgattttcaggcccggcaacggctttcaacaacaatgtggctgcgatatttcacacccgccctgtgtgcacgcggctgggatatttcacaccccactctgtgtgcgtgcggctgggatatttcacacccgccctgtgtgtgtgcggctgggatatttcacacccaccctgtgtgcgtgcggctgggatatttcacacccgccctgtgtgtgtgcggctgggatatttcacacccgccctgtgtgcggctgggctgggatatttcacaccctctctgtgtgcggctgggctgggatatttcacaccctctctgtgtgcacacggctgggatatttcacacccgccctgtgtgtgtgcggctgggatatttcacacccgccctgtgtgcctgcggctgggatatttcacacccgccctgtgtgcgtgcggctgggatattacacacccgccctgtgtgcgtgtggctgggatatttcacacccgccctgtttgtggctgggctgggatatttcacacccaccctgtgtgtgtgcagctgggatatttcacacctgccctgtgtgcatgcggctgggatattacacactcgccctgtgtgcgtgcggctgggatatttcacaccccactctgtgtgcgtgcagctgggatatttcacacccgccctgtgtgcgtgcggctgggatatttcacacccgccccgtgtgcacgcgtctgggctgggatatttcacaccccgctctgtgtgtgtgcggctgggatatctcacaccccgctctgtgtgcgtgcggccgcggctctgatgcttttgcaggcggcattgtgtcactgattcacttaggggctctctaattagctggcggctcaatgagctgtgattgcaggtgagacacagacttgttgacggtgctgaggatctcgtgccttgaagagcgctcaaatgggctgtcacaccacgagggtgaaacagttacccaaatacagtcactggggcagcatctctgtgcacataacccagtgtgcgtttaaatggcaagctgggaagagtcaactgcatcagcttctctctaaattacgggctggaggtggcagggaggtgaggtgaaggaggtaggaaacagtgttcctaagtccgtggtcacagctggtcacgtggagagatgcccagagctcttgctgtagagtcaggaagaacagaagctcagcctggcatagaggttgggttttttgctgcccttggtttgtacacagcactaaaaatgtttctgagtttaatctacttaaatgatggaaggatatgagagaggtgagagagaaggcctgcagaagcttaggctgtgcccacaacggctctaaccaggagctctcaggggcgaggggcaggcccccaggccacggtgatcccgctcagatgctcagtcacccccgtgtaagggttcccactgccacctccttgaggtggaaggtggggtgtggagcccacgtccatcatctccctgaattcctatcgctttgacacctggaattcctctgtgctgcaggcagggtctgggcgttgtccacaatcaacactcacacaaaaacatgctccctggcttccaggcggctccagatggagagagcacacaccctccccagtgtcccttctaacaaggttgctgtgagcaccacgcccccggggttccccgcgggaaccagctctgccgggccagccggtcaactccagcacccagcacccatcatcccgtgtgctcacagtgcctcgctgctcggctaacaagcaggttggcaggtcccttttcctgactggctccttcctgattaagcagcttttaaaattccacgcaaagtgtcaacatttctagatctcttaaatgcaagagcttcccgagtgccaggcgggacctgccgcgggtgtggggctgtctgaggtgccagtcactggagacgacgctgcagatgaggcacctcccctgcagcttccccgccctttagtgacacggaaagtggaagccagacatcttggatgtagacgtgggagggagctggggtggaggcagctgggccaccccaccacccctgaaggccggccccacagcggcatctgaaccaccagccagggccactggagcccactttcctgtttgtgcagccaatggatgaagttttaaaaatttggcatatttgaactccattttttaatggggtcaggcaatgtactttgaattatttatcagactgaattcaatcttcaaaaattacagaactctcatctctctgcccaggttaaagccgggaagtggctctcgtctctctgcccaggttaagccgggaagtggccgttgtgcctgtcctgaggccgctgctgctgggtccctctgtcaggctgttcctcagttcacggaattcaggcctgatgctcacagccacactggccccggctctttctgccagacatcacaccgcagcagacaccgtccccagcctcactgccagacatcacactgcagcggacaccgtccccagcttcactgccagacaacaccccgcagcagacaccatccccagcctcactgccagacaataccccgcagcagacaccgtccccagcctcactgccagacaataccccgcagcagacgccgtccccagcctcactgccagacaataccccgcagcagacgccgtccccagcctcactgccagacaataccccgcagcagacgccgtccccagcctcactgccagacaataccccgcagcagacgccgtccccagcctcactgccagacaataccccgcagcagacgccgtccccagcctcactgccagacaataccccgcagcagacgccgtccccagcctcactgccagacaataccccgcagcagacgccgtccccagcctcactgccagacaataccccgcagcagacgccgtccccagcctcactgccagacatcacaccgcagcagacactgtccccactggtcctccagaccaggggtccccaacccctggggaggcgaaggagccctgcgcctctgtggggtctgagcatgctagagagagaagctgggcaaacagatggggtggacgcagcccccacgcagactctgattctgtgttccatggcggggctctgtgggcctccacccaaaggcagggctgaagctcctgctgatggggagccaggcggcctctggccaccgcctttgatgtgtgcctggaccatgtcctcatggtgcctctgctcattcatttccagctgtactcatcaaatgccacgctgtgtacccggggctgtgctgctgggcagcctcacacagttctgccaggcctcctgctgaggcacttctctgagggctggtgatagactgatgatggcaccaggtgatcccttcacccagagtctgggaccaaacagaaatgtgcagagggcagcctggcaagggggctgtgcagagggtggacatggggggatatatgcacctgtgggtgggtgcctgcaggtgggtgcctacctccaggtgtgtcccgtcggtgtgtacctgcctgcaggtgtgcccacaggtgtgtgcccacaggtgtgtgcccgcaggtgggtgcctgcctgcaagtatgtgcccataggtatgtacctgcctgcaggtgtgcatccacaagtgtgcccctgcaggtgtgtgcctgcaggtatgtgctcgtgtctgtgtcaggggcctctggggaccactctgagccacatgggggtgtttccagcaccaggagcatagtggatggcaggtggggagccaggtcagtgggaggccactaccgagaggccttgctagtttctgagcaagtcactgctccaccgggccaggggcctgcggaacacatacgaagcatgcactaccttgggggctgggaggtagcctacctggagcagatagaaagtgacctgggggaatgtcaccaggcttgggggctgtggggcctggagtaggagagcccatggccaggagggctgttgtgaacaggcggacctcgactgctctagcaggtgagggtcagggggctcttcgtgtaaaggcagaaaagggagggaagaggaggaggaccccaaaactccatgggacagctcctcccgggcatcaaggaaagtgccagcaaggaccagggaccccacgtgagaagcagcatcgctgttctggaaccctaccaggaacaagaaggtgcaagctggcttttcggaatggggcagttttcagtgcacacttgaggcagtcctggagcctgggcatggaggaagagcattaggagagagcccacggctcctggctcccggcctttggtccccgcaagggacctgagaccatttggagtctcgaggtgaatctggggcagtgagtctcttcctagactgttgcaagggccatctcgatggtccccactgtcacctgctgccaccggctgctgcaggtacccatgcacatgtcacgtgtggcccatggcgatctgtcgtatggacaggagtgtggcttaggcggtgaacttcaggctgtgtgtgtccagcatgtaggaagagctcagcacgatctttggaccgtgtgtgtccagcacgcaggaagagctcagcaaactgccctgggaagctaccttcactccacggtgctttgagtggtaaatgattgtctaacttgagatgtcagtgtgccagcgtctcagtgcagttccatctggatatgtattttatttcccctactgaattgcatggttttatttctaccacgacattttcaggcggtcgttaccaactctaaacagaggctcattctgcctgacgcgctgctgcggctgttcgttagggacaatgttatcagcaagccttgactagaaggtgaggaggcttggactttcaccatgtgacctccttctaaataataaccgtttgccgctccaaagtcctgcactggaagatgaaggtgggaagcgtgagagtggcaggggtagagttggacttgaatttagggagcccagtggctctagatgaagttggtcagctggcccacatcaccgtggagtttgctgagtgacgcgggtgttcagccacctccgctgggtgcagggtgtgctagggaggtgctgctctctggctcggccgtcattgcagccttgctttcacattttcaagtgcctctcactcagtgtcccatgcagggaggtgtccacaactggcaggaggttctccccaggtgccacgggtgctttggaggggtccctggtgggaaaagggccgttgaggtgctgggcgcccacccatggctgtgccttccccttagccagcaggccacagaagccaggagctggaatgcccgggagaggaatttggaagtagaccctcacccagcacccagaggctctgtggcagagcgatgggaaatacacaaacaacggtggggcaaagtcctccagagcaagctgagcagatgctgatgggcctgccccaaacccaggcagcatggggtgaggaagcccctcctgtgggatgcggtcgggagaagatggctgtgtgtgtgtgcctgtgtgtgtgtgcatgtgtttgtgcattgtggatgaatgtggatgtgcacgtgtgtgtacagtgtgcatgtgtgtgctcatatgtgtacacatgtacatgtgcagtaggtacagctgtgtgtacacccacacacggtgtgcacatgtgactgtgagtgcaacacgtgcagtgcatgcacaagtgtgtaaatgcatgcatacagtaggcacatgcgggtgcacacaggtaccgcatgtgcagtgtgtgtgaatgtgtgtgcagtgtgtgtgaatgtgtgactgtgtgcagtgtgtgaatgtgtgtatatgtgtatgtgtgtgcagtgtgtgtgtgcagtgtgtgaatgtgtgtggtgtgtgtgatgtgtgtgtgcaatgtgaatgtatatgtgcattttgtgaatatgtatgtgtgcactgtgtgtgaatgtgtgtgtgcaatgtgtgtgaatctgtatgtgtgcagtgtgtgaatgtgtgtatgtgtgtgaatgtgtgtgtgcagtgtgtgaatgtgtgtgcagtgtgaatgtttgcagtgtgtgtgaatgtatgtgtgtgcagtgtgtgaatgtgtgtgaatgtatgtatgtgtgtgtagtgtgtgaatgtgtgcagtgtgaatgtgtgtagtgtgtgaatgtgtatgtgtgtagtgtgtgtgaatgtgtgtgtgcagtgtgtgtatatgtgcagtgtgtgaatgtatgtgtgcgcaatgtgtgtgaatctgtgcagtgtgtgtgaatgtgtgtatgtgtgaatgtgcgtgcagtgtgtcagtgtgtgcagtgaatgtttgcagtgtgaatgtatgtgtgtgtgcagtgtgtgtgaatgtgtgtgaatgtgtgtgctgtgtgtgaatgtgtgtgtagtgtgtgcagtgtgtgaatgtgtgtatgtgtgcagtgtgtgaatgtgtgtgcagtgtgtgtgcatgtatgtgtgtgcagcgtgaatgtttgcagtgtgtgaatctgcgtgtgcagtgtgtgtgaatgtgtgtatgtgtgtgaatgtatgtatgtgtgtgtgcagtgtgtgtgaatgtgtgtatgtgtgtgcagtgaatgtttgcagtgtgtgtgaatatgtgtgcagtgtgtgtgaatgtgtgtgcagtgtgtgaatgtgtgtgcggtgtgtgtgaatgtgtgtatatgtgttgcagtgtgcatctgtgagtgtgagtgcctgtgtgtccatgcaagtgtgtatgcttgtgtctgtgtttacatcaggaaagcaggggagggaggcaggagtgaaccggggaggcctcagactttggggcagtcactgtggcctcgagggtgtgacccttaacatcccctgctggacgtaggagctcttcgtgctctgggaaccgtaggtggcctccgtgctgcagccactggcacctgggaaccaggggctcagggcggctgtggcccctcctgttgtcacagtcaccgcgggaggaggggcagaagtacggcgcagccaccacgggctttagggccaagtgagctcctagattcctccctcctgagcactaactgtgtggggaattagcttctcctgaaataacgggaagccccgtcagaatattcgaaatgcaacagacacaggtttcctaaaatcgtccgtagtgcctggagctcaggttctgagggtggctcatggcggtgccctgaagaggcttctgcatggcgtcttccacagagctgctgtgtcctggcggtgtgcatgcccagacagggacccatgtgtgctggggggagcctgcggtcccggagtgcaccctgctgttttatcctcttcgtgtgctctatggagtggacgtccacattctggctcaggatgggtggctggagtcccccaggcaccaagcctctgtctctaactggcaggggagccatcccttcccttctcacctgtgcaggacagggctcagtttgcagggagtcgctgggccctgaagcccttccttggcccatcgctgcctgtgagcccctgaggcttgggctgggtccctgccaggatcacacagttgggaatctggggaagggattgtgtctcacaagttcgtgtgctttattatttcccaggggctgttacctccctccccctgactccttgccctgtccaagctccatgtggcctggtgctcccatctttccgggagcttcttcccgctgcccggcctgcttgtctgcatgcaggccgaccctggcctctgccacctgctctctgagctgcccgtaggcagggtcttccaccttccaccatgtcctggggtgcgctgggaaagagctcgggatgggcactgttgctgacgctgacacagactcagccagtcggagcctcacgccccccttgctggataccccaggtcccatcacagtgcagcttctcagaggagtcactgtatctattgtgcccagacctcctacaagtggctctgagggctgagctgaccctggagggacaggccccctcctgcccgtctgcctcctctctcctcccctgtctctcctgagacattaggagctcacactcctgcctgaggacctgccagagtggcagggcatgctgggtcccggcctgtgcgactgatcagctttctctcctggcttctgggtcaggaggaaggagccgtctctgccagtcttccccttgtgtaggcgtggcagcgagggtgttttctggaaatgccagcctgaggcttggggtcttgccatcttcagccccacggagcgctagtggcaacagccagtttgtgtttgtgtgtgggtgtgttatgtggacggggattttaaccttactatcagcattagaatgtccgtaggataaatgtcatggttgttttgcttttgttttggggtattgtgggagtgcatactttggattctataggccctctgggctttattcaaatagactctttttctaggccttctgaagaagtcgtatccggttgtgtctctgcttctgttaaccatgatttatgaatgcatgcattactatacattactgacaaattatttataaagcaaacttttgtgtataaagtcttatttccccatggaattatttaataacatttgagctgtgtgctgagaaggtgtttttgcaggcactgatatgaaagcttttgtcaagctagctgacttgggaaggcagcctagggcggcatcctggcctgagagtcctcagcattgctaattggctttgctttgtcgtgttttaggcagcctggtgactgtactgatgtgcttctccaaaccccacagagagacagcaggcatcttgtctgctaggcatgcaggcgttctggttctcatgtgcagaatatgcacacagacgtgcacgcacatacacacaaatatgtgcatgcacacacatgtacacacaaacgcacatacatgtacaccagggacacatggacacacaaacacattcacatatgtgtacacaaagggacgcgtggacaaatacatatgtgtataccagagacacatggacacagaaacacatgcacatatgtgtactcatggacacatggacacacaaacgcacatacatgtacaccagggacacatggacacacaaacacattcacatatgtgtacacaaagggacacgtggacaaatacgtgtataccagagacacatggacacaaacacatgcacatatgtgtactcatggacacatggacacacaaacacacatacctgtacacccgggacacaaggacacacaaacacatgcatatatacatgtacacacagggacacatggacacagccatgctgctccctggtgaggagtgggagcaggtgggatccccgggaagagtgagtcccactcttgggctcttgttataaatccacctttggcagacacgccctcctctaatttcccaaggaacatgccagccgttggtgccgacggtctttggtggagcctccagagcctcctttaggcttttcccaggggctctgaggggtgtctgtgatgtcactcttccctgcagcacagcagcagctgcgggttgtgacgtgggatgagaggccgcttgccctgcccggaagggtggctctgtgccctgcatgggccacctgcttccctggctcttctccgtgtcctgcgtggcctgcctgctcccatggcccttctctgtggcctgtgcctgtggccctttagcattgtgttggttatcaaactgccatttgtcatttatttgtgcatctgccttgagcaaccttccacttccggtgtctagaagttctgctccttgtcactccatttggaaactgagctctcactcaagagacgtttgcagcatcaggcagcagaggcatcaggggtcctcacggggacatgcacaaggggtttcacaggcgttgctggtgctgctgcctcaacccgtcctgctcctgcttcctgcctccctgtaccgacgctgcacctccctcaccccactctggatcctttagttgaaatcaactcttccacattcgtctcctagccggtgtgtctacccagcacgaccacgcagtgcaggcctcgtggacagacctcgcgtggctgcaggagacttctggcttcctgggaccttgtgaaaccagatccccaaatgttcctccctaaagcttaacaatatgaacaacaaataggccaaaacaaacagatacagaagcaacaaggaaaaccctggatgccattccagcagagccaacggctggtggttgctgaaaaagcaagagaatccaccttccaggaaaggcttcagggaaggccctgaaacctctgaaatctcccccaaagctgtgactggggggcaggggaggagacacagacccttccacagaggtggtatctgatgtggtcgcccccatcctaccagaggctggatgcagaggatcagcagggcggccacccaggcagctccctccgtggagaagcacatgcacatggagtgcgtactcacagggtcgtctcgcggcgattcatagaaatttaaattaaatgcagacaacagaaaagacaagaacttaagaactggagcaggaaggaggctgatgatagcagagtgtgagacgcaccagagccctttccacgccagtcgcgcagggcaggggctgcacgtggagatgccgggggaggcgtcagcggctgattcaggacggcctgtgttcaccctggagcaggctctgcagcagacagagcggaggaaatgtggtgtgtggacgtcgggaatgctccaggagaaatcccaggtgagaaggagccggggcagccatgctgtgagctgttcttacgtgcccgcttggagattagttctatttgggtctcttaaactgtcaggctcccgcccagttatcttacctgaagcagagtaggattcaggctgcaaagtgaaaactgcctctcaagaaagccttaggtaaaaaagaatggatagaaggtagctatgatgagacccatcccactctcagctcatgtgatgagctgaggcagcgctcagaggaagagctgctgtcaccgcgaagccagggtactgtcagctgacagcaaggagcccagcaggggagggcatgggctgtggccctcaccagctcctctgcaggcgggctcacccctggcacgcacgccatccctgtgattctcatcatcagggcagttccaggtcagcgccgtggggctgggcgggggcagtcaccgccgcaggtcttggtcagtcctccaggagcggagctgcagggttggatcctttgtacagtgggtgagacccaggctgagcgaagtgggcttgaagcctgggggctcagacatttctcgctgctgcacgcttgctcacccaactgggggctcggggtcgtccagcaccacagtcctcttatcctatgattcccagagcttgagggccccccagaaggaagagcagagttccagattgaatacaggatgcctgactggattcgaatgtcagagtaacaagaaaaagacgtttagcgcacgtacagcaggtcctcaaatcacgccatctcattgtaacgctgaggagaaaagaatcagccaaatctgggatgtagactctctgaacatttggttcctgtgtaagtttttatttaaaggaaggatcctaccccagaaacacgccacaggtttctgtgatcaaacctgaggggtcgggttccgcgtctgactgcgtcctgagcagccgtgtgcccgggtctctccacacgctggtccagggcaaaccccgcctgctgacctgggtggtagacagaggatactcgaaacctctttgagcatgattctggttgtccgggtccctcattcaactccatttcaacccagatcccagggaaagcagggatctgactgggctctcagtctgccttagcaggttgtctcatgcctgttccagggaactaggggtccggaatttacaggggatcttctgaaacccaagctcccagacggcaaaaagctggtagcttgaaggaccttattcctcgttttggcagaataaactcacatccatgtttctttttgcataagtttaggttatagatagatttgattattccacaatttcttagagactatattttttgggaaaaatactcttttctactccaagaaagataaattttattacagatggtgaatcattccataaacttcctattagggctgagtttaattttaagctcgggcaaattctattgctctcaagccaccagggtagtgcatggttgtccaacatggagcttctgctgggcgcccagctgcttgagtcctgccctcttctctgccgtcatcacttgtcctcacgggagctgcctaggttcccccccgcccccgccagcttctgtctcctccaccacctttcctcaggtacctgaaccaataggtaggtcttccggggccttagtgtatttctaaaactgccaatggtccaccatctaaaactttttaaaattccacatggcgcggaccagaataatggccctgcacttgtgactggctggtgaccttgctccaagggtgcacgtgacaactcctctcagagtgaggagaagcctcggtgccctcttgtccccctcagcagaggcagccgcggggtccctgccacgtccactttcctcagccagtcggcatcagactctgagtcccaagaggtcagtccattgtgtgggggacagagcttggtccaaagctgtgcctatgggagacaacagaagaggaccatcaaagcatcgtcgtcaacactccctgcccacatcacctttgcacagagattctgcaggcaggcctcccccgaaggtcctgcagtagacacgggacatccctggatgagacagaacacacagcacctgcagggttctgatcacggcatccaaaatcaaacccgctgagaagctggagtcagcactggctctcccagcaaggggtttcctgtggcatctaagtctgaggacagaggtagttctgaggctgggtagttctgagcatcgtctggtttagaaggttttgctcagtgggtccagctggaacaggcagagaaaggtagtcaggcagtgaggacgggtgccctgaggcttagtgccaagccccagggacaggagggcccattggcctcatcagctggcgagcccagggcagccagaaaagagtggccaggagcttggtgcatggggtgggagggtgggtcagggcccagtgcaagggtgcggcggacagcacagccccagcgggaatggagtcctcgaaactgtgagactcatagtttggtaaaaacatttccaaagcatcctgaatggacagagggctcaacacccctcactccacaaaaagctacatgattgtgtaattctctgtacacacatactgtcctctgcagttccccaaatccgtgaaccacttttaatcctgaagctgtcgtgctgaggcaagttcaggttaaatttcagcaaggtggttcggccgcggatctttggtggtggagtggccgatcctcttgttccccacaggaaggcagcattccctgttccctgtggccgtggactcctgccctgggcctactttcttccagagcccggcccctggaggctgaaccaggccttttggtttcctctgtggtgtgatttgagagatgcttgtagaaacggtcagataagccccaaacatcttcctcagctgtgctcgcgtgaagtcttgcccttggtgatcttgttgggtagatcattgccttgtctgggtctttagccaaagaacctcccttgctcacacgtcgtgaagcctgcaggggcttctgcgagggagcttttgggttgctctgtgtcactcaacaccagaagacaggaacctctatacaaagaacaggtcctggacgtgggtgagcagggaagggatgtcctaggaaagacagcaggggagggacatgaatttctccttttctgcagcttcttcctgggcctgggccatgcctcgggattttccctgtaacaccatgcttcgcatttattattcgtgtccagatctattttgctatagaaagtagacatgtctaagaagtaaactgcaggatgagaaagtttaaataatttgtttcttcaggtgcaaagatgactgtcgtagtttcctgtcctgtagggaggtgaaactcatgccctctgctcctgaacgcagagagggagggctgtacatttttactgctgtgtgcagcggtggctctgtgccactgtccagttacagggatgctcctgaacgtggagatggagggcgggtcgtgccgtgggcagtggctctgtgccactgtccagttacagggatgctcctgaacgtggagatggagggcaggtcgtgccgtgggcagtggctctgtgccactgtccagttacagggatgctcctgaacgtggagatggagggcgggtcgtgccgtgggcagtggctctgtgccactgtccagttacagggatgctcctgaacgtggagatggggggcgggtcgtgccgtgggcagtggctctgtgccactgtccagttacagggatgctcctgaacgtggagatggagggcgggtcgtgccgtgggcagtggctctgtgccactgtccagttacagggatgctcctgaacgtggagatggagggcgggtcgtgccgtgggcagtggctctgtgccgctgtccagttacagggatgctcctgaacgtggagatggggggcgggttgtgctgtgggcggcagtggctctgtgccactgtccagttacagggatgctcctgaacgtggagatggagggcgggtcatgccgtgggcagtggctctgtgctgctgtccagttacagggatgctcctgaacgtggagatggagggcgggtcgtgccgtgggcagtggctctgtgctgctgtccagttacagggatgctcctgaacgtggagatggagggcgggtcgtgccgtgggcagtggctctgtgctgctgtccagttacagggatgctcctgaacgtagagatggagggcgggtcgtgccgtgggcagtggctctgtgccgccgtgcagttacagggatgcttcctctgctcgataaatatggatgccagcggctcgagaatctgttgcccagctcgacttctgcgagcctgctcttaaaaagagttattccgctcttctaatgaatcattttctcaatttccttcctcaccattagagtatttttaaagcactggacaccttgttattcaaggaagtccccagtcttgcctcgcctgtgtgccgcattctgcagattctcatggaagactcaaggccaacctgaccaccgccgaggggaggggacagattcctgtggggcgcggtcctggcctgggtttcgggagtctggcgtgtgctctggagacccggggctgcccctgccctagatggttttgcagtgggttccttgtggaagcaacaggcgcggcaatcacccggtgactggaaacggaaggttctgttgagtgcttcctcctttctacgaaatgcagcataaaacacttctgtgaaaggagcacgttgttaaaagaaacacgcgaaagtgtatttaatgggcagagccccgcccgctgtgctggccccggtcagtcctcgagtcctcaggcccccgcccgctgtgctggccccggtcagtcctccagtcctcaggcagcttcagttatgcacatccaggctcagtcgcctggaaaatgagactggcccaggtagatctggtggatctgccagtttattagaagaaaaggctcatgtatttatttaagtcctcccagcattagtgcttgacacatatttaaagcacttggctaaaaaacagattggaactgtggttgggtttggtctggacaacgaggtctggtccggggaaaccacaccctccgcatgccagcctcagttctgagtgccgtgggcatgacaggaggaacctcgggccacagggactctcactccgccagcccaagggtgagggaagattaaggtctcctttgagaaaccaggctctgctttgtgatatggggtcgttttccggcatgttaatctccccatcaatcgggggtggtgggggtggctcatgttggggaggattggatttggggagtgagaggttcgttctctggctttgcatgtgatgcggctgattgtcgggatgtgctgtgtgattttgctgcttggactcgatctaactgggctgtcagcctcctccttgggcttcagcactggggtgcctgtcacgcgtctgtgcagctggcgtggtggcttccctgaaagccaggtgcctggagatggggtggtggggccttcctaccctgtcctgtcctgccatcctttggagaaacgtgtctcttgtttgtctttggtaactggtgcagggctggggctggggggtagtgagggatagggctccgggctatcaggtccgcctggagtgctcaccaacccacacactaattcaggagcagtatgcttgggtctgcctgcctagaaaggctccattcccgctgcccagttggccgccttcatctgagccatccgaacggtgacaccactcaccaccctgggcacggggatgattccatttttcctccaagtaattggcactgagagattatgggagtggtgtggcaggagcttctgcgactgctctgattctcgccgcagaggtgatggggacgaggcagagttgtcaggccactggtgctcaagtgctctcgcgttcccacccactccaagcagctgaggcttgaggctgtgcggcaaccagagcagagttgccatggcaactggagaggcaggctgcttaggcgaaggatggatggagggaccaactttgtgtttctggtaaaatgggcgtgtcccacagacgatgaggaggccagagccaagaaggggctttgctgggacctgccctgagcctggggcaggtatgtggtggctctcgtttccctgacctccccttagggagccctgcttgtgtgtccccaacaatggaatggaggcttcaagtcacaggtccagttttacagcgtttcaggatttgcacacttactgtgctgagcatactctgggctttattaaggtgtgtgtctgtgctctatacgcatgtgaggtaatgagggggacacacacatgcatacgtgcaccatatacatccattgcacacctgtgcacaccacacgtgcaccatagacatccattgcacacctgcacacaccacacgtgcaccatagacatccattgcacacctgtgcacaccacatgtgcaccatagacatccattgcacacctgcacacgccccacatgcaccatagacatccattgcacacctgcacacaccccacaggcaccatagacatccattgcacaccccccacatgcaccatatacatccattgcacacctgcacacaccacacgtgcaccatatacatccattgcacacctgcacacaccccacatgcaccatatacatccattgcacacctgcacacgccccacatgcactgtatacatccattgcacacctgcacacgccccacatgcacacataccgcatgcacatgtatcatatccgtgcagtaaggaggacatctgatctctgctgggagaaaggcgaggttctcctcggctcaccaatgagggttccaaagcaccccagggacctcagcaggcaggacgggagcccagttctttgaccctgagcacttgttcccattctcctgaagatgagcacattattaccgtcatgctgtgtggttcttgagagcctgctaagtaacagtacgctttgtgcgtgtcccattaccctttctatgcattaggatttcatgccagcctagatagggaattgtctcctagagtctactttatgtgatttccaccgagatttccagggggctttaacttccgtacttgttacaatcaagtaaaaatgtgctcatctcactgtgcgtaatttcaccttttttcttttggaaaatttccccacaaacactttaagaataagcgaattgttaattttttctctaccagatagcaaagcatctggaattgtcttttgtggcaacatggttaggaggacacatttatgactggttgaaaatgatatgaaatagtgatagcacagtgctgctaagagtcagctgatgttgatttgaaggaatcaggactacggcgcaacattcaaacatgttttgcatcacgtcaaaaaacagacgagagagaaaccacaacaattcgggggtttgagattttgcaaagaaaatatacctgtcttataaaaatcgttgttttctatcacttctgtttctgtgtggatgtgggggggatgtgtgtgtacgtgtgtgtgtgcatatgtatggaatgtgtgtgtacatgggtgtgtacatgtatgcagaaaagcaaaacctgagtctgggttaagagcagatggagaggggatgaggatggggaggccggttcccttttgctgttctgtgcaatttctgccttgttttgataccatttcaattttcttaaataggcatgcattatgctataaatgtataacaataaataacctatatgcattagaaagaatctgaaaattatgcaacagtaggaatgagagaatatccacattcatacatcctaaaaatgagggcttaagtgtcctactttatctgagctcaggttagaggcagggaccaccccatagatccgattgtgggtcctgttgttcggctttccttgatagtataagtattttctttattataatatttccataaatatgtgaagcatttagagctgatgtaccatacttcaacaattcatctgttgctttttactttggtaagagtagaccataaatgcatctgagtgtcaagtgtaggaaactcgtgtgtgtgttgtgcatccactgagtgtccagtgtgggaaactcgtgtgtgtgtcgtgcatccaacacgtgttctctcacttgcattacactcagatgcatttatgacacaatgacactgcacgggtcgttgtgcacacacactgggggagggacgtggcgtcttgctggagcacaggagaagcagtttaaatgggaatgcattcagtgcatgtctgtcaaagttatgagtgaatgatgcttggcaatgatgtcacagagggcatctgaccgctgagataaagccctctgcagtccccaggggatggggcttttctggtcctaaagcctcactgaccataggaaacccctcttccacattttattggctgcatagacgtcacaactgggagactcatcagccaatccaactcacaggtatggtgcatgtgtgtgatgcgtgtgcatgcagggtgtgtgtgtgcaggtgtggtagatatgtgtatgtatgcatgtatggtgtgcatgtgtgtgatgcatgtgcatgcagggtgtgtgtgtgcaggtgtggtagatatgtgtatgtatgcatgtatgtatggtgtgcatgtgtgtgatgcgtgtgcatgcagggtgtgtgcgtgcaggtgtggtagatatgtgtatgtatgcatgtatgtatggtgtgcatgtgtgtgatgtgtgtgcatgcagggtgtgtgcatgcaggtgtggtagatatgcatatgtatgcatgtgtgtatggtgtgcatgtgtgtgatgcgtgtgcatgcaggatgtgtggtagatacgtgtatgtatgcatttatgtatggtgtgcatgtgtgtgatgtgtgttcgtgtgtgtgctgtgtgcacgtgtgtggtgatatgaatatgtgattcacgtgtggtgtgtgtggcatgttcatgtgtgtgtgtgatgtgtgcatatgtgtggtgtgtgtggtgtatgtgtgtgatgtgggtgcacgtgtgtggcatgtgtgcacgtgtgtttatgtatgcacatatgtgctgcatgtgtgatgtgtgcatatgtgtggtgtgcacgtgtatgtgcatgtatgtgatgtgggtgcatgtgtgtggcatgtgtgcactgtgtggtgtatatatgcacatatgtgctgcgtgtgatgcgtgcatatgtgtggtgtgtgcatgtgtatgtgcatgtatgtgacgtgggtgcatgcgtgtggcatgtgtgcacgtgtgtcatctatatgcacatatgtgatgtgtgcgatgtgcacatatgtgtgatgtgtgtgcgtgtgtaggggcatgcatgtgatgtgggtgcatgtgtgtggcgtgtgtgcacgtgtgtggtgtatatatgcacatatgtgctgtgtgggtgtgatgtgtgcatatgtgtggtgtgtgtgcgtgtgtatgtgcatgtatgtgatgtgggtccgtgtgtggcatgtgtgcactgtgtggtgtatatatgcacatatgtgatatgtgtgcatggggtgtgtgtgggagtgttttgttttgttcagtcctacacagtattttgaaaattttgaatttattgcaaacattttaagatttgaattcaagtaaatgagaaacaagcttcctggcctcagttccttcagggaaacactggctgccccttgggagggctgtgtccccacgtggtcggggtaccccactccttcctggctgcatcttggggtacgcaggtgcttgctgcatagctggcagctcagcggcttcttacaggagagctgggagaaaagcaaaggcttttctcctctgacatttgcctccagcccgatggtttgagtgtcaagacggaaggggtggggccgctcctggaaggacagcatgacccgcctggccttagtgggctctgagcaaagccccagctttaggatttcatcttagaagcttgttaaagcatcactcattctctcccattttcaaggagtctctaattctttaccctcagaaacgatgtgctgtgattttatgagacaagcctttgggatctccctaataatggggggataaaggcctccccctcccgctcctctctccaggctggggtcttgtgcgaggtatggttaagaacacagatggtaggctgggcgcggtggatcatgcctgtaatcccagcactttgggaggccaaggtgggtggatcacctgaggtgaggagttcgagaccagcctggccaacatggggaaaacccatctctactaaaattacaaagttacccaggcatggtggtgcatgcctgtaatcccacctactcaggaggctgaggcaggagaatcgcttgaacccgggaggcggagattgcagtgagccaagatcgcaccatagcactccagcctgggccacaagaatgaaactccatcttaaaaacaaacaaacaaaaaaaccgcagacacccaagtcccctttgctgtgtttgctgtgtggctggagagggagcaagttacctgtgtggagtgtttaggacggtgtctgagtggcccagtgcccagctgcccacgagccgtggacatgggcgtggtggggaagcaggggcgccgtgaagaagagcacacctgggacgggcacccctggccactccttccctttgcgcccctgtatcctttgcttagacacgcagacacggtcaagagcgccctcctccccacttccccacctcccatcacggccttctcctgtgagaccccacgtgggttggaaatctccttccagatcctggcgcctgcccccttcctccacccctcttggccagggggcgtctcagagcccagcgtgcgcctcggtgctcctggccatgctggggggtgccacccacgggccacgctctgtgtagtgagatgcaggggctatgtgcagatatggggatgggcagccgggaagcccacacctcctcattccttgaggcagcccgtgccagggatggtttctcaggctgcctaaccccatcgtgcgtcctcacacatgtctcccagcccaggcctggcatggctgcacgcttgctctgggaagctccatgcgctctatgagaagtgcgtggagatggcttctgatggcctcatcacagaaactcaacaggccgcgcattcctggtgtagcccctctcagtcctgtttgaccagctctgaagctgtcttgtgacttttcccatcgtgggtcacgtgcaccatcagtggattccggcatgaccacggattccggcatggccatgggaagcacacgcctgggggacgtcacccctggattcactgtcgtcgttgctgtcatcagagccctcccacacattggtcggccttgcctgtcagctctgtaaggttgaattagcaataaaaccatatgcttttggttgcagtcactttctgcataagtctttaaaaaggtcaaaaaggaagaaaacgcaacttctttaaaatacagattgtcctactttgaaaaatcccgtggacaaggacaatgaccacccacggtgacttgtgaaacgctcacattttcttatcgtcagcagccccagcatcctccttctcccgtgtgggacttcctgtcctgtggaccacacggagttagagctgggggcagtgagagccgtcttcttccttcttggtagagagacgcgtctcgactccaaatctttaagcctctgtttctctctccatctctcacctcccaggatgtctttggtcaccaggagacccacccattacgctgccatttccataacatggatttttccccctcttccttcaagtgatgagttttttcaagtgataattttattcatgtggggtatttatattttgccgtatgtgccgagaagcttacgagaaaggtgtattttaaataaatcaaattatcaatcaatcaatcaatcaattagtgaatgcagcctggcccagaatattcatttttaatgaattttggtttcacacaatcctgggtcatccctggagggtaacatcatgcggtgtttattgtcgcaggtggggagggcaccctgacggtctcgctgctgccaaccaggccctgatttgtgtctcagtgactgaaagttagtagggtaagagcagctttccagtgtgcctgcgagccagactgatgtccagctccatgcctgtgagtcagcagccccatgcctgtgagtcagcatagggataaccatggcaccggggttggcggatagcatggtggccacgcacaagcgacctactgtgtgccggccctgagccggctgcttccacatccccactcacctgttcacacagccacgtcatgagacgctgtgcctgactcctggggaaactgccagaggggcctagaaggcagctcccatccatgcgaatttggatgtgcagagttgcctttgtatcaacccaaacaaacccagtctggaaaactccctccacctagtaatggatcagggtgcaggtcccactctcggcaaggagacctgactctacgtcaagaggtcggctcggatgaaaggcccctggtttgactcaggccagggcggcccatgcgctctatgagaagtgcgtggagatggcttctgatggcctcatcactgaaactcaacaggccgcgcattcctggtgcagcccctctcagtcccgtttgaccagctctgaagctgtcttgtgacttttcccatcgtgggtcacgtgcaccatcagtggattccggcatgaccacggattctggcatgaccacggattctggcatggccatgggttccggcatgaccgtggattccagcatgaccacggattccggcatggccatgggttccggcatgaccgtggattccagcatgaccacggattccggcatggccatggattccggcatggccacggattctggcatgaccacggattccggcatgaccatggatgtcagcctctgtgctgaccacgctgcagatgcagggctggacgcctcatctcatttcatgcccaccgccgcctcacgaggccatcctcaagacgacgtcacttgtccacatgacacagccagggagcaggggcttcgaactgctggcctcgctcaggcctgtcgcttctcccacggcccccaccccggggcactggggctctgtcacactgggagacactgagctcagagaaaaagtttaatattttatataacacacgccccccatacactcacatgtgcacaactcacactcatacacactctcacacacaactcacactcacacaactcacacacacccacacatactctgacgctaaccacacaactcacacacacacacactttcactctaacacaactcacaaccacacacactcacaacttacacagcttacagaactcacacaactgacacacaaaacaatcacaagtcagctcacacaaaacacatacatagcttgtacacacaactcagacaaaactcacgctcacacactcattttcacacaaaacacacacaaaaaacatgctcattcacacacaccctcacacacagctcacacaaaaactcataaacactcatagcttatgcacagctcacacacaaaacacgctcattcacactcacgcaaaacacacagctcactgtctacagacactctgtgtatctgttcctttttcatgaatacctgaaaggtgtgtttttgaggcttgttcagcctttttcttcaggacactgccttgacctttcaccttttaatttgcgtttccaacttctgtgctactaccccctctgaagcattaatgggaaggtcagtttcctgcacttctgagtgaagaagcaggagctagctggaaggacttcagagcctggcctttcccttctggctgagcaggaaccaccatggaagtcctgggggaaggaggcagcttgttctcttcccagggactgggtgctgcattggtggtcagtggggaaaatgggccacattgtgaggaaggagggaggacaggaagtgatgtcagtgactcggggtgggagggatcagcactaagtagagactgttgcttaggaggtattagatacgaagtagggactgtgacttaggaagtacttagtatttagcagtacttagaactaagcaaagactgctacttaggaggtagtttgtaattatcattaatagtactttgtactaaacagactgctatttaggaggtacttagtgcttagcagtagttagtactaagtagacactgatacttaggagatatatagtagtgactagtgcttagtacttagcagagactatgactcaggaggtacctagtactaagcagagactacaacttaggaggtacttagtacttagcactaagtagagactactgccaaggagcagagcctgctctctgtgtggatggatctggtttgtaggatgttgcttcttccaaatcaacctttgtgggcttcctgcagctcctggccaactctgaaggtggtatctgtggtggagtttggctgggacagcgttctggggtccacagaaccatctggaaaacacgagtaaccatctctccactgagcatttcttctcatgaaaccagacagatctttttttcctctcactacagtgaccagacttttaaaccacaatgtccaggctgttgtgctcacatgggaatcatttttactagggttgggcaagagaaacaaggtgagaagtgccagtgtgaagcagtgaaatggtctgctcctcttgcattgattaattttgggagagaagactttctttgcctcttttcagctctgagtctggtatatggaaatgaaagctttcctgctttcctgctgtgtctgctctgatcacaggttgaggctgaagtgaaggcgtctgtgctttctagctggaatcttctcactccagcttcctgggttagcttattttgttttctaatcaacctaacattacaccccaaggcactaggaaatgaagaacaaactaagcccaaagttagtggaaggaaggaaataacaatgattagagaagaaacaagtcaaatagcctagaaaaacaataggaaagatcatcaaaattgggagttgttttgttgaaaagacacaaaatggacagatcttcagctagactgagaaatgagagaagactcaaataaatagaatcagaaatgaaagaagaggcgttacaatggataccacagaaacaccaagggtcatgagaccactgtggacatttatacgccaagacattggacaatctggaagaaatggagcccttcctagacacatacaacctaccaagactgaatcatgaagaaacagaaaaacagactgtaacgagtaaggagattgaatcagtaataaaatgtctcagccaaaataatgcccacgaacggatgttttcattgctgaatcctaccagacacttccagaagaactaatacccatcttctcaaactcttccaaaacactgaagaggaggaaacacttccaaacagattttacgaggccatcattaccctgatgccaaagccagacaaacactccagggaaagaagactacaggccagtattcccgacgaacacagatgttttctgaaaggagttgaactttgtgaattccctccctcactcttggccactgattgcaatctttagaggagattctcatcttttgaatctctccactttgcagacacgcttttgatttagaattctctctaattgaaaagaagcggaactaagaggttggagaagtccatgcctaggcaggtggaaagtggagcttgagatagaagactggagatggaaatgaaaataaacgatgggagaggaaggtgcagaggacggggcggggaggaggttgtactggaaactttaggttcagctcctttccctccagggatgaatggttacaggctgggctcttgggctgctaggagccactagcatggctctaccgggtgggtgaacctgccttataggccaagtcagagtcagttaagatttggacaataacagaagcaagcaaacaaggctccacagcaaaagcaaagctagtttagtgaagataaggacccctcggtttgcgactgtgctgtctagaaatatgggcctgagggggtttcagatggcagctttggtagagctgtggtctcccttctccaggaccatatgcactttgtgggaacattcgagccatctgtatcatttccttgacttaaaaaaggtcccaagatgttttcttactcagtgatcatttggggaggacctcagagctgtgattaggagaacggggagctgtagaacgttagctgtaaaatcaatcataagattcaggtaggatatgagaaaacagaacagaacactgcctcctttcctggtatgcccaaaacagggcgtgaacacttcagaaaacaatgtcttcagagctgaatttgggtgtgatgattcgtactttaaagtctgtgtcaggggaagtgaaggatttttttaaaatttaaatttaaattttatttatttattaattctttttttgagatagagtcttactctgtcacccaggctggaatgcagtggtgtgatcttggctcactgcaacctttgcctcctgggttcaagccattctcctgcctcaacctcctgggtagctgggattacaggcacctgccatcatgcccggctaattttgtattttttgtagagatagggttttgccatgttggccaggctggtcttgaactcctaacctcaggtgatcctcccccttggcctcccaaaatgctaggattacaggtgtaagccaccacgcccggccgaaagtgaaggattctaattaaagtccgtcagcaaatatgttatgaaaggaaactatagccgaactggagaaagggaagagtcacctggtaactgaaggaatttctaaaatgggttaaccaagaacactttgatgcttccaccatgaagctggaactggatgctggctggcccaagaccatgatccacgttcacagggggccctgggcctgagggcacctgcccacggggctgccttggggcatctttattcagaagtgggctcctgacatggttcctgggcaccacagcagaggcctctgcctggaaagccaggctcagcttctgcttccacttcctgtccacaaacagtttgatggccttagactgagaattgtatctcaattattcaatgatgtttttcttctttgctgttagcaaaatatgcctccccattgaatcaatattaagatctagcaagggtaaagttcgaaggaagccttttgccattagaaagaccaaacacctgcccaggcacagtggccacacctgtaatcccagcactttgggagtcccaggcaggtgaatcacctgaggtcaggagttcaagaccaacctggccaacatggtgaaaccctgtctctactaaaaatacaaaaattagccgggtgtggtggcacacacctataatcccatctacttgggaggccgaggcaggagaatcacttgaccccaggaggcagtggttgcactgagctgagatcacgctactgcactccagcctgggcgacagagtgagagtccatctcgaaagaaaacaaaaacaaaacaaaagcccacacacctggtctttctgctgtggcaggctgtcctggtcgtattcgaggtctggactaatattgggtagtattcttttccttccctatcttcctctgcatttttatttaaaagactaatgtgctagttttatgttcttttggctttctctctctctctctcttttttggtatattccccattgttttactgagacctgttaataggagagagaaattaaattatactaagccaacttcctccacacttatcaaaaagataaaaatggccatcctaagaaacaaagacactgcttgttccatcaaataatgcacataagccccaagtgcccgtctgacctgcctggaggttccagtggtatttttctccctctctctcctttaactagtaggagaggcgctggaggccacctcccctcctttcctttatgcttgggattatagctcacttcgccagttcccactcttagtctgtgtattgcccgcaccacaccctcaacgtgtcatctacgttcccttcatccacctgctcagatccgtgattgtttatagcatcctccagtgccccggccaggattagcaaggatttcgtgacccaatgggcgtggaggaagcgtggctttctttcatttcaccaggaaatgactgacgtcttgtcttggcgtgcatccagatgtgggaagtgcagcgttgcttgataacagaatcttattttgtgcagcttcccaggcactgaagcggggctgctgggagaagggcgtgaagtggtgtgacatcatttgatgtgtccttgagctccgagaggagaagcttttgatggtggcgagtgcagtggcaggggccgcagggatgcagacaaagccacgtccccattggtcctgctgctgtgagaatggggaggaaagtgactgcacaccctctggaaccttctgacggccaggggactttgaatagtttgccccacacggcaggagggtgggggccgcgctacggagcgttggcttgtggactgaaacaaagcgccccaggaaagaacaagctccgggataccagctccgggctccttgctggctgcaacttgaacgtggtctgagagtcttggttagagctggaggtcgcgtctgctccaacagagagaactgctgactcttccctgcacagagagacagtgccccaaggggaatagctgacgggttttaccctcctgaggtttctgcaccatcctgctgtttggaaaaggcgcagaggaacatcgaccctctggctggcctcagagaaggccctcggtcctcagggcatggtggtggcccccaccccggggtgatgggggctgtggcaccttgaccgagcaaacaccaggctcgggtggcagctgcctgcctggctttccgctcccctccacggccctcacgagagcctctgaggccagcaccctcttctccattcaggagtctggggagccgcgtggcttagcataggccagcctgtcctgggggcgtcctgggggctgcgtggccttcacacctctgctctcacctctgcccttgtagccaccgtgtcagggtccctggttttgtctcccttcatggggccttgttgctccagacttgcaggggagtcctccttgctgtacctaccaggacctggtctgcccctcaggactgaatccgtcggtccctggaatcctgctgagctgtcatgacctagagccagtcccaggtcccaggagcctctgtccgtgtggagctgcgacccgtgcttcctgggcacccacttcttaataacatgacctgggaagttcccgtttaagacaaggaaagtaaagcatcctggagcaatggttaacaagacctgaatctaaaataaaataagttccaacaaacatgatgttttgggtgatacagaaaccgtgaatgtggctggattaagagggacagtggctgagggcggaagaaaggtttctgatgagcggcagagaccagaagccttgctgtggcttccttccttcctgtgccccgcgtctcgcctgctgtgcttttggtgccacccacaccccccgctttattttatagtaactggcaggacctgcttggcccagggcaggagggaggggaggacggtttcctgatctgcgatggccatcaggtgtgctgggctcctctccaggcccagctgtagggagggatgccccccagagctgagcttttcccctgtggaccctctggcctttcctcccagccaagcccagggcgtccttttccaatcagagccggacacgggcgtgacttagcgacttagccgccccgagaggcaggacggggcggacgttcccagcaggaggccgcggctgcactgtggagattgtgtgtgtgccccagccctgccggaacagctggcctccagggacgtcgggagcagccagcacaggtgtggccacagaaatcacagacacttgtgtcctgtgtgtatctccatggcagccgccgggctgcgggcaactcctgcaggctctgtgctgagctcagcgtgagggaagggtgtccttcgtgcactcccatgtaagcgctgtgtctgccggggggtgttcagaaagagggggagcaggaaacgagaagccagcatcagtgcaatggcagcatgggtggcggcgaagtggcagagtgtaggggtgggttgcccctacacacctgtgggtgtttctcgtaaggtgggacgagagatttggaaaagaaaaagacacagagacaaagtatagagaaagaaataaggggacccggggaaccagcgttcagcatatggaggatcccgccagcctctgagttcccttagtatttattgatcatctgtgggtgtttctcgaagagggggatgtgtcagggtcacaagacaattgtggggagagggtcagcagacaaacatgtgaacaaaggtctttgcatcatagacaatgtaaaggattaagtgctgtgcttttagatatgcatacacataaacatctcagtgctttacaaagcagtattgctgcccgcaggtcccacctccagccctaaggcggtttttccctatctcagtagatggagcatacaatcgggttttataccgagacattccattgcccagggacaggcaggagacagatgccttcctcttgtctcaactgcaagaggcattccctcctcttttactaatcctcctcagcacagaccctttacgggtgtcgggctgggggacggtcaggtctttcccttcccacgaggccatatttcagactatcacatggggagaaaccttggacaatacctggctttcctaggcagaggtccctgcggccttccgcagtttttgtgtccctgggtacttgagattagggagtggtgatgactcttaaggagcatgctgccttcaagcatctgtttaacaaagcacatcctgcaccgcccttaatccattcaactctgagttgacacagcacatgtttcacagagcacggggttgggggtaaggtcatagattaacagaatctcaaggcagaagaatttttcttagtacataacaaaatggagtctcctatgtctacttctttctacacagacacagtaacaatctgatctctcttgcttttccccacagcagagtggtcgggcagggacaggttctacctggtaacagagtggctgggtggggacgggttccaccaggtaactgggtgaccaggcggggacaggttgcaccgggtaactgggtaactggggggccaggcagggacaggttccactggccctgtggggagtcccactgagtgccatcacgtcttcacggcggctccatgaagacatacttgaggcatctcgaggctcacagctggtgcatgtcagactgggatcagactgtgtgcccccaccccacagacgccagggcagaccccaccttcgggcagctttgcttgaggttctgagggcccagggcccaggcagccttacccacccctcaacgtttgtctggtgtggcttctgaatgagcacggtggctagaggggtggcctgcgtgaagtttttccttcatgccccaagggagcacaagcggccctacctagatctgaggaggagaagggagaggagaagctggggctcctctgaagacattgcctgcctgtgtggcaggcaccacgtagcaatgtcagcagcatcttcatttagccaagcgtttccacaccatcccctaacgtaccgtaaggggctctgtttgcgatgaccagagatgacggccagcaatggcaaggacgatggtgatggtgcctgggatctactcacagctcacccagccccttcaacaacgctgtgggctctgcactgtcgtccttgggggagttctgggattctccttcttcagtcaccctgcagtttcccccacgacgtctccgtgtcctagaatgctaagcagcccgtaatggtggttttgggaggtgtggtcacaccggctgcttcctgcttgttgtggaggtgccgagtgtagaaaaatgggctctctagaaagcttttctatattgatacagaatcgatgtacatattttcagggtacatgtgataatttaataccattgtataatttgtaaagatcaaatcagggtgattgggatcttcacctaaaatattcatcttttctttgtgccaggaacagtcaagctgttctcttttggctaatttgaaacatacatacattattgttaactctagtcaccctgttgatctatcaaacactaggttttatttcttctgtctatttgtagccattagtcaatgtctctccttccttcctcccagctccccttcccatcctctggtaaccaccaatctcaacggaggcaccctcatgagatccatttgttagctcccacatatgagtgagaacatgcagtatttgtctttctatgtttggcttatttcacttcacataatgacttccagtttcccatgttggtgcctatgacaggcttgcacccttttttatggcagaatactattccattgtgtatatattctgcattttctatatccattcatccattgatggacacttaggtcgactccatatttttgctattgtgactagtcctgcaataaacacaggcatgcagatatctctttgatatattgatttcctttcttttggatacaaacccggtagtggaatttctggatcatatgttagttctagtttcacttttttctgagcaacctccatactattctctatagtggctgcgctaatttacattcccacccacagtgtccgagggctcctctccacatccgtgccagccatttgttattttctgtcttttcaataagagccattttgggccaggcccggtggctcatgcctgtaatcccatcactttgggaggctgaggcaggcagatcatgaggtcaggagatcgagaccagcctggccaacatggtgaaaccccgtctctactaaaaatacaaaaaattagccgggtgtggtggcaggtgcctgtaatcccagctactcgggaggctgaggcaggagaatcgcttgaatccaggaggtggaggttgcagtgagcggagattgtgccattgcactccagcctgggagacagagcaagactccgtctcaaaagaaaaaaaaagccattttaacgggagtgggatgatatctcattgtgattttgatttgtatttctctgatgactatatctgttggccatttgtaagtttttatttgatgactatatctgtttaccacctatatgtttttatttgatgactatacctgttggccatttgtatgtttttatttgatgactatacctgttggccatttgtatgtttttatttgatgactatatctgttttaccatttgtatgtttttatttgatgactatatctgttggccatttgtatgtttttatttgatgactatatctgtttaccatttgtgtgtttttatttgatgactatatctgttggccatttgtgtgtttttatttgatgactatatctgtttgccatttgtatgtttttatttgatgactgtacctgttggccatttatatgtttttatttgaaaaatgtctattcagatcttttgcccatttttaaattagaggtttgttttttttttgctgttgagtgttttgagctctttatatattctggttattaatcccttgtcagatggatcgtttacatatattttctccattctgtgggttgtttcttcacttttttgtttcctttgctgtgcagaagccttttagcttgatgtgatctcattttatctttatttgctttggttatctgtgcttttgaggccttaccaaaaaaatctttgccctgatcaatgtcctggagtgtttccttagtgttttcttttagcggtttcatagtttcgggtcttatatttaagcctttaatccattttgattcgatttttgtatatggtgagacataggagtcttgtttcattcttctgtgtatggaaatccagttttctcagcaacatttattgaagagattgtcctttccccaatatctgctcttggtgcctttgtgaaaaatgagttggttataaacgtgtgaatttatacctggattctctattctgttccattggtctgtgtgtctgtttttatgccagtactatgcttatttggatactatagctttgaagcatatttcgaagtcaggtcatatgagacctccatgtttgttatttttgctcaggattgctttgggtatttggggtcttttgtgagcttatgtaaattttagagatttttctttctgtgaagagtgtcattggcattttgatagggactacactgatgtctacagccatgcccaccctgaacaagccccatctcatctaatagggactgcattgaatctgtcaattgctttgggtagtatcgacattttaacagtattagttatttggatacatgagcatggaatatctttccagttttttgtgtcgtcttcaattgttttcttcagtgttgtatcgttttccttgtatagatcttttacttctttggttaaattaatttctaggtatcttatattatgtttagctattggaaatagggttactttattgttttttagattgtttgctgttggcatatataaatgctgctgatttttgtatgttgattttgtatcctgcaactttactgaatttgtcagttctgacagtgttttgaagtctttggtgttttataaatatgataagatcatgatgtctgcaaataaggctaatttgactttttcctttccaatttgggtgcctgtatttctttctcttgcctaattgctgtggtcaggacttcagtgctatgttgtataaaaatggtgaaagtgaacatccttgtcttgctccaaatgttagagaaaaggctttcagtgtttccccattcattatggtgttagctgtggatttgtcatatatagcgtttattattttgaggtatgttctttctatacccattttgatgagtgttttatcataaagggatgttgaattttatcaaatgcttttttagcatctattgaaatgatcatgtagttttgttcttaattctgttaatgtgatgtattatgtttattgatatgcatattttgaatcgtcattgtatccctgggatgaatcccactcgatcatgttgaatgatctttttaatgtgttcttgaattcagtttgctaatattttgttgaagatttttgtgtctatgcctatagtcctcctttttttttgtcttgtcttttcagcttttggtttcagggtaacactgacctcatagaatgagtttggaggtattccctcctcttcaattttttgaagagtttgagtagaattggtattatttcttcaaatgtttggtagaattcatcagtgaaggcatcaggtcctgggcttttctttgatggtaaatttttttattatggctttgatctaattacttgttattggtttgttgaagttttctatttcttcatggttcaatcttggtagtgtccaggaatgtacctatttcttctaggttttcccatttcttagcatgcagttgtttataattgtctctaatgatcctttttattcctgtgatctgagttgttacatctcctttttcatttctgactttatttatttggatcttctttccttttttcttagtctagctaaaggtttgtcaattttgtttaccttttcaaaaaactttttgttttattgatttttctgtatattttatcttaatttcatttatttctgctctgatttgtattatttctttccttctactcattttaggtttggcttgttcttgctttccttggtccttgaggtgcatggttaggttgtttatttgaagtctttctatgtttttgatgtaggcatttattattatacacttgcctcttagtattgcttttattgtatcccatagattgtagtatatttcaattttcatttgtttcaagacatttttaaatttccttcttaacttcttcattgactcattggccatttagaaggaggtttaattcccatgtgtttatgtagtttctggggttcttcttgttattgatttctagttttagtctatggtggtcagaaaagatacttgatatgatttctgctgctttgaatttgttgagacttgttttgtggcctaagatgtggtgtattctggagagtgcttcatgctctgatgaaaagaatgggtattctgtagcagtcgggtgaaatgatataaatgtcagtcaagcctatttggtgtagtgtatagtttaactctaaagtttctttgttgatttcttgcctgaatgatctgtccattactgagaatggggtgttgaagtgccctgccattattgtattgcgggctatctcttcctttggatctattaatgtctgttttatatacttcagtgttccattgttgggtgcatatatatttataattttatatcctcttgctgattgacccttttatcactatatagtgatgttctttgttgctttttgcagtctttgacttgcagtctattttatctgatataagcacagccgcttctgcccatttttggtttccacttgcatggaatatcttttttgttgtttctgagacagggtcacattctcttatctcagctgagtgcagtggtgtgatcatggctcactgcaggcttgaccttccatgctcaagtgatcctcccacctcagcatcccaagtagctgagaccacaggcacatgccaccatgcccggctaatttttgatttttttatagagatggagtctcactgtattgcccaggctggccttgaactcccagacacaagcaattctctcaacttggcctgtcaaagtgctgagattacaggtgtgagcctctgtgcccagcctgaaatatatttttctattcctttcagtcaatgtccatctttatagatatggctggtttattgtgggcagcttatagttgggtcttaattctttatccatacagccattctatatcttttaattggagaattgagtacatttaaattcaatgttattattgatgagtaaggactgactactgctattttgtttgttttttcattgttttgtaactcctcattcttgttgccttgcttgctttctgtcttactttgtggtaaagtgattttctctgctagtatgttttaattcattgctttttatttttagtgcatgtgttacagtttttttttattgtagttgccatgagacttataaaaaacaacttaaacatataacaagttatcttaaagagataactgagatcacaaaagaatagaaacaaagaaaaaaatgaaaaaaaacccctctgtattttaagtccatccccccacactttgacttcctattgtctcaatctacatatttgtatgctgcctatctcttaataggttgctgcagctattattgtttttgacagatttgtcttttgggcttcattctacggttatgagtggattgcaccccacaattacagtattggagtattctgggttagtttgagtgcttacttttaccggtgtgttttataccttcaaatattttctttttgcatgttacttttttttctttcagactgaagaactctctttagcatgatttgtaacacaggactagtagtggtgaattatctcagcttttgtttgtatgggtaagactttatctctcctttatagttgaaggaatgctttgctggatatagtattcttgggtgacaggtttttcatttttttctccttccagcactttgcaaatgtcatcctactctctcctggcctgtatggtttctgttgagtagttggttgccagacaaatgagagctgctttaaatattccttgcttcttttctcttgctgcttttaggatctctctttgtccttgacttttgagagtttgattattatatgccttacagtagtcttatttgggtcaaatctgtttggtgttctctgaccttcctgtacctagatgtttatgtctttctcaagttttgagaagttttctgttattgtttctttgagtaagctttctaccccttgttcttgctcagcttccccttgaacatcaatcattcttatatttgatgttttgaggtaattttctgtcttgcaagtggtcttcatccctcttcattctttgttctttttccatccctgattgtgtattttcaaatagcctgtctttgagctcactgattccttcctctgcttgatccattctgcttttgagaggctataatgaatttttcagttcagcaaatgtatttctcagttccaagatttctgtttgaatttttaaaaattgtttcaatctctttgttaaatttctgaattgcttttctgtgttatcttggaaatcactgagtttccttaaaactgctattttgaattcttggtccgagaactcacatattgccatcttattagggccaattgctagttccttactttgtccatttgagaaggccatggtttcccatttgctgctgtttcttgttgatgtgtgtctgtgtccttgcactgaaggattatttatttactccagtcttgtctcctggcttgttttagtttttattggatacatttgcttagagagtcacataatttacctgtggaatttctttttctcccccttctaggtccctgtctccttttcggcactagatggcaccttaagcccaggtttaccttggctctggttaaagatctgagtgctgcctgtactgaaggttaaagatctgagtgctgcctgtactgaatgggagaggtctcaaaggggatatgccagcagtgtgagaaggctggctggggcctcgtgctgaggggacctgtggagcattcctgctacagggtggtgctgtgagcagccactctgatggagtgcctctttgaccgagttgcagagtagagtttgtggggctggggactatagtcccacctcccccttttatctctggctgtcctcagggatgtttcccttcacacatttgcagcgcttcccatgggttgaagcaggaacaggtctccagccagggcccccaagaggttggagaagctgattgtccacctcaccctcactttttccagcatagaagctatgagttgaggggaaatttcccatactcttgatgccaaacagattatgaggagggatggtgcagacatggtggtctgatgcttttgctgtctgcttggggtgttttcaattttctgtgttcctgggaactgtctccttttgtatttgagtgtgtggccattgctgggattgtgtcagtgctgtgtgtgtttttgcttctctgtggagcagagtgaagtcaccttgcttctactgcaccaccattttgggaccagaagtccctcctagtagaaatttccaacaggtgtagtggaatatgaaatgtatctggagaaaatattttcttttcaaaaatttcaccttggaaagcttctgatgttgctcagaaaagtttaaaattcttctttgggatcttccttcagtaacctggtagagggcgatctctgaacattctcagtaatggtgactcttctttttgaaggcagatgcatgaggatgtggcataaagttagttgataccaggtgggataaataagttatttgcatcccagtcattgactaagttgattgtcacactgttttcaatgtaaaagtgaagtgtgaacatataacaacaagactgatttattgtctggtttctaaactgtctttgtaaatgtgttccaaagagacataaaatatcaccaacaatgctaccacctttgaatacgcatagagctttttaatgtcttgaatgtataggttccatttctatttgatatacatgtaaagccttaactactttatagaaatgctttgcatttttccagggattgtgaaaatgtgagttaaaaccatgtcaaggagtctgtgctggccctgaccaggcctgggacaggcacccccactgtgcacagttgagcagcccaggaatggaactatgaccctgtcttctctgattgggaaggagagcccacctgatccctttaattgacttcacgtcatcttcttaaggagtgtttcctctcagttcacaaagcctacaggcttcctgcatgggatcatccttcacactctgctcaccagccctttccttgctgatgcgagggcaagctgcacattcatcttccgtaaagagcattttgagcatgagtttactgctgattagagtgccactgtatttttttatatagtcgtgaattctactcataaaatctagatcctgcaatgtgctgaccaccgcctttccccgacacttcttcctcgccacctggggtcttcccgtcacacgtcaggggctcctcctcagccccatttcaaccctgaccacgttcatattttgaaatcagcctctcatttacagctttcctgtaggcaaaataaaatgctaatagatttcatttctgattcttatcactctgatttatctctcagtattaccgcgtttgaaatgaataccgcctctctctcacccttgaagctctctcttctcctggctcctgagcacatgaccttgggctgtctgtctttattgtcgattttgctcctctgctcagcacctcttttttattgtttttctcctaaaacagatggaggatctatcccatcctctttactttgacagattttctactgttccattttctcacaccttctcccaactgacctccctcctcccatttatccacgcacagtgcactctctgatgagtagctctgaggcctccattcgtcctgtgacccagggtcctctcctggagctggtgccactggagcctagcttggcagtcagtcatcttcagcttcacccccaaacctttgcatctctgttcctcagcctggctccctcctccctccaaacagcctgtcgcctggatccagtgtgtttgaaactgcaagccacagcccattaatgaccctgagagagttttagggtgttgcagccagaaattttaaaaagtgagacagaagagaataaatatgatataataggacacagtgatacgtgagaggctcccacgcgattagggtaagtgctgtgttgtgggacttccccaggtctcacttcaagatgcatatcttactcttggataccaccggaaaaaaaaaaaaaaaaaagggaagcgctgtcttcgttcctcatatgcagcgtgcaccttggtttctgtccttgctatgcccttgcctgcttaagtgttgacgtgttgcatgcaagccgggaccaccatgcacgctgccaccacttgctctgccgcctccgtttccctctcagcagtctgtccctggcattctccacctgcccctcccacggggatctcctctgccacacagttcagcctgcagaagaaacaaacgtcgtccccacccacaaacctggtgtgttcccagccttccttctttgtgatttcctcttccccagtgacctagccaacctctcttgcagttaaccttgacaccttgttctcctttaatcctgcatatactgattatttttaccaattctgcttctcaaactatccacactagtgttctctgagtttacaaccttatcatctctctaatgaaccgtttttgtaactcttattgaatgccttcccttctccctattatctttaattcattattcacaaatcctgaggattaaaataggaaggacttagaatagtgctggctcatagttaaggctcagcaaatagaaactgctatgtatctttaaatttttaattttaatattgttacttttatcctccttctgggacacagttggatgatatttctgtccgatgcagagcttttactgctccccactgtgcacagatgcaccggtgcttcctgatgtagctttgacgtcctcctgtgactatgcaactcccctccctctgttcctgcactgcccccacctccctccccatgtcatacaccatcccctgagtgcaccactcagtgccacagccccaagtcccttcccatgctactccgttatcttagagttcctcccctaatccatccccacctgttagaattctatttatctttccagtcttagttcaaataccacttgtttctatgaaactttcttaactttccaacacaaattcacctcttcatttctctattcccttagcagtttgctcataactttattatataatgattgcactccaacttggatcttagctaattacgtacctgcattccacactagactgcaaacttgaggaagatgggtgctgtggctgccctcaaaccgtatgtgcctcccataggacacaagagttggttatgcaggtgttgtctagatgaaattatatagcatctatccttcttgaattggctttttgcctcagcacagttccggggagattcagcgaggctgtggtgtgtactaatcgttctttccttcataaccaagtggtgctccgtggtgcagaggtgctgcatggtaaccatccacctgctgagggactcggtggttcccagtttggggctattctaaataaaactggtgaacattcatacacaagattttgtttgaacataagtcttcatttctttgggatgaatggtcaggggttcaatttttgtgtcttatgataagtatatgtttagtttttaaaggaactctcaaaccattttccagaacaaaatttgacattcacagtaaaaaagaaaaaaaaaagtaacagtgatacagtttttctgaatccaaatcctttccagcatttgatgttgtccctattttttattttagcctttctgataggtgtgtggtggcatctcattgtgggtgtaattgacatttccctgatgagatgatggtcagcatctcttcgtgtggttatttgccatcagtagatcctctttgtcgaaatgtcttttcatctctcaccctttttctaattgaatgtttttaatgtttagttttgagagttctgtgtatattcctgatactagtcctttgtcagatacgtggtttgccaatatttctccaactctgcgctcattgtttcagctcttaagagggcctttccacagagcaaaagtttttaattttgatgaaggccaatttgtcaatttttctttttatggaagatgtttgatgtcaagtctaagaactttttgcctagctctagcttccaaagattttctgttgtttttttctaaaagttttatagttttgcatttttacatttatgtccatgagttgcttttgtgtagactgtgaagcttacatagaggttcctgtttttgcctgtggatgtccaatcactccaggaccatttgttgaaaaggcaaattttcctaccattaaattgtttatgcatctttgtcaaaaataacttggacatatttttatggatctatttctgggttttctattctattgtattatttgtatctgttcatcagtactacacagtcttgattattgtacctatataagacttgaaattatatatgatcactccttccactttatttttattttcccaaattgttttagctactctagttcctttgctcttccatataacttgcttttctgtatctacaaagtatttccctgggattttttataggaattatgtgaaacctctgtatcaatctggggagagttgacatcattattatgttgaatcttctgatctaccaacatggtatgtctgtcatttattttgatctttggtttctttcatcaccattgtttgtgtttcagcacataggtcctgtacgtggtttgttaaatttacacctaggtattctttgagtggttttaaatagtattttaatttcagttttcatgccttcattgttagtatatagtacaagaacttattaggtttgagaggtttttatattttttgtagagtccttggggctttctgtgtagataatcaggaaataggacataggtacagtttaatttcttcctttgtgtctgcatatcttttattttttttttatcttgccctattgcactggctggaacttccagctttatgttgaataagattggtgagagcaaacatccttgctttgttcctagtcttcagtgaaagcttttgatggttactcaccattaagtacagtgaaatgtggggttttgtagatgtttattgttagcttgataaagtgccccttgatttctatttttctgaaagttttcttcatgaatgagtgttgaattttttaaatgtcttttctgcatcgattgctgtaatcatgtgatttttttcttctttagcctattaatatggtggattacattgatttgttttgaaatagtgaaccagcctttcattcctggaataaacctcatgatgtatcattattttcatatattgctggattttatttgctaatattttgtaaaggatttttgtgtctacatttgtgagggattttggtctgtaggtttctttttactgtctttgtttgcttttggtatcgggttaatattagctacataaaataaattgggaactgtttcctcgccttctattttctggaagatatttatggaatttgttttaattcctctttaaatgtttggtataattctttggtgaaaccatctgggcctgattatttctttctgggtagatatttaattattaattcaagttccttaatagtgtagaagtattcaaattattgatttcacattggatgaattgaggtaacttgtggatttcaaggagtcgatccatttcatctatgttgtcaggtttatgtgtgtagagttgtttattccctgattatccttttgatgtttgcagagtctgtagtgacttcccctgtttctttgcttatattgataatttgtgtcttctctcttgttttttgttagtcttgatagagatttgtcaattttactgatttttttcaaggaaccagctttcattgtcatttatcttctctatttttttctcacttaaattacattgatttcttttcttatccttattatttattttcttctactttatttgggtttattgtgttctcctttattacagattcttaaagaattcagattattgatttgagactttctcttttatttttcttttgacttttgttttcggtttgagggtacatatgcatgggtgaattgtgtgttgttacagtttggtgtgataacaatcctgccacccaggtagtgaacctagtcccttatagcttttcaacccacgtcttcctcccaccctctgcctttcatagtcctcggcgtctgtcatcctcatttttgtgtctgtgtgtactccgtgtttagtttccacttataagtgagaacacgcagtatttggttttctgttcctatattaatttgattaggatgatggcctacagctgcatctatgttgctgcaaaggacatgatttcattatttttatggctgtgtagtattccatggtgtatgtgtaccgtattttctttttccagtccatcatcagtgggtatctaggttgattccatgtctttgctattgtgaataataccgtgatgaatgtacaggtgcttgtgtctttttggtaggatgatttattttcctttggctatatgcccatactgggattgctgggtcgaatggtagttctgtgttaagttctctgagaaatttccaaactgctttctacaccagctgaactactttacattcccaccagcagtgtataagcattccctgttctctgcaaccttgtcaacatctgttattttttgactttttaaaaatattcattctggctcatgtgaaatagtatctcattttggttttggtttgcatttctctgatgattactaatgatgaacatttttcctacgtttcttggccgcttctatgtcttcttttaagaagtgtctgttcatgtctcctacccattttttaatggggctgcttttttcttgttgaataatttaagttccttacagattctggatattaaatttcttttggatgctgatatggtttggctgtgtccccacccacatctcatcttgaattgtagcttccataatttccacgtcttgtgggaggggacctggtaggagataattgactcatggggcagtttcccccatattattctcatgttagtgaataagtctcatgagatctgatggatccgaaggaaaccctttccgcttggcattcattctctcttttgcctgctgccatgtaagacgtgcttttcaccttccatcatgattgtgaggcctccccagccacatggaactgtgggtccattaaacctcttgctcttttagtttacccagtctcaagtgtgtctttatcagcagtgtgaaaatggactaatgcagatgcatagtttgcaaatattttttcctaccctataggttgtctatttacctgttaatagttgcttttgttgttcagaagcgctttggtttaattaggtccctcttgtctttttttttttcttgcagttgcttttggagatgtcatcattaaatctttgctaaggcctgtgtccagagtggtgtgtcctacattttcttctagggtttttatggttttaggtcttacatttaaatctttaagccatcttaaattgatttttgtatatggtaaaaggaaggagtcaagtttcaatcttctgcatacggctaaccagctatcctagcaccatttattgaatagggagtcctttctccatttcttgtttttgttgactttgttgaagatcagatgtttgtaggtgtgtggctttatttctggtttctctaacctgttccattggtctatgtgtctgtttttgtaccagtaccatgctgttttggttactatggccttatagtatattttgaagtcaggtagtgtgattcctccagctttgttctttttgcttagggttgctttggctattcagcctttttttttttttggatccatatgaattttataattcttttttttttctaattctgtgaaaaatgatgctggtggtttgataggaatagcattgagtctgtaaattgctttgggtaatgtcaccattttaacaatattgattcttcctatccatgagcgtggaatgttgttccatttgtttgtattatctctgcagtgttttttaattcttgtagagatctttcactttcttggttagctataaccttaggtattttattctttttgtacatgttgtaaatgggattgcattcttgatttggatttcagcttggaaattattgatgtgtagaaatgatattagttttttagtttttgttttggtttgctaagggtaagtgaattgtatgctactggtttttatacattgatatttttttcctgaaactttactgaagtcatttattagttctagaagtcttttggcagagtttttaggggtttctatgtatagtatatcatctatgaagagagataatttgacttcctcttttcctatttggataccttttatttctttcccttgcctgactgctctggctaggaattccaatactatgttgaataggagtgatgagagtgggcattttgtttcattccagttctcacaggaaatgcttccaacttttgcctgttcaatatgatgttgcctttgggtttgtaattgatggatcttattattttgaggcatattccttttatctttgtcctttgatgcctaatttgttgaaggtttttaacatgaagggatgttgaattttattgaaagcccttcctgtatctattaagatgatcatatggtttctgttttcaattctgtttagtgtcatagaatgatttagggaggagttcctactttttggttttttgaagtaattttagtaggattgttactagctctgctttctatgtctggtagaattcagctgtgaatttgtctggttccgggcttttttggttggtaggttttttttttattagcaattcaattttgaaagtcattattcatctgttcaggatttgaatttcttcctggttcaatattgcaaggttgtatgtttctgggaatttatttatttcttcaaggtgttctagaagaaatggaaaaaacccagaaaacctaaaaggttttcttgtaatatcaccgttgtcatttcttattgtgcttatttaggtcttctatttttgttaatctagctagtggtctaccaatcttatttattatttcaaaaaatgaactttcttttgtttgtgtttttgtgtcccaatttcattcagttctgctctgattttgattttttcttttcttctgctagctttgggattggtttgttctttttttttctagttcttccaggtgtaatgttatgttgttaatttgagatctttctaactttatgatgtagttgtttagtgttataaactttccttttaacactgctttagttgtgtcccaaatattctggtatgttgtgtcacagttttcattagtttcaaataattttttgatttctgcattaatttcattctttacccaaaagtcatctaggagcaaaatgtttaattttgatgtaactggatagttttgagagatcttcttgttttttatttgtatttatattacatgtgggccaagagagtggttggtatgatttcaattttctttggatttttttgagacttgctttatggcatgtggctgatcttagagtatgtgtcatgtgcagataagaagaatatatattctgttgttgttgggtagtctgtagacatctagaagacccagttgatcaagggttgagtttgagtccagaatatctttgttttctgcctctatgatctgtctaatgctgtcaaatgggatattgaaatctccccctattattgtgtttatgtctctttataggtctctaagaacttgttttatgaatctgggtgccccaatgttgggtgcataaatatttagggtagttaagtcttcttgttgaattgaaccctttttcattatgtaaagcccctctttgttctttttgatcattgctggtttaaaatctgcttcatctgatataagaatagcaacctctgctctttgttgttttccacttacaagatagatctttctccatccctttactttgagccaaagtgtgtcattacatgtgagatgggttcttgaagacagcagacagttgggtcttgcctctttatccaacttgtcaatctatgccttttaagtgggtgtttagcctgtttacattcaaggttaatattgatatgtaaggatttaatcctgtcatttgtgttgttagctggttttcatgtaaacttgattgtatagttgctttatagtgcaagtgagctacgtatttgtgtttttgtggaggcaggtatctttcttgtttccatgtttagcactcccttaaggacctttgtaaagcgggtctaatgatagtgaatttctttagtgttcacttgtctaaaaatgattttatttcttctttgcttatgatgcttagttttgtgggatatgaaatccttgattggaattttttttctttaaggatgctgaaaatagggcccccagtctcttctggcttgtaagcttttttctgacatgtctgctatcagcctggtgggttctctttgtaactgacctgccctttctctatagctgcttttaagagtttttctttcacaacaaccttggagaatctgatgaccatatgccttggggatggtcatcttatatagtatctcacaggggttttctgaattccttgaatatcatgtcaacctctagtgagattgggaaaattttcatggactgtatcctcaactatgttttccaagttgcttactctctctccttctctttcagaaatgccagtgagtcatagttttggtcactttacataatcccatacttttcagaggttttattcattttttaacactcttttttctttatttttgtctgcctgtgttgatttgaaagaactgcctttaagctctaaaattcttctctcagcttggtctcttctgatgttaatgcttccaattttattatgaaattcttatattgaattttaaatttcagaagttcagtttggttattcttaaaatggctatgttgtctttcaactctcaaatcatttccttggattgagtttcaactttctcctgtatctcattgagcttccttgccatctagactctgaatcctatgtctgtcatttcagtcatttcagtttgattaagaaccattgctgggtagctagtgtgttcatttgtaggtaaaaagacactctggcttttagaactgccagagttcttgtgctgttttctcatctgtgagtgctgatgttcttttatccttttgaagttgctgtcctggggatagggctttttgtttttatgttcgttatttctcataagagttttgctgttgtgtaagttggatatagttgattggctttgtttctgaattttttcatagggccgaggttcagcttggaactcctgggctgtatgctctaaccctggtgacctgggaccaggcctgtggctttgtcctctggccccttgagctttagtaccagcttcactgggaggtcaaggtgcagctaggctgctggtgaaagcactctatcaggggccaccagctaaactgccccattggtggttgctggcaaaagtgccctggcagggtgggtgggggccactggcaaaagtgctccagtagggccctcttttttaatgtaagcatttagtgctaaaaatttcacttagcacagttttaactgtatgtgccatgaattttgatatgttgtgcttttattttaattacatgtaatgtattatcttctctttgacccatggattattttataacatgttgttatatttccccattatctttctgttattgatttctaccttgactatattgtggtcagagaacacactctgaatgattataattttgctgaagtttgttttatggcccagcattaagtctatcatggtttgtgttctatgagcaattgaaaagaacatatactctgctcttgttgggtacagtgttccataaatgttcattagatcctgttgattaatggtattgttgagttcttttctatctttgttgattttttgtttagttgctctatctatataattcatatataggattgctgtatcttcttagtgggttgacctatttataactctgtaattcccttctctgtagccattttctttactctaaatgttaacttatctgatattaatatagctattgcttccatcctttgattaatacttacatgatatatttttaaaaatatttttactttcaaccatcctatatcattttattcaaagtgagcttcatatagtgtatagttgagtctttttttaaaaaaaacccactcagccagtgttttcattgtcatatttagcccatttacatttaatgtaattattaacatgttaggatttaaaactcatttaattttgtattttctacttgttcttgtattttttgtttctttgtttcttcctcccttcctttgagttactttaatgattttggaaatccactttatctatgtttttgagtgtatgtctttgatagctttcttttatttattgttctagatataatattcatatacatattcataacattaaagtttactggtgtcataattttaccagtttgggtgaaatatagaaactttaccttcctttatgacattttacttatgcccctcatttatattataattgtttaaatatttcctctatgtgcatttaaaatgacataagacagtagtatggtgtttaattgaactgtcaagcataaaactcaaggaatgcttattgtacttactcaggttgttgcttgccatgttcttgcattcttcctgatgctccaaaattcctttttttatatttctcttctatatggagacataaatttagtaattctttcagagttggtctggtgaaaaacacaattttcctttttctggggatatctttatttccccctgattcctgaaggataacttcactgggtatctggattgatagacttgtgggattctgggttgacatatttttctttcagcacttgaaaaatgtgctgtttccttgtggcctccattgtttctgataagaaatcccctgtcatttgaattgtgttttccttgtaggtaagttgtcatttttctctggctgctgttaagatttttctttgtaagttttcagaaacttaattattatgtgtcttggaggagatttgggtttaccctgtttggggtatgcttagcttcttaaagttttaggttcatgtttcttccaaaattgagaagttttcagccattatttttctgagtaccttttcagacctgtcatcttgtcttctttcactcctctttttgaaactctgatagcatgaatattatatctttggttatagccccgcagttgctgaagctttatcatgtttttctactattttctctgtgttgttgacattgagtaattcctactgttttatcctcacttcactgattctttcctctgtctctccatccttctgttatgtgcatccactgcgttgtttattttggttattgtatctttcagtaataatatttcaatttggcttttatttacatcatctattttctgagacatcctactttttcatttgtttcaagtgtgttcataattgctcattgaagcatttttatcgtaactggtttaaaatctttctcaggcaattttaacatctcggtcatctcagtgttggtttctgtggattgtctcttttctatttattttgtgatcttctttgttctttgtataaccagttattttcttttgaaatctggacatttttgtattatgtcatgattctggatctcatttaaaccttgcattttaactgtctctttttggacactcctcttctgggggtaaggggtggtggtggtgattccttgtaactgacagggagatggaagtctagattccccaggaggcctctgttgatacctgaaggtggggtctttttactgattggttagggagaggggtgggagtttcaacttcccagatggtctctgctggcactgcaggggttgtggtaattacaacccaatggagatgaaagttctggatccctacttggccttctctgacactacctggtaggcctgaggggaggccttattacagcctcatgaaagaggaagtctagatccccatttggcctttgttggcatgggtagggagaggctgtacttttttctgtggtgttttgctggggtagagctgttaatatctaatatttttctgtcttgctgagttgattctttcctgactccttgattagagagaggctgctttagttgtgtgtgtgtgtgtgtgtgtgtgtgtgtgtgtgtacacgctggtgtttccggattgcggcctctttgactccaagtctgaggtacctgaggcaaaaagaaaacccagggaatccaccaccatgtccttctctgctctgccttcgtattgccatccttcagagtcttatgcttgttttacgtatgctcagagattttagttgtacttagtgggaagacgtatgtcatctctgggagtggattccttcttcccagggttatattttctccaagatatgccacggacagaagttcataggagatgcttaaactcccatacctctgcattgttttgtttgttttttatatctaagagcacagtttcttctgacttccgggaaggctgagatggctgggctaaggtatacagggtcctctcagactgcccagtacagatgattctgagtagttgaccaactgttgttctggaagaactgagcctttatcatagatcccaaagttgacataactcagacttatatgatttttagataaaaatttttaaattttagttatttaaattttataaatgatatttttcatgaaaagttctttttgtgccattgattttctgtttcctgataaatattaatattaagagaatcccttttaggaatggcgtggttaaaatatccttatttctaaatccacaataatagatattatactaacattgcaaatgtgctttcagttgagtatactcccaagaatggatcagaaatagctatataaacaaaagtacatttcatagtgggtgtttttaagttgctttggcaaatgggatagacttgattattattaagtacatttaatcttaaattggatagtagtgagtgtggggcctgttttctgcagcgacctatactctaagtgatatattccaactagagcagcttagagtaagttggaggccatcctaatggtgaattttcctatcattcttcacttcaggtaatgccatttaggcttttgagatttagaaatatgacaattgctttaatttgccgtctataacatttaaaaaatctagatttgcatgtgaaaaaaatatttgtgtgttcatgaagatagcttatatttactgagctcttttaattccatccagaatatgtggttctcatcatgttctggacttcctacgccacacacacacacacacacacacacacacacacacacacacacacaagcacagagccatcctgatttgaagattttggtaatgtgtttttgtacagggcataaaaatatatctctgtaattacatgatatttagtgattagataattatggataattgcatggggtagttctaagtgctaaagtgttaccataagatctaacatgtacaaattgcataataattattcttgagagttatttggtaattttgagcataattatcatgtgatccacagtgcatgtaattaatgcataatcacatggattttgccttcataactacttcacccttgttataaagctctttgtcataacatttgagtataaatataatgtaattggctcccggatacagtacattaagccccatgataattgctttcacagtaacaataccccttattccattccaattgctgtcttttaagattttgttaggaagaacaaaatacctaagatatggtggcgggcaggtagaggagtgggtgagtggcgggtactatgtgcttattgtggatgaggagtatctttgctgtgaccacaatatttccatgtagatggaagatgtttccatctttcatagtagataaaaatctgtcttctaactaaacttgtatttggtgtaaggctccttgctgtctagccatagtcagcacccattaagtctatttttttaatttttaatttttgtgggtacacaggtgtatatatttatggggtacatgggatattttgatacaggcatacaatgcataataatcacgtcagggtaaatgggatgttcatcacctgaagtatttatcctttcattgtgttacaaataatccagttatactcttagttatttgtaaatgtacaataaattattgttgactgtagttaccctgttgtgctatcaagtaccagatcttattcattctacttaactgtatttttgtactcattaaccattcccacttgccccccgccccctgccaatttccttcccagtaacaatggttacttccttctggtagctgttgttctactctctataagttcagttgttttaagttttagttcccacaaatcggtgagaacatgcaaagtttgtctttctatgtctggcttatttcacttaacataatgattttcagttccatccatgttgttgcaaatgaaagaatctcacctttttatggctgaatagtactccactgtgtagaggtaccacatttttaaaaatccattcatctgttgatggacatttaggttgcttccaaatgttcactgttgttaacagtgctgcaataaacatgggagtgtggatatcaatttgatacactgattaccttttgggtataaacctagcagtgggattgctggattatattatagctctattttcagctttttaaggaacctccaaactactctccataatagttgtactaatttacaattctaccaacagtgtgtatgagggttccctttttcctatatcctcgccagcatttgttattgcctgtcttttggacaaaagccatttgaactgggtgagatgatatctcattgtaggtttgatttgcatttctctgatgatcagtgatgttgagcaccttttcatacgcctgtttgccgtctgaatgtcttttttgagaaatgtctattcagagttatatctatttgcccatttaaagttagattattgaaatttttttctacagagttgtttgagctttttatacattctggttattaatcccttgtcagatgaatactttgcaaatattttctcctattctgtgggtatctcttcactttgttgattgtttcctttgctgtgcagaggttttttcacttgatgtgatcccatctgtccagttttgctttggttgcctgtgcttgtggagcattactcaagttgctttggctgcctgtgctcatggggtattactaaataaatctttacactatccagtgtactagggagttttcccagtgttttcttttagtcgtttcatagtttgaggtcttagatttatgtctttaatccatttttatgtgatttttgtataggaagagataggagtctagtttcattcttctgcatgtggttatccagtcttcccagcaccatttatagaagagactgtcctatccccaggacagttgacgattgttgacgatttttgcatcaatattcatcagggatattggcgtgaagttttattttttgatgtgtctttggttttggtatcagggtaatactggcttaatggaatgaatttggaagtgtttcctcctcctctatcttttggaatagtttgagcaagattcttctttaaatatttggtaaaattcagcagtgaagtgatcaagtcccaggcttttctttgcttggagactttattacagcttcaatctcattatttgttattgatctgttcaggtttttgatttcttcatggttcagtcctggtagattctatgtgtctaggaatttatccatttcttctgggttttctaatttactggcatgtagttgctcatagtagcctctaatgatcctttgaattactgcagtattagttgtaatgtctcctttttcatctctgattttatttatttgggtcttttctctttttttcttagactagaaaatggtttgtcaattttatcttttcaaaaaccaactttttgtttcattgatcttttgtattgttttcttcattccaacttgatttatttctgctctgatctttattatttcttttcttttactaattttgggtttggtttgctcttgcttttctagttctttaagatgcatcactttgggaggccgaggcgggcggatcacgaggtcaggagatcgagaccatcctggctaacacggtgaaaccccgtctctactaaaaatacaaaaaattagccaggcgtggtagcgggcgcctgtagtcccagctactcgggaggctgaggcaggagaatggcgtgaacccgggaggcggagcttgcagtgagccgagatcgcgccactgcactccagcctgggcgacagagcgagactccgtctcaaaaaaaaaaaaaaaaaaaaaagatgcatcattagattgtttgagggtattctcttttttctcgatgtagttgcttatagctataaactttcctcttagtactgcttttgctgcatcccacaggtttttggtatgttgtgtttgtattattatttgtttcaagaaatctctaaattttctccttaatttcctcattgacccactggtcattcagaagcatattgtttaatttccatgtgtttgtatagtttccaaaattttccctgttattgatttctagtgttattccattgtggtcagagaagatacttgatataatttcagtttgtttttgaatttttaaagatgcatttttttgccataatgtatgggctattcttgagaattattcatgtgttgaggagaagaatgtggatttcatagccattgaatgaaatgttctgtaaatgtcaattcagtccatttggttaacagtgcagcttggtcaatatatcttcgttgaatttctgtctcaatgatctgtccagtgctgaaagtggcatgtggaagtcttcagctgttactgtattggggtctgtctcttgctttaactctaataaaatttgttttatatatctggatgctccagtgttgggtacatatatatttacaattgttatgtcctcttgctcaatttacccctttatcattatgaccttctttgtctcttttgctagttttgtcttgaaatctattttgtctgatacaagtactgctactcttgctcttttttggtttccatttgcacggattatctttttccatccctttctttttagtctatatttgtctttataggtgaagtgtgtcttttataggcaacagatgattgggtcttttttttaatccattcaaccactctgtgtgttttgattggagagtttagtccatgtgtatttgttattattgataggtaagaacttactcttgccattttgttatttgttttctgattgttttgtggtcttctctttcttatttctttccttacttttttttttaagtgaaagtgattttctttggtggtatgttttaatttctagctttttactttttgttgtatctgtttatgttttttgatttgaggttacaataaggcttgcaaataacatcttataacccattattttaaacggatgacaacttaacattgattacataagcaaactaacaaaccagcacagagaaaactaataaaaactctacactttagcttcatccccctactttttaactttttgttgtttctatttatatctttatatctgaaaagttgttggagttatttgataagttcatcttttagtcttttaactccagatatgagcagtttacacaccacaattacagtgttatgatattctgtgtttttctgtgtacttactattaccagtgagttttgtacctttagatgatttcttactgctcactaacattcttttatttcagacggaagaaatccctttagcatttcttataggacaggtctgctgttgatggaatccttcagcttttgtttgtctgggaaagtatttttccttcatatttgaaatgcatttttgttggatatacaatttcagaataaaagggtttctttcctttaacactttaaataacaatcccgtttcctggcctgtaaagtttccactgaaaagtctgctgccagatgtactgcagctccattgtatttttgtttgtttgtttattttcttttgcagattttaggattctttcttcattcctgacctttgggagtttgataattaaatgtcttgaggtagtcttatttgggttgaatctgtttagtgttcttatagccttcctatacttgaacactgacatctttctctaggttcgagaagttctcattattatcctttcaactaaactttctacctctttctctctctccctcctctttaagggtgataaatcttagatttgtctttttgaggctattttctagatcatgcaggtgtgcttcattttttaaaatccttttttctttggtctcctctgacggcatattttcaactagccagtcttcaagctcactaattctttgtcttgcttggtcaactctgctgtcaagagagtctgaggcattctgcaatgggtcagttatgtttttcaactccagagattttgcatgattgtttttaattattctaatttcattgttaagtttatcggataggattctgattgtcttttctatgttatcttgaatttcactgaatttttttaaaacaactattttgaattctttgtctgaaaggtaacatatctatccctgtctctccaggattggtccctggtgccttatttagttcgtttggtgaggtcatgttttcctggatagtcttgatgctcttggatgtttgttggtgtctgagttaggtatttattgtagtcgctaaaatctcggcttgtttgtattcatccttcttgggaaggctttccaggtatttgaaaagactttgcccactttttgatggggttgtttttttcttgtaaatttgttttgagttcattgtagattctggatattagccctttgtcagatgagtaggttgcgaaaattttctcccattttgtaggttgcctgttcactctgatggtagtttcttttgctgtgcagaagctctttagtttaattagatcccatttgtcaattttgtcttttgttgccattgctttgtaaactagttcaaccattgtggaagtcagtgtggcgattcctcagggatctagaactagaaataccatttgacccagccatcccattactgggtatatacccaaaggactataaatcatgctgctataaagacacatgcacacgtatgtttattgcggcattattcacaatagcaaagacttggaaccaacccaaatgtccaacaatgatagaccggattaagaaaatgtggcacatatacaccatggaatactatgcagccataaaaaatgatgagtgcatgtcctttgtagggacatggatgaaattggaaaccatcattctcagtaaactatcgcaagaacaaaaaaccaaacaccgcatattctcactcataggcgggaattgaacaatgagatcacatggacacaggaaggggaacatcacactctggggactgttgtggggtggggggaggggggagggatagcattgggagatatacctaatgctagatgacgagttagtgggtgcagcacaccagcatggcacatgtatacgtatgtaactaacctgtacaatgtgcacatgtaccctaaaacttaaagtataataataaaaaataaataaattaaaaaaaaaaaagaaaagactttggttctgtgatctacgtttttaatccctgcagccatatctgcattaggggccactcaaagcccagtaatttcatggctgtttcagactcacagatgtatcaccttggcagtcttggatacaatctagaagaattttgtggattaccaggcagactttttttctcttacattctccgagacaaacgaacggacggtctctctctctccccccctccccgagcttcctggagctgggtgacgggtgacacaagcacctctgtggccaccccaccactaggactgtaccagatcagacctgaagccaggacatctctgagtcttacccaaggcccatggggtactgcctgggtaccactgttgattattcagggcccaaaggctctgtagtcaggagatgatgaatcctttcagtactgggaccttcccttcaaggcagtgggttttcctttggcccaaggtgtgtctagaaatgtcacctgggagctagggcctggaatgggggcctcatgactctgcccagtgccctatcctacttggctgagcagttatctaagttgtaagataaagtcctctttactcttccctctcctctcctcaaggagaaggaaggagtctcttttggagctgtgagctgtgctgcctagggttgagggaagggtgacactagcacccttagttgtgccagctagtaccttactaggttgtctgcaccccaagtccagtggctacaagccaagcacagcaccaggacttgcccaggaattgtagtccttccatcataggcagccttcaagtttatttaggaccccagagcactttagcccatggtggtgaggcttgtcagaactcagattctgaccactgggatgggtggtactgctctgtctagggctggtctaaatattccctccatgggctctggttgagttttgcctgttgtttttactgtgacagggcagcaccgagttccaataccaagtcccactatcactgtgctctctctcccaagtgcatgcgttctctctctggggcacacagccactgcagggggatgggtgaggggtgacatcagcaattccaaatgatcttttccaccctcttcagtgcctctttcaatgatatggagttaaaaccaggtactgtgaccactcacctgaaatttggttcgtatgaaggtgctttgctgtgcggacagttgttcaatttggtgttcctacagggaggatgattggtagaggcttctatttggccagctttctccactctcacccaagcctttttattactattaatgcagcagagcatcagttttctttttggcctagaagtttcagaaagctggaatttctgtaaggagatcttgataaactgcagtgagagggaggcttactttgctgatgggaccatcaacttaatgctgaaatgcaactaattgtgagactgaagcaagagctttggctaaatttccaaaatgatgacataatttttgcaatttttgtccacaggtttcacgtggcaggatgactatactcagtatgtgatggaccaggaacttgcagacctcccgaaaacctacctgaggcgtcctgaagcatccagcccagccaggtaagtgtggacgtggcttgttgctccttgctcccaggacacagtccatagccattacacttattatttgtttgtttgtttgttttaatgtagcaaagcacccaccatctttctggtgcagacgtttcagaaagttaggatgtctgtaaggaaaagtttggttcccatgagagaaagcgatattggggtgaccctccagtaagagacatgcccaggggttcttcgtttttccatgagactcttagaaaaatcctgcatcttcaaggccttggtcgaaagcagataagtcgagaattctcatttctcagtaagaaattatttttgctttagacaaaaaacagaattgtgaaagtctttatcatcctttcccagagcatagcaacgtatactgagctaaatatattgttccatattatcttattttgtactcaaaactatgtggtaattactaatgtcatacaaacgatgtggtaatgtcatacataccatggactaatgtcataccgattcttgaaagtgaggaaattgagtcatagggaggttaaaaaattagtctaaagacaaaccacagtaagaaagctggcactgtcggattcctgagccattgtgctatttttcatgttttttaaaaaaaaacatgaaaatgacctttcctaaaggtttagtttgaaaagttcatttttccctgacagacaattctagagtcatagtctttagaaagattccagtaacacaaaatttagatatctgctttcatgctcatggccatctgatagggaaagcagttaagtgtcctggcaggatcaagagtgagaacgtgtggagaactggtaaccgtcccccagcacgccgcacacactgagggcgcgggttgcctctttcctcagaacgcggcgcacactgagggcgggggctgcgtctttccccagcaagcggcgcacaccgagggcgggggcttcgtcttcaccacacggcgcacgctgagggcggcggctgcttctttccccagaacgccgcacacactgagggcgggggctgcgtctttccccagcaagcggcgcacaccgagggcgggggcttcgtcttcaccacacggcgctcgctgagggcaggggccgtgtctttccccagaacgcggctcacgctgagggcaggggctgcgtctttccccagaacatggcgcacactgaggttaggggctgcgacttcagcacgcggcgcacactgagggcaggggctgcctctttgtgcttctgtgcctggtgtatctacctttaatacctcctttatcaaagagaatgtgctgttatagtctgtaagacttttctgtaggaaaccaaacaaaaacccaccaaaatgttttcaacttgagctgtgttgaatttctattttggatgtgttcaaactccttatactcctctctaaattccactgggggcgttgtgcactgccccaatgaccttgaactccatcaagtatagggatgggttggacggccaagaagggcaaaaaatagagggctggaagaattgggaaaaccaagcaagggatggctcctcctcactctgggggggtgcagaacagggcaaacagaagctgccaaacgtgggaggaaaggggcgccacatagagaacaatccagggaggacctgcctctgagaaatcaaactcagcaacaaccatggagaggcgcctggattgtgccttctaaacaacgttaaatgtggtcatttggaaaaattgccagtttttattatttaaaacagtgccagttttattatgaaaaatggtatgttatctttgttttatgagttataagtgagattaaaagtttaaaatacatatgctttgagattggaattttctccttccttcctcccttccttccttcctttttctttcctctttctttcctcttcttttttttttttttttttttttttttggctcttgcttcatcacctaggccggagtgcagtggcacgatcttggctcactacagcctccacctcttgggttcaagcaattctcttgcctcagcctcctgagtagctgggactacaggtgcgcgccaccatacccagctaatttttgtatttttagtagagatggggttttgccgtgttggccaggctggtcttgaactcctgacctcatgatccgcccaccttggcctcccagagtgctaggattacaggcatgagccaccacatctggccgagattggaattttctttgtgaattttctgtatatggtctttgtctgtataaaaaggactttttgtatttttctgtttgtttcttttattataggttctttatatttcaggctagtaacttttcacatattatattttgtaaaaatatttttatcagcctggaacgtagatggcactagctatggttacaaataaaaacagctcttaccattctgtaggttggatttctaaattctttctttgtgagtgttgaacccaggcaagagcaattatccctgcccacaaaacagaggcccatttagggaggcattggctggatattctccagactcctttcctccacactcccttcccctgccctgctatgggcttcatgcctgtaagctccatcgggtcctctgggcctctggctttggtggggtttggaacaagctgcacccagcatggagggcagaggagtctgggcatgttccccagctcttccccaggcccagacatgactgcctggggacaatcactccctctcatgctgtccctcctgctgacccaaaggcctccccagtcctgccggtgccttcctcatgcccgactctgacacctactgagggaggttcccatgaggccctgcccaggagagaataagaaacagtgtggcccatcgtcttcctcaacagttgcccacagtatttcctcatggaaatgtgatcgtttttctttttttcctaacatttctggaaaacttcttttaccattgatctactttctagtatattttttaggaatgttcttcatttatagagtattttcattgtcttccacgattattggtaaaatatgcttacactgttgtgtgatttgggatatttataagctatcctttaatagcgatttccacatttgtaaatgcagtgtagtggatgctattctcttgttgatgaaaagagtcaaactctgtaaaatatttttagagatgtattctgagccaaatatgagtggccatagcccgtgatgcagccctcaggaggccctgagaacatgggcccagggtgctcagggtgcagcttggttttatagattttagggaggcgtgagacatcaatcaaatacattggtttggttcagaaggtgggacaactcaaagcaggggcttccaggctataggtgaattcaaacattttctggttgacaactcgttgagtttatctgaagacctgggatcaatagaaaatgttccagttaagataaaggattgtggagaccaagttttattgtgcagaggaagctctcagttagcagacttcagagaaagcaggttgtaagatgcttcttattggacctaaaagggtgcctggctcttggttgattatctcctggatctggaaaggaaggaaggaaaacaaaggggaaagtagatccctatagaatgtggatttttcccacaagagactttgcagggcaatttccaggtattgcaaggaaatatattttagagttaaatattttgattttttccctttgtctcataatgttctgccagagtcagactgaaaagtcagtcacgatatatagggtcaaataaaacccatctgatgagaatttatggtttgtggggtatgacttcccagacctcttagataggaatttggacaagagaaaaaatcagagcttagttctcactattatggtttttaaaattactcagcacttgtgtagttatattcctttgcattgtaaacgtacgttttctttagccaggtgtggtggcgcctggctactcaggaggctgagagagaggatcacctgagcccgggggattgaggctgcagtgagtcatgatcacacacagcactctagcctgggagagagagtgagaccctgtctcaaaaaaaaaaaaccacttttttttcacccttgtaacatgatttttaaaaagaattatctcttagattttcttctttttgctgttctcttttaaataaaacttcttcagtaaaacttatttacgctatttattcatttttaaaaaaataatgaaatcacataaataatttgcttttgagcataattttaacatcattctataactgatgaattctcacttgcttttgttctaaattatctgtaattgtcattttatatccttttgaaacaataaatgtttggtaggcttttctactttttcatatttatgtgttgtttttaaacttcaaattagtgtctaattctactgcattttagtcagaatgtgactttgttcaacttttactctttggtaattttgaggttttctttggcctaattgataccatacttaatcttcaattggcgcttcaaaaatatatttgtataactatttgcaggatacagacttttataaatagtttataattatatatatatgatgtgtaattaggtaaaaatgtgtcaattgtattacttcaacatgtccttatttatattgtgactttctgaaatttctcagacaaaaacagtaatctgtgagttttctttgggggttgatgtgtttagcttcataggctctgaggctctgctgcttagcacacgggggctgcgtcagctcgtcctcggcgtccatcattagtggattgttgtttaaatggtgcctgcatctcccttaatgcttgttgtcttggattccattttcctaaatgagtagggcctttcctgcttcctctttgtttttgttgcctgattaatccatggctatcttcagaatttgacctttgagactggttctgtttgaaactcagcttttataagatcaagtggtgtttccaaagccccttgggtcaggtcggagggcgagttatagcagcaaggggactgattcctctgtggggctttttcttctcatatgtggattgtggcttgtttgccttctcatacgtggattgtggctcgtttgcctcttctttagtattcgtaattttgtcttattttggatttaatttgtggccatcacctctagattttcaagcgattttatagtaatggatttgtttcattcctcattaaagggatcatgttctgattcctgctgcatgataaggaaccgtgttggctttcagcatcctcactccccactcccaggagctgcttctaaccaggctcccctagtgcctgcctgtgcccttcaccagatggaccctgggccagcatttgttggataaatggtggtgaaggacagaatgcgtgatctgcccaagcctttgaattcttgcatgggtagctacactaacgaagaatgtcacctggctttctccactccatgtgtattcagagcattctgagcttcacagctgaacaagaatccaccatgggccagtgacatagtagctggtgttctttacataaggcagttaatctccagagattgagtaacttgctgaaaaccaatcatccattcatgaaataaaggcgacattagaatgaagtcttcagaatccccagccctgtttttgggcttaccagagtggcaaccacaagctcatttctcctgctggttcttctcttcccacacatgaggtcccttaagcagagtaagccccatgagagaaagccagaaagagacgcagtgtggaaaatcagcaaagcagtaggtatgagtgcccagtgtgaggaacagagctcgcacctaaggggtcaccaggaacctgagaacatgctaaaggctaagagaacctgagaaccaggaacctgagaacacgctaagggctaagagaccttgagaactgagagcctaagaacatgctaaggactaaggaggacctgagaaccaggaacctgagaacatgctaaagtctaaggaggagctgagaacatgctaagggctaagagagtcaaggaaggggaacctgagaactgagaacttgagaacatgctaagggctaagataaccaagaacctgggaacatgctaagggctaaggaggatctgagaagccagaacctgagaagaacatgctaagggctaaggaggacctgagaagccagaacctgagaagaacatgctaagggctaaggaggacctgagaagccagaacctgagaagaacatgctaagggctaaggaggacctgagaagccagaacctgagaagaacatgctaagggctaaggaggacctgagaagccagaacctgagaagaacatgctaagggctaaggaggacctgagaagccagaacctgagaagaacatgctaagggctaaggaggacctgagaagccagaacctgagaagaacatgctaagggctaaggaggacctgagaaccagggatcatgctaatggctaaagagaaccagggatcatgctaaatgctcctgaggcaggaacagggacaacaaataccagctgtgtatatgagcaccgatgacttcacagagaacttcaggtggccatgaaggttggatataaaacataagatgggcctgtaatgtggaattttttcctttaacaaactgggtgacaatctagactatctcatattatcgtgagcctaaggccagtgtgtgccaatggagaagggaatagctactaagtgtaaaacatttttcatctttttaaagtacaaaattcatacgtatgaagttttgacctacttcaagctggatgacagagcaaaagtcaatgtgcaagttaattgctacaacaccacgcggcataatgataaaccctctcattgccgtaacatactgcagcatcacaaacaagtccccaggcatggacagaggcgaagcaaagatgaatacgacaatttaaagatacatttatgaggtggttccatttgcattgattagcaattagtgagaaaagtagacaaaataccagaaaagtaaattaactgcagttaaattacactctgacaacatagaacatgaaatttcattaattaaaaaatggccaaggaaattatagccatgatttgagatgcaaagaactgcaaaagccttggtaatttatatgcctgttacatctgtatcagtgtaacttgaaaagtgatattgtttggctgtgtccccacccaaatctcatcttgaattgtagttctcataatctgcacgtgtcatgggagggacccagtgggaggtaattgaatcatggaggtggctgtctccatgctgttctcatgatagtgagtgagttttcacgagatctgatggttttataagggactctttcccctttgctccttgcacttctctctcctgccaccttgtgaagaagggtgtgtttgcttccccttctgccatgattgttacgtttcctgagacctccccagccatgctgaactgagtcaattaaacctctcctttataaattacccagtctcaggtatatctttatgagcagtgtgggaacaaagtaatacaaaaaggcactagaaataaaaacatggtgggtttatcaattgagataatcaagcaaaaatgggattttttttataagccccatgcaggtatcacacacctaatgttagtgatctgttcttgaaaatcaacatcctacatggaaacagtacctggaaacctattccattactgtatgtgggaaatttgtaatgagttccacatccactcaagccccagtgtatttcctaaagtgtttctaaatcacactaaagacccatatacaagtaccagatggtcatgtttggatagaagacacttcttgctgatacccagaagtggaaattgttcttagcaaagtgtatgttctatttgaagtaatactgcctcactcagcacctgcaaagtctgagctgcacctccctcaggctgttgggtgatgccacagtgctgtgtttggagacatacccagactttttctgaatacgattttgttcagaatgtagcatcaaattctgtgaaaggagatacacatgcacacgcacacacacacacatacatgtatatacatatatacgtatacaggtgctccttgactcatatctacctcctgtgcctgcctagggagcctgggctgttcatatccctcattgtggagctctgctggggatgatgtccttcagtgtcgtatttctaagagagccataagtctacctttgtatttgaaggatattttcatgggatatagaattctgggttacttttttttctttcactactttaaaaatgttttccatcgtcttctggcctggagcacttctcaaggagaaatctatagtcgcctttccactggcatcgggggcactggattgaagtcccccaagatcctcactagccgtgggcagggccccaggggtgcccggggagctacatctcggttgggtgtctggacagcagactctgtagtcctgaagtccaaatgcagggtcttgggaagacccctcatggggaagtgaagagacgggtttggccgaggagaggttggactcagtgtggtcatgacagaggcctcaggagccctcacccctcctcaggggctggggaccagtgtgggatgcagacctccctagatggggtataaacgtgggtgaggcagacccccatggtggagggccattttgggaggggacgcagctgtgtggcgatgacacttgcccccagctgcctcagggacagtggtgctcagtggcctgccagagttgatgagacagagctgaaggtctggggaaaccaaggcagcttgagttcacaggtcagagtataaaagagaagagtgcacagagagccctggagattttcagccactgctgaggatttggtagatgactgatgaccttgtgtctatgagggaaaagaaccatccaaaaaaatgagagcaaacagtatctgacattcacacagggtgcgacatagtgcttcttcaaacctatcaagacttgcaaacctcataatttccagataattgggtagaatgcccacagagtcctgtcttagtagtggggagtaatttgtcatagataattgctgctctgatactgccaaacaagacttaaaagtaagaaccgagagggttgaactggtcccaaggaacttaactgaatgccagagcaaaggtaaataatatttatgggattgcaaatgtccatcacccaataaggtaaaattcacaatgtgaatatatagacatggattatctggcatgaaaaggagcaggaaaatgcaactcataaaattcatcagtgtagacacagaactgacacagacacaataagtaggagacaggaaaatttcatgggtggaatgaatagcagattagacactgtggtagaaaatattagtgaacttgaagacacagcaataggaactatccataaggaaacaaggaaggataattaaaaaaaaataaaaaacaccagtgagctatgggacacatctaaaggccaaatatctgtataactggagtcccaaggcgggagagacaggaacagaaaaatcatttgaagaaataatgaggaaaattgtttcaatatgataaaaatgataaactcacagagccagaaagctcaataagccccctaaaaaagaaacatgaagactaagaaatatcataataaaatttctcaaaaccagtgataaaaagccaaccttaaaagcagccagaggaaaaaaaggtgcatttcatagagagatgagatgatgaaggccactgcaggtttctccttgagaatgctccaggccagaagacgatggaaagcatttttaaagtactgaaaggaaaaacaaacaaacaaacatcaacccagaattccatatcccatggaagtatccttcagatacaaaggtaaaattattggctttctcagaaatacagacgctgaaggacatcatcacccacagagctccatgaccagggctggtaaagccgccgttctggcagaagggaaaggtgccagatggaaaccaatgagagaacacgcgaaggcaactgcatccaccgatagatggtgttttcctgtcacttaaatcacatttaaagaagttgattaaacaaaaatgatgaaagtgtattgtgaggttgataacatagctgtcaacagaattcatgtcaacaccgcatcagagctggagggagaattgcaaggatctatttaaggctcgtatttcatatgttaagtggtgtgatgtcccttggaggcaacctgtggtcagttaaacgtgacagttatacactatctgtaatttgggcttcttgccctaacgaggatctagacttagatgttgagaaggtgaaggtggagccatgccccagggctctgaggcagccagtgcctgggcgctcaggaaagtacctgcctccacctcggacctagcctctccctggcctgagagaagcagatggcagctgaccgcacctgtaaagcctgttatgagggaggcctgagtcttgtgctggcagtggggcatgacgccggggcctgtggcgtctggaccgtccactgcagcacaagtcggacctgaagtgattggtcatcgctgagcatggctctcagcgggaaggggatttgggagcattgctgagggcggcaggttcacagagggccctgcccttgtctgtgggcagcagagccggacagcaagggcccccagactggcccatctttttaatggtgatgcccgttcttttatggacataaatgacgcactcaattaattatacaaactaaaaataaccagaattaaaagctctttggtctgtgtctaaactccatgtctacgaaatctttgcattttattagaagcatggtgtgtgcgtgcaggcgcacacatacacagacaaacgcacacacgcactcacacccctcacacactcacacacacacttacacaaactcacacacgcacatgcgcgcgcgtgcacacactttttttgttgttgttgaaacagggtcttcctctgttgcctgaggctggagcacagcggcgctatcgtagcttactgcagcctcaagttcctgggctctagtgaccctcctgcctccacttcccaaagtgccaggattatagctgcgagcccccatgccggcctcacattatattccttttttttttttttttttttgagacagagccttgctggaatgtggaggtggggtgcagtcactcacgcaggtgttcttaaacctggctggtagaggcgtctcctatgggaattatcttccttatttaggagcatgctctgggcccttttggtcatgtgcaaaaaagcaaaggcctccgtgggggctgtgaagctctgggcggctgagtcctgggtgcagagaccagcggcagagtctgcgggtgagctgggcagggagggccatgcccatccctagggaggccatgcccatcgtgtcccaggctgagacgctgccccgtggctcaggcaagctctccgccacagctgagggtaaagggggacagggcgcaggctcagggggccacggacatcctctgtgcatgcccaggcctccaccagggctccccataaacatggggagtcctgactctgtctctccggggcctgttgggcgttaccgcgacttttccagtgaatctccctggttctgctcttcctttccgtgtggctgcacaagctggtgatgggggccccactggcaagtggctgctttctcagggactctgagcatcattagtgggggccacatgtggctgacacgtccagctgcctcctggatttatgccttcagcacgcagctgtcccatggggcccctggccagccgtgcctggttcttggccttgtcctcgctggccctacccctgccgccctcagcagggtgggcaccacatgtgtctgcccacgggaagcgtcccatgtgtttgtccttctagcctccggcgtccctgccctgcatggtgcacgcgatggcggtgcgtgaatcactgtttaacagcagggactgcagcggaggggctgagagcactgcatggacgtcccgaggctgtggcgaagtacatcaacctaaggcctaaaacaatgcacatttatcaggcgagaacctggttcctgccttttccagcttctgggccgccaccttccttggtctacccacaaacccagcagaagccatgccaagccttgggccccccatgcccacccggcctctggctgcctcagcctcctggagaattcctgctgagcctgcagccaacacctgcagcttcctccctttctcccctccccttgtttcccatgtattgcttttgcttcctgtcttctgctctcagcaggggtcaatcgtccatccccacaaccacgaggcaggtgctgttagccatcctcgtgcaggacacaggctcgggggcccgggagaagttcaaacccatggtcatggagcagcaaggccaggccggccaccgagagcccggctcccagccccttgcatgcacccaggcaccacaggggacagagcagctccaggcaccagcaaacatgcggttgatgtctggtttcttttgctttttcaggccctcaaaacacagcgttggcagcgagaggaggtacagtcgggagggcggtgctgccctggccaacgccctccgacgccacctgcccttcctggaggccctgtcccaggccccagcctcagacgtgctcgccaggacccatacggcgcaggacagaccccccgctgaggtgacccttccacttcctccccgggccggggttggcttttccttcagggtgcaggtacctgggcatgtttccttagtcgctggctcctcttggctttgcgcctgtttcccgggccagcgggcatcctgtgaacagggcttcggtgttcctggggccccttagagcgacacctgctcccagtccagccacccccacaaatgcttagtcctctgggtgaggctctgtaggatctttcttgggacaaggtgtcgtgactccagaaagcccaccatttaaaccacagatgcacaccagggaggtagaggagataggtggctgctcttcaccctttgagaaaggatccgggacagcagtggacactgaaacctgactgaggtagactgaggggccatgaacatggctggaattagggggcaccaggtgcaactactgcatccaaggaaagctcctgctccccggcaagcctgccccgggggcagcccagggcagcgtaagggctccatctgcctgtgggcatgagggtctgggcaccaaaacacaaggtgatgccctgggcacacagaccccagacaggctcggaggcgaaccccaggagtgtttatgcagggcgagtgggagctgcaaggacccgcatcacagagccacccaagacccttcactatgcgaagcccactcaacatcttaaggacacggaattaggaatctcagtaaattttgtaaatggaaaagcaggcatgatttttatgacgacttgttaggccagagttcacaggtcccacattgcctggaaagagggagggacaagagctgcagaaatcacctttggagcccagccctgccagcttcctgggataggattttggaccaggtgttgaggcccaggatggccctggggacattgggggtttgatggcgacgctcacacactccttttctgccaaacgttagttacatcagctctaatttgacacactttcctttctaagatggaagccatgctggtgtgagacaggaaagcctgaggaccctctgcatcctcttggactccactggggtctcaccaggagctgtggccctgggatatgtgtgggaagcaatgtgggcccagtttctattatgttcctgccatcgagccattgaaatgacttaagttaactctgggcaacccccacagacctcgaaaggtagagtcctcccagaggacgcgtggccactaagctcaatcccaggccagcttaggggcttcctggaaccttgcaccaagcgtgggaaccacagggtgagtttccacagaagttggccccacaaggtggcacgttctgtgcaggcaggtgaggaagctgaggcacttctgtgtcttagcaggtggtgcctggggaaggcccggccttggccccatggttctctggagcctttccgagggcagctcctgggcagccatctttgctgtggccttgcctcttcaggaggatgtcacaatgacgtttgaatgcagaagccagtctgtccacggccgccaaacagagccctgatgctggcccagagccatgcaggggccacggggtgccagacccacaggccacagttgagaggctgctcaggagggcccagtggcacctgggccatatttgtgtttttcctgatcatggactgtgtttcctggttggttgaaatcacccctcatggtggagggtgggggtcttcagccctcgtggaagtacagggtcacagggctctgtgggccccaggtctccctctaaggttaggctcacaatgaaaggccagtcccagccctgctctgtgccaggcccacctcccatcaggaccactggctggcctgaaaaacatgccccaaagccttccaggagcctgtgggagtctctctgtgtgggcctaaccctagagggtctggtccacttaacactattttaaacaggctaaatttaaagtttttattcattaactgagagcaactaagcacgtctggtgcgccagacatcctgctggattttgtggatgcagaaggtggatttcatgcagctctgtccttgggtcagaggctcctccacccactgctctggggccagggggagccgctcagcttctgtgcctcgagtcctcagctgtaaaccaggggtagtggccctggaggtgtcatgagagccacgtgtgaagctcctcatggagtgcccagtcagcaatagctgtaaccgtaactatcgttgataaaataatctttaaaaaatgaaatagaaattaggttgagagtctgaaccaggctcagtggaggtctccgactctgatgagaggaatcagagggcgccaggacactggcaaacatattccctccgcacacctgtgcctcggcaccacagagcaggtctcagcacagcacggtggaaactggcatttctcccaccctcttgaacgttggtaatttagcacctccagctctgaaatcattgctttgtcctcctcctctgccccgctgtgtctttatcagaagggctgtggggccctgtgctctgcctccactgctgctgggagatttcaggcttctgtaacggcgccgtgacgtcacgtccccagacgctggaagtgaatgatcagtaaagtaacccacgtgcagtccagagatggttttagtaacatacgagggaagggggaggcgtcattaaaagtttcagagactcggaagaagtttgagagaagggaaatcagttgacacttttctgtgaagcagtttcctgtctttcccccctgacttgacagtggcgtgctcacctagactgacgtccaagggccctcttcacgggctactgaatagagaaaggcaggagcgtagccttggaggctcgtccaatgtgccttggatgggccagtgagcgagtcgtcacctgcaaacagcatttggtttcattcaatgggagcctcagttgttccattttgaacccatcatcatgctcctccttcggtttcagttattttattaaatagccctggcactaaaataaaagagtcagagttagaatggaatttgcctgtgggacaaggcgcagcatggattcgcctcgagggtaaatggaatggctgcagtgcttccctgccctcagcagccagacgtgaggtcggccaagcagccgcaacatccacacattagaaacaaaccgtagcaaattgcaggaactcgttgagagtgaaggtctttggtagatattgagcaattcgtgctatgagccattgggaggtatcctagtgatgccccatgagatggctcatagcagcccctggggaaagcaagttcctgccagagacaggatgccttcctaggccgagcacagtgtactgcatgtcctgggatgctttccaggtgctcagtggttctgctggactcagcagctcagtgctcattaggccaaagggcccgtggcctcgtcacactaaccagttgtatttactgaagtctttccattcctggcttactgcactaggattccagcaccagcattctcaacacacgccccggagtgctctggaagcagccttccccatacagcgggtgagcgtggcggccttccccatacaaggcggcgagcgtggcggccttccccctacagggggcgggcgtggcggcctttccagtacagggggcgagcgtggcggccttccccatcagggggcgagcgtggcggccttccccatcagggggcgagcgtggcgggcttccccatcagggggcgagcgtggcggccttccccatacagggggcgagcgtggcggccttccccatcaggcggcgagcgtggcggccttccccatcagggggcgagcgtggcggccttccccatcaggcggcgagcgtggcggccttccccatcgggggcgagcgtggcggccttccccatcagggggcgagcgtggcggccttccccatcgcggggcgagcgtggcggccttccccatcaggcggcgagcgtggcggccttccccatcagggggcgagcgtggcggccttccccatacagggggcgagcgtggcggccttccccatacagggggcgagcgtggcggccttccccatcgcggggcaagcgtggcggccttccccatcaggcggcgagcgtggcggccttccccatcgcggggcgagcgtggcggccttcccagtacagggggcgagcgtggtggctgcctctgcactaggacatcccttccgttgggagctcgtgacggggccactgggggttcatctcttgggttgcgaccctgccgctccccagggctgctgggtgcatggaggaggagcatcttccaccactgcccccatcttgcctgctctccatttcaagaaagaggaatgggagaggggcgtgggcaccggtcatgtcaaatattccaccagcagccagggtccaccttctgataagtttggctgtgtcaccttggaatctcctacacacgatggtcggcctcacagtcctggtctctactgttactcagcataattatcaggaagtcattctttcccactcggaggtgtcccagtttgaattaatgagctccgtggtcattccagcacacagacatttagcacagctgtcaaacggttattcagaaaatgagcacttggtggcattttggcttaggtatttttcttctttgttaagatagatgcttctcagtatttaaaaaaatgcatgaaaacccagaactcattttcttttctgtccagtgtttaaatgaggagaaagctcttagtcatcttgctaatgaacaaagactgaataagcacaggaagtgcgtgaccagaggctgcagcgctgccgtgcagattttgctgccccgtaaatatagggacttagagatctgggccccggcttctcccctcccctctcagctgatgaaatattttaattggaaatttaagctttatatactgacgatctttgaaggtacaatcaacttcctgtgaattattttataaatcattgttttctatgtacccatcatcaaaaatgaaactctagcgtagatggagaaatatcctaaacatattgcctttcagggccttcatgctggtgacgtcataacagaattattttattttattccactgggaatataatcatgctctttctctttgttcattagcgagatgactcagagctttctcctcgtttaaacactaattgagcacttattgatcactaaatcaaggtgtcgttacgacttctgcattgtgagggtggtaacgcttcctgttttattgactgtggtagcaccagttcacagtccttgaactcatcatgcagaacaccataaattccctgtccactctgttactgaggaggtttagtcagaaattcattacttaccaataccattaactagctgatttatcttggaaatgtttaaaaaacatatttaacatacaagaaatggtgctagattaaggaaatgattaaggaaagttagtttctgtcctttaggattttacagttttgctgggtaggagggagaaaacaagcaagcaaaaaatataattaaaaaattaaagcaagtgctgtgatggagggaacacagaaagtaaaggtgcactcatgccagagggggcaggtggcccaggcgggcttctgacagagggggcaggtaggcccaggcgcgctcatgccagagggggcaggtggcccaggcgggcttctgacagagggggcaggtgggcccaggtgcgttcatgccagagggggcaggtggcccaggcgggcttctgacggagggggcaggtgagcccaggcgtactcatgccagagggggtaggtggcccaggtgggcttccaagaggacggccttgggggacgaccaggagacacctcctgcaggtgtacgatggacgtagggtgcagagtgtcaggagcccattctcctcccaccccgaccacatgagtgagcccccgggagaaatctgccaggagactatccccctcccaccccaacaacacgagtgagccccaggagaaatctgccagagctgaggacacaggaaaagaggatgaactgcattccagaaagggatggatgaacccattccaaggagaggagaccacagcttctttcatgcgcattggaatggaagaagcagaagccagtcacaggaagtggggagaattcggcctaaattttaagaaactcttgaggtgcatggaacagatttgagagacaggctgtgcaaagcgagtgtctgcacccccgcctctttcctgtgggctttcgctgagtatgtgagatgcggcactagggatggaggagggagagggctgggagaaatcctgccaaggagcaccaggcctctatggagtgccccatgtggccttctgaagactggggacaagggagcatggtggaaaaagatctgttgaatctttctaagggtgcagaaagccagggtgggaccgacggggaagagaagcttcagaaactcacaaactgacacttggaccataaagcagagagctcccccatggttcagaaacctggcggctgagtgcagagcataaagggatctcgagtctcactggagcccagatccaagcctgggcgaagaaggcaacttagacctaaaggatggaaaatgtgtacgatggaaactcgaaaggcaggaaagctggtgtggtcatgttaatattagacagagtggacttcaagactaaaagtgttattcatgacagagacactttatgatgactaaatggtcaattcattaagatgctatagaaaaatgttatgaaccaatttcagagcttcaaatacataaaggaaatatatgagagtactaaagagaggaacatacaggtcgatcatgatcattaatgattgaaactctcctctgtcagtaactgattaaacaaatagataaagtatcagtaaggatagagaagatttgaaccacagcattaaccagtctaagctaagtgatgtttatagaatgatacacctaaaaactgctaaacacacattctttttgagtatgttatatagaatatttcccaaactagatcaaatgctgggccataaaataagtctcaataaatgtcaacagatcaaaatcatacagagaaagattttaaaagaaaactgcagattattattcttcagaaatatagaaacaaaaattctaaacaatttttatcaaattaaattcaacaatatataaaaaagaatactgcatcataatcaaggcagatttatcccagatatgcagggtatatcgaacatttaaacatcaaccaacataactcaccatagttacatagaccatgtgatggtctcagtagatactggaaaaagcatttggcaaaacccagcatccatccatccatgacggaaacctacatctaagattacatcaactggtgaagggctgaatgctttccacttaaaatctggcattagacgaggatgtctgctcttacctcttcaattcaacactgcattgaagatcttttttttttcttttgagacggaagttcattcttcttgcccaggctggagtgcagtggcacaatcttggctcactgcaaccctctgcctcctgggttcaagtgatgctcctacctcagcctcccgagtagctgggattataggcacccaccaccatgcccggctaatttttgcattttcagtagagactaggtttcaccatgttggccaggctggtcttgaactcctgacctcaggtgatccactgcctgtcacattgaagatcttagccagtgcaataaaacaagaagaaatgagaggcattcagattacataacctttgtcaaaaatttggtggaacctacagaaaagctactaaaactagtaaatatagcaatgctgtagagtgcaaagtcagcacacaaaaattaatttatttctgtatactagcaacaattaaatatgaattttaaaaaatatagtagcatcaaaaattatgaaataattgaggttgaatctaaaatatgtgtaagacaatgtacaatgaaaactacaatacattgatgagaacaataagacaaattaatggtgatatatacatggtcatgtgtctaaagactcaatagtgttaaggtagaaattacctccaaattggtatcaatatgatacaaaaacacaatccttaaaaaaaattgataactagaactttgtcaaaatttaaaaattttcttcttcaaaagaagacacttcttcgaaagacacacaaaagattgaaaagacaagccacatacttagaaaaatacttgcaaatagcactttttaagataaaaaatttcagaatgtataaaaatctctaaaaactaaaaaagcagcacattaaaaatgggcattttttttcaagacagtggattagaagcggtgttagcatgcctctcccacttggaaagacaaaatagtgtgtaaagattcacactgtgaacttttttccaagaagcgacaccagaacttgacaggaaaactaaaagaaaccacagaacctttgaaagaagtggcaggctgcagcctacactgtgagccaagcaaagaactgtaagccccacagtgtgagggggagacactgcctccaagatatgcacccccactggagaattcagcccatgggggcgggaccttaaccctaccaagtcctggaactgatttagggagcagtggagaatataaagtaggagaagcagtagaaagagccctgtgtgcattcccagtctccagcatggattggggaagccattctgcctcacaggggaccttgcggaagtctgccaaccaactcagtcagtggccacgggttgagagaagctcccaactgaaatttgcaatctaatcttgagtggggacaaactcccttggccataacccaggggggagtgggaagcacgctgcagccacaaacacaggatctgggagcctggctttgctgctggactgggatagatgtggtctgaaagccacacttcctgtctccatgatgattgggacaatatctcacatctcaatattagtgttgaatgtaaatggcctaaatcctccatttaaaagataacagattggtagaatggataaaaagacacaaaccaaatatctgctatctcaacatagtcacctaacacataaagatgcatataaagttaaggtaaaggggtagtaaaatatattccatgcaaatggaaaccaaaagtgagcaggagcattctaatatcagataaaacagactttaaagcaacaacagtaaaaagagacaaagaaggtcattaaatgatgataaaagggccaatccaacaagaagatattacaattctaaatttatatgcaccaaatgctggagctctcagattcataaaataattactgctagatgtgagaagtgagataggcagcaacatgccaacactgggggacctcaatacttcactgacagtacaggacagatcattgagacagaaagtcaacaaggaaacaatggacttagtctacactctagaacaaatggatctaacagatatttacataacattctaatcaagaactgcagaatatacattctcctcatgagcacatggaacattctccaaaatagagtagatgaagaaaatgtggtacatatacaccatggaatactatgcagccataaaaaggaatgagatcatgtcccttggagggacatggatgaagctagaagccatcatcctcaacaaactaacacaggaacagaaaatcaaacactgcatgttctcacatataagtggtagttgaacagtgagaacacatggacacaaggaggggaacaacacacaccagggcctgctgagggttggggggagagtggagggaaattagaggacaagtcaataggtgcagcaaaccaccatggcacacatatacataggtaacaaacctgcatgttctgcacgtgtatcccgtctttttagaagaaaaagtaatgaaacaaaaaaagactgtatactaggctacaaaacaagtctcaataaattttttaaaattaaaattatatcaagtatcttctcagaccacagtggaataaaactagaaatccactccaaaaggaattttttaaactacacaaatacatggaaataaaaaaatatgctcctcaatgatttttgggttaacagtaaaatcaagatggaagtttacaaattctttgaaatgaatgataatagtgacacaagttatcaaaacctctgggatatggcaaaagcaatgctaagaggaaagttcactgtgctaaatgcctatatcagaaagtctgaaagagcccaaagtgacaacctaatgtcacacatcaagtaactagagaaatatgaacaaactaaacccaaagctggaagaagaaaataacaaagatcagaacagagctaaatcaatttgaaggaaagaaacaaatacaaaagatgaaacaaaaaattggttttttgaaaatataaacaaaattgatggaccattagctagattaatcaagaaatgaagagtgaagattaaaataagctcaactataccacagaaatacaaaagattattcacgactattatgaacacttctatgcatacaaactagaaaatctagaagaaatgaatacacgaatatattcctgcaagcatacaaccctcctagattaaattaggaaggaataaaaaccctgaacagactaataacaagcagtgagattgaatcagtaacttaaaaattgcccataacaaaaaaagcccaggaccagatggattcacagctgaattataccagacactcaaagaattggtaccaattctactgaaactattccaaaggatcagggcagagagaatcctccctaactaattctatgaagccagtatcactctgacactaaaatcagggataaaataatgaacaaaagcaaactatagaccaatatccctgatgaacatagaggcaaaaaccctctacgaaatactagctgactgaacccaacagcacatcaaaaagataataaaccatgatcaagtgggtttcatcccagggatgcagggatggtttaacacatgcaagtcagtaaatgtgatacgtcacataaacagttaaaaacaaacaccatacgattatctcaatagatgcaggaaaagcattcaataaaacccagcatcacttcatgataaaaactctcaacaaactcggcacagaagggacttacctcaaaataataaaagccatatatgataaacccacaaccaacattatatggaatggggaaaagttgaaagcatcccccctgcgaactgaaagaagacaaggatgcccactctcaccacttctattcaacatagtactggaagtcctagccagagcagtcagaaaacagaaggaaataaagggcatccaaaatggaaaagaggaagtcaaactattgctgtttgccaatgatatgatatacctacaaaaccctaaagactcctccaaaagactcctagatttcataaacgaattcaggaaagtctcaggttacaaaatcaatgtacacaaatcagtagcagtgctatataccaacaatgaccaagctgagaatcaaatcaagaactcaatcccctgtacgagggcttcagaaaataaataaaatacctatcaatatacttaaccaaggaggtgaaagatctctatacagagaactacaagacactgctgaaatacactgtagatgacacaaacaaatggaaacacatcccatgcttatggattggaagaatttcatgaaaatgcccacactgcccaaagcaatctacagatttaatgaaattcctatcaaaataccaacattattttcatatagcaccaaaaaatagcccaaatagcaaaagcaatcctaaacaaaaagaacagatctggaggcatcacattacctgactccaaactatactacaaggctagagttaccaaaacagcatggtactggtagaagagtaggcacatagaccaatggaacagaataaagaacccagaaataaacccaaacacttacaaccaactgatctttgaaaaagcatagaaaaccataaactggggaaaggacacctgtttgataaatggttttggtaaaactggatagccacatgtagaagaatgaaactggatctctattgatgcagggtaaggagccccaaagtggggcttagcccaccagggttcttggctttgcccaggaaagaattcaagggcaagctggagataaaagaaagcaaccttattgaaaaggcagtgttacaactctggcagtgttttagctctgtgactgctcctgcagagccaggctaccccataggcagagagtagcagctcagggaagctttgcagtcatatttatagctacttttaattacatgagggttaagagtggtttatgcagaaatatctagggaaggggtagtaacttttgggtcatcaggtcattgccatggaaaggggcagttactccttggtgttgtcatggcaagtgtaaactgacatggcatattggtgggtgagacttatggaaacctgcttccaccttggccctgttttaactagtcctcaatttggttcagtaacccagcccggcctctgaagttgagtcctgcctcctacctcattatctcttaccttatacaaaaatcaactcaagatggatcaacaacttaaatctaagacctgaaaccataaaacttctagaagattaagtaggaaaaaatcttctggacattggccttggcaaagagttcatgggtaagaccccaaaagcaaatgcaactaaaacaaaaataaattggacctaattaaactgaaaagcttcatatagcaaaagaaattatcagaaaacccacagaatgggagaaaatatttgcaaactatgcatctgacaaaggaccaacatccagaatctacaaggaactcaaacaatttagcaagaaaaaaaaatcccattaaaaagtggacaaatgacgtgaacagacatttcttaaaagaagatattcaaatgggcaacaacatatgaaaaaaatgctcaacatcactaatcatcaaggaaatgcaaattaaaaccacaatgagataccaccatactcctgcaagaatgactattattaaaaagtcacaaaacaatagatgttggtatgactgtggtgaaaagggaacacttatccactgcaggtgggaatgtaaattagtacaacatctatggaaaacagaatggagatttcataaagaactaaaagttgatctacccttttgatccagcaatctcactactgagtatccaaaggaaaagaaatcaatatatcaaaaaggcacctgtagatatatgtttattgcagcacaattcacaattgcaaagatatggaaccagtctaagtgcccattgactgatgagtggctaaaggtgcagtggctcacgcctataatcatagcactttgggcggccgaggcaggtggatcatgacctcaagagattgagaccatcctggccaacatgatgaaacctcgtctctactaaaaatacaaaaaattagccaggcgtggtggcgggtgcctgtagtcccagctacttgggaggctgaaggaggagaatcacttgaacttgggagttggaggttgcagtgagctgagattgtgccactgcactccagcctggcaacagagcaagactccatcttaaaaaaaaaaaaaaaaaaaaaaaaaaagaaagaaaatgtagtatatatatacaccatggaatactactcagccacgaaaaagaatgtaataatgtctcttgcagccacttagatggagctggaagccattattctaagtgaagtaactcaggaaaggaaaatcgattaccttatgttctgacttataagtgggagccaagctatgggtatgcaaaggcagacagagtgatctaatggactttggagactcagaagcgggagggtgagaggggagagggataaaaaaacctacatattgggtacaatgtgcattacttggatgatgggtgcattaatatctgagacttcaccactattaaattcatacatgtgacccaaaccatgcgtaccccaaaagcttttgaaatttaaaaaatgggcaaaagatttgaataaacacttcaccaaagaggataaatgagtgacaatttaatgtgaaatattcagtatcattcctcattatggaaatgaaaattgaaatcacagtgaaataccactacaaacctataagaatggctaaaatttaaaaaaacaaaatacaaactgaccatcctatgtattggcaaggaggtggaggagctggacctctcatatgccaccagtggaaatgtaaaacattaacaacgatttggaaaacgtcttgacagtttcttcaaaagtgaaatgtttacttgcctgtgatccctccatcccacttctactcaagacaaacgaaagcatgtgtgcattcaaagatttacacacgtatcttcatggtagctttcatagtaaatgcccacaactgaaaaaacccaaatgtctatcagaaatggacaaagaaattttgtttgatccacaaaatggaatgctactcagtaataaactggagtgagctgttgatgcatgaaacagcacagtgagtctcatttctgttgaccaaaagacaaaagaggagctattgttataattccagtttggaaagctgtagaaaatgcaaactgggttataagggacagaaagctggtcgggattgcctggagctgtggacagggatgggagagggcagtgtctccaggggcaccggaatgtattcagggtgacggacgtgttcattgtcatgcctcctgtactgtttattgtatgtcaattatatctcagtagtgctccaaagggaaaagaggcaagcaatcccatgcaaaaatgtataaaaactttgaacggatacttcataaaaagatatacaaatggccaatgaaggcatcaaaggtgcttagcatccttattcacaaaaccataaagaacaaccacttcatgtcactagattggctaaaattaaaaaaaaatccataaaaccaactcttgatgaggacatagaaattctcaaattagggggaatgcaatgcaagctgttataacctgtatttggaagctgcttaaaggctaaagatacgtctgtccttggactcagcagttcccctctggatgtctatccaagaggagggacgcctgcattcacaggaaagctggcccatgactgcccacagtggctctatccagaacagccccaaactgtcaccacccagatgtggtcaacaagcccaccttcccctatccctgtttctggaggagggccacctagagagattgtgcagagatagcacagcttccctcacagccctctgcttagccatgccacctggaggagcaggtgtggaggcacacagcgatgaggaccgtggcctccacatgttggatgccacattcacgatgtccatttgagttttttaaaagtttgccccctcatgtgattgttcttatgacctttggtgggaagcggagctctggtggaaaattggccccagggcatggtgttctgctcccagcatacacagtagcatctgaggcagagcaggttgatgcatgctggccaccgtcatcctgactgtctcccctggtttcctcccagacagtcctgtccctgccctccactgaacactcacagtgacagctaccacccaccctgcactagcagtccctccacacccagacctgtgctccatggaagccgacctgcttacggttcctctgttcactcggcgtgtttggtgtctgtcactcgacagacatacacagcctagggagaagggctgcatcttagctctgccctttcctcactgcaggatcttctttcctcatttgcaaaatgtgggtaatcatgtctgtaccatcgagtcattgaaagggttagagaaaattaaggcatgtaaagccgaaaacagcctggtgtagcactcagtgaataagagccccgtggcgatgactgtccctccatcttctgggtggttatgagccaactgacctctaaccccaggccaaggtggacgggacatggattggaactcgctgctttaatcatgccctgtgcttttcacttgccaggtaggaggcttttgggtgcagcttctggaaaggccaaaacgcaaacaggagccagaagagtgacagaaggaagagtggcgggcaaagtagggtgggctgagagcagtgctggcctcacggcattgcgagtctcggagcagggcgggctgagagcagcactggcctcacgatgtcgtgagtctcagcagggcggggtgagatcagcactggcctcacggtgtcgcgagtcttgagcagggcagactgagagcagcactggcctcatggtgtcacgagtcttcagataattccagactctcagaatgcatcatcattagcagatatccaggagttcacattggcaccccgtgatactgtcaactcgctacaaatttgttgatcccaagtagtttaggacttaacctcttcaacctcatagattttgtgaactctgaaaactgtttggggtcttatttttcagtctgagagctctataccttggctgcagagatagcaccgtatacgctcgtgtgagacccccctgcttccctgaatgcaaaaaagttattttgtcttggcgacagcactgttggtaagaatgacaccacaattatttcccctccacacgagtgggccacttagagcctgagcactgttaaacactgacactttctactgtgttaagacagagacagaggcagagatacacagagagacagagacacagagagagacagagaaaataaatgagctgccagaatcacctctctaaggcccgagacagaaaggcacagtgaagtcatcccaaccccacattcacgagccggagccggagctgcagcgttcccacctcagctcccaaacctggccgcatccggtgccggctcattaggaagcctgtgaatagcactgaggctgtgtgctttgtcaggctggcagcaagcacgccgtgatcaaggtgcctgtcagtgctgccggcgggcagtgagacagggagaaaacgtgtgttatgtggtcaaaagatgtcccaacttgggcttcctaatttgttttggatcctcggtgcaggagaatagctgatgagcatgggcagagaccagtgcacacacaggagtctcctccacccagagtctcccggcatgtgggactccccggacctccaggccttcctgtcagcctgaactcataattgtgcctttgggactgggctgggtggatctccaggagaggcatgtttgtcaaaggaagaggcctgatttttagctctggtactcccggccccagtaaagttgggagcgaggagagtcacttcctcagcagtgtcactgtttgacaggtgaggggtatggtgcagggcgtggctctgtgaactgcatcagctggctccaggaagcagctctgatttcctccagctgaagagaatcacattcttccaaaaccaggattgcttttctgaccctttctaatagcattctttcaattacggttgttaatgtctatgactcaactcctagttcagtctgcaagatgtttgaggacagggccacatctgagttattcttccttcatagaagtccagggcttggcacacagcagcagtaggggtttgatgatgctgatggcgggggtgacactgatggtgtggatgctgctgtggatggtgtggatgatgatggtgctgctgctgctgatgatgatgatggtgggaagctgatggttgaggtgatgatggcagggatcatgttgatggtggaagtgataatggtggggatgctgctgtggatggtgaagatgatgatggtggggatgctgctgtggatggtgggatgatgatggtgaagatgatggtggtggggatgctgctgttgatggtggagatagtggagatgatattgttgatggtggaagttgttgcgggaagtcagggaccccaaatggagggaccggctgaagctgcggcaaaacataaattgtgaagacttcatggacatttatcagttcccaaaattagtactttcataatttcttatgcctgtttttactgcagtctctgaacataaattgtgaagatttcatggacatttatcatttccccactcaatactcttataatttcctatgcctgtctttaatctcttaatcccatcatcttcataagctgaggatgtatgtcacctcgggatcctgtgatgattgcattaatggtacaaactgtaaaacatgtgtttgaacaatatgaaatcagggcaccctgaaaaggaacagaacaacagcgatcttcagggaacaagggaagataacattaaggtctgactgcctgcggggtcgggcagaatagagccttatttttcttcttgcagaaagcaagtaggagaaatattgctgaattcttttcccagcaaggaataatcctggggaaggaatgcattcccaggggtaggtctatgaatggccgttctgggagtgtctgtcttatgcagttgaagataagagatgaaattctccctggtctcctgcagtgccctcaggcttaccaggattgggaaattccagcctggtgaattctagtcagaccagttgtctgctctcgaaccctgtttcctgttaagatgtttatcaagacaatgcatgcccagtgggacactcatcagtaattctaatttcaccccctgccttgtgatcttttattgccctctgaagcatgtgatccctgtgacctactccctatttgtacacccctccccttttgaaatccctaataaaaacttgctggttttgtggctcaggtgggcatcacagaacctgccaatatgtgatgttacccctgaaggcccagctgtaaaatttacctctttgtactctttctctttatttctcagactggccaacacttagggaaaatagaaaagaacctgtgttgaaatattgggggctggttcccccaataggaagtgatgatggtggggatgctgctattgatggtgggatgatgctgatggtgagggtgatgatggtgtggatgctgctgttgatgatggggtgatgatgatggtggggacgctggtggtgttggtggtgatgggatgctattattgatggtggagatagtggagatgctgttgttgatgattggggtgatgatggtggggatcctgctatggatggtgaagatgatattggtgggatgctgctgtcgatgatggggtgatgatgatggtggggatgctgctgttgatggtggaagtgatgatggtggggatgctgctattgatggtgggatgatgctgatggtgaaggtgatgatggtatggatggtgctgtggatggtgaagttgatgatggtggggatgctgctgtggatggtgggatgatgctgatggtgaagatgatgatggtgggatgctgctgtgaatggtgaagatgatggtggggatcctgctgtggatggtgaagatgatggtggggatcctgctgtggatggtgaagatgatgatggtgaagatgatgatggtgggatgctgctgtggatggtgggatggtgatggtggggatgctgttggagatagtggagatgctgttgttgatggtggagatagtggagatgctgttgtggatggtggagatagtggagatgctgttgttgatggtggaagtgatgatggtggggatgctgctattgatggtgggatgatgctgatggtgagggtgatgatggtagggatggtgctgtggatggtgaagatgatggtggggatgctgttgtggatggtggcagtgacactaatggtgataatgatactgctgatgactgccatttatcaagttcctcctctgagttgtgtgctgagcaaggcacttttacctatactctccctaatcctcacagtggcttttaaagaaaacagaattatttttctagttttgcaggtggtgaaaatgagacttcaagaggttagataactggtccaaacttacacaagttacacagaactgacaggattgggccagtctttcagtgagccttctttcctgctggctttttcagtgtgtgggcgagtgggttctgcttctcgtcatatggaaatgcagtgggttgaagaatattcccagtagaatatcatgtcagcttaaacatcatcagactttggcagaagctctcgaatgcttcatatccacagctgggctaccccagagatgctcagccggatttctcttacacatagtttgaagacttcatgcacaggaatgtccatcgcctgtactggaaattagtctgtgtctatgccgttaggctgctaatttccaggtttgggcagctacggtcttaaaaattattccacattgtcttaggaaacctcccttcattggtatgttgaactgagactgaaaacatcttcacaacagggggtttgaaaatgagtcacagaattttaaactcagagctgagagtagaagaaaaagtctaattggatagtttctcctcagttgagatgtggatttcctgactgctttaaagaatatgaaggtataggctgggcatggtggctcacgcttgtaatcccagcactttgggaggccaaggcgggcagatcacttgaggtcaggagtttgagaccagcctgaccaacatggtgaaaccccatctctactaaaaatgcagaaaagttagctgggcctggtggcgcgtgcctgtaatcccagctgctcaggaggctgaggcaggagaatcacttgaacccaggaggtggaggttgcagtgagccaagatcacgccattgcactccagcatgggttacagagcgagactatgtcttaaaaaaatgtgtgtgtgtatatatatatatatatatatatatatatatatatatatatgtgtgtatatatatgtgtgtatatatatgtgtgtatatatgtgtgtatatatatgtgtgtatatatgtgtatatatatgtgtgtatatatgtgtgtatatatagtgtatatatatgtatgtgtgtatatatgtgtatatatgtgtgtatatatatgtgtatatatatgtgtgtatatatgtgtatatatgtgtgtatatatatgtgtatatatatatgtgtgtatatatatgtgtatataatgtgtatatatgtgtatatatatgtatgtgtatatatatgtgtatatatatgtatgtgtatatatatatgtatgtgtatatatatatgtatgtatatatatgaaggataaggtaaagtaaataattgtaataatagtagtagtcatagccattaacacttccgtgccagatactattattattatccttgttttacagattacttaaatagtgtgctgaagcaaaggtcattaagctcgtagcattggtggtagtttaaacccaggcagctccagagccagttccttttccttggggacctcaaaccgtgaaagagccagtcagcgtgagaatacttttctttactgcccatgttcccaactctcaggccctcttggttatgggatggtcacctcaccttggtgagaaacaccccagtgtctgcaatcatctattgagtagccggagtggcttgcaaaaaccgatgtttgctattatttctacaggctctgttgtttgtgctaactactgaaatattctttttcctcttcaccttaatttgattcagaacataaaccaaaaatagattgtttatccaagtctactgcacagatcacactctgctgtgattgtgtaatgcactgaacctagtcagtcctgcacctggagcttccaactcaactttaattaaaggccctttgcgtggaagctccaggttactgcattcatagcaatgaggggaaagccacttgcaggcacataacgagggatttggacgcagatccccaccccccagcacggtggctgaccaggtgttcagagacagcctttgcaagagggagtgcaggctgagctggagattgacacttacacccaatttgtgggaaattgctagaggggctgtttgttgtggtggcattcactgtctctcgctcgctcgctctcgctctttctcacgctcttgctctctcacatattctctttcttaagggaagaatagttgatttcagctagtccttggacaaatttaagcaatttggatgatagctatagtcacatcactttagaaataataattaaaatatcttagagataatggctgggcacagtggctcatgactgtaatcccagcactttgggaggctaaggcaggcccatcacttgaggtcaggagttcgagaccagcctggccaacatggcgaaaccccatctctactaaaaacacaaaaattagcagggcgtggtgaagggcacctgtaatcccagttactcaggaggctgaagcaggagagtcgcttgaaccccagaggtggaggttgcagtgagccgagatgtgccactgcactccagcctgggcgacagtgagagactccgtctcaaaagaaaaaaaaaaatcttagagataatgtccgatttccttttttgacagaagaaaattgagtctttaggggtcaagtaatttacccaagttcatatatgagaactgaaatcagaacctaattcaacctggccaggcgcggtggctcacgcctgtaatcccagcactttgggaggctgaggcaggcggatcacttgaggccaggagtttgagaccagcctggccaacatagtaaaaccccatttctactaaaacacacacacacacacacacacacacacacacacacacactcacaaaagcagccaggtatggtggtgtgttcctgtggtcccagctacttgggaggcagagacataagaactgcatgaaccaaggaggcagaggttgtagtgagctgagattgtgccacttcactccagcctggatgaaagagggagactctgtctcaaaaaaacccagaaaaaccaaacaaccccaacctctatcaacccacttcccaactcccaggttgctactcaaaaatctaactcagaggatgaacccaaatattttcggaaatagccagactcaggagctggacccccttaccttactgtcagtgatggctgcacacccttagctagtgccgaggtgtccacctccactgacatgacattgatcatgtgccccaaggaggtgcaagtagaaaatatgaacggatgggatttaaactggggtgtccacacacccatgcacgcctccagggagctcagcttgtgtgtccaggattcgaaagtctctaagctggaaattattcatactcagcctgtccatgacattttgatgaagcccaagtcagaggtacaatgtggggacttttcacatttttacagctgccctagaggtgaggacagctgggccttggtttatctagtgacacaaagtgtgatgaggacatgtcctcttaacggaattttactaaatgagtgaggagaaaatatagacagaaatcccatgaaagactgttagccagggcattgactagtaaatgatgtgataggtaattatcgaacaagagaccctggcatcttccctgctgcagcacactgcagttaaaagagcaggcagcaaacatgtttcaggtcttcagtaaagaagttggagtgaagacctccagacaaggcacttgaggcctctgctgagggttgctgaaagagagattcagctattggggagcagcttttcagggttaaaataaaaaccagtgcaggcaaaaaatacaaacagacatttcttcagagaagatgtaggagtggtcaataagggcacacaaagatgcagcatcattagccaccagggaggcaccgccgagcctcatgaatgtgtctgggagcagctcctctcattgctgtgaatgcagtaactccgagctgccgtgcaaaggacctttagttaaagctgagttggaggctccaggtgcaggacatactaggctcagtgcattatgcaagtgacacagcacggtattgctttccaactgctaggacaaccatagtaaaaacagaaggaaagtagcaagtgttggcaaagatgcagaggaactggcatctgcatccattactggtgagattgtttgtggtgctgctgtgctggaaaacagcttgggagttcctcagtcagttaaatgtcgagttaccatgtaatatcctcgaataaacccaagagaattgaaaacacattgatacacagactcataaatgaatactcatagcagcattattcaaaatagccaaaaggtagaaaaaagcaaatgtccatcaactgataggtgaatttttaaaatgtgggatatacatgcagtgggatagtacttggctgaaagaggaaggatgtcctggcccatgccccagcatcagcatgggtgcacctgaggacattatgcttagggaaatgagccaggcacagatgccacacatggtgtgattccatttacaccaaacgtccagaagagactcctccatagagactgaaagcgaatgagcagtgtcagggtgggagggaggaatgggaacactgcaaagtctctttttgggtgatgcggatgttctggacttagtagtgatgtctcacaactctgaatacactaaaaactgctgatgtgggtgaattatctccataaagctgatattaaaaataatgcaggaacaaatatgaaatagggacctgggttggtcagtgtgaaaatgagagtcctgttttggctttacatttcagagatgtccagggctgtttaggaccttgaacctgagaccgaagggcatctttgtacccccagggctgtttaggaccttgaaaactgagactgaagggcatcttggtgcccccagctgacgatggaaatgtgactcttgctctgttttgctctcctttccttcagggtgatgaccgcttctccgagagcatcctgacctatgtggcccacacgtctgcgctgacctaccctcccgggtcccggacccagctccgcgaggacctcctgccgcggaccctcggccagctccagccagatgagctcagccctaaggtggacagtggtgtggacagacaccatctgatggcggccctcagtgcctatgctgcccagaggcccccagctccccccggggagggcagcctggagccacagtaccttctgcgtgcaccctcaagaatgcccaggcctttgctggcaccagccgccccccagaagtggccttcacctctgggagattccgaagacccctccagcacaggcgatggtgagccagccccgcttggtgtttcttgtttgctgactgtcctctgtccagcccctcccagtgacagacgcaccatgctcttcccacacgtggggtctgcacaccgcactcccccgaggacgcgtggcaggaatggggcaccatgtagggaagggtcccttcggccctcataccctctctgtgctgggaaggagtatgtggtcatttcacgtcctgggaacgcagtggccagtgagaggcgggaggtgatcctgacagtgggatggagaaggcgctgctgagggtgtgaggacagtgaacacagcggccagtgggaggggaggtgatcctgagggtgtgaggacagggaacgcggcggccagggggaggaggagatgatcctgagggtgtgaggacagggaacgcggcggccggggggaggaggagatgatcctgagggtgtgaggacagtgaacacagtggccagtgggaggggaggtgatcctgagggtgtgaggacagggaacgcggcacccggggggaggaggagatgatcctgagggtgtgaggacagggaacgcggcggccagtgggaggaggagatgatcctgagggtgtgaggacagggaacgcggcggccgggggggaggaggagatgatcctgagggtgtgaggacagggaacgcggcagccagggggaggaggagatgatcctgagggtgtgaggacagtgtgtgttcccttctcacttcttgttcatcccttccccagattttatgatttcacaattctactgctgaagctgatggatggggcgggcaacatggcttgcaggacgggtctggcccacagcttgtgtcatccatatctgttttggaaaattgactctgaacacgttaagtccagtgtcctttgtcgctgaactcacctctccctgtggcccagcatgtgaccgtagcccatatttatggcggtttgccacatcctccgaagccccctgtctggatttcatgctgctcaccatgcactagctgaacagtgtcggcctcgaggtgactgctctgccaagaccgtggcttccggtgtcgctacctgagttaagccacgtcagggcgggcccaggggagaaaggcgtttgcgggttcctgcgactctttgtgatatggagaaggttccgacccatttatttcccaacagccttttcccaagaccatcctgcagtgggttctgataaaacatgacttcccttttggagataacaaatactaaaatttcacaaacattgcctgagcatcgcgttatgtgagcactctctgctccttaagtgaaggctgaatgggagccgctgagagcgagcatcagcttctctgctgtctgcagccgggagctctcctgccctcgctctttctttgttcatgcagccgttatggcagtttttaaatagaaggaatgtgaaattgcaattagagggaaggacgtgtgaccattaccgatgctttctccttgttcctctcttggaggagaaggacggcggaggaggccgatgctgcacttgagtgagtgctgctggagcattgatggtgctgtttgctacgggagctgcccgcctggagtggccactttccctccagcacctctccctctgggacgacgtctcctctgttctaagccatgctctactccgagaaacccctttccttgatggtcctgcctcctgcacttgcgtgggtactagacaccatcagggtcttcactgcctcctgcactttcgtgggtactagacaccatcgggggtcttcactgcctcctgcactctttgtgtactagacaccatcaggggtcttcactgcctcctgcgctttcgtgggtactgaatgctatcaggggtcttcactgcctcttgtgggtactagacaccatcgggggtcttcactgcctcctgcactctcgtaggtcctggacgctatcagggggtcttcacttgcgaccttgggtccgtgtagctgccgagcttcctgttctcctccagctcagtgtggcctcagcccttggccacaggcggtgaatacatggctgaggtgaccttcagcttctcatctcagccttccttgcccctccccggcaccggctgcccctctacctgcattctcccacctctatactccttctagtggggtcactttgggtcgtcctcttccttctctaacctcccttttctctctcctatcccatctcccacagcttaaaaagccccattcacctctgtcctcattattgggaacagaaagcaataaacatcgtcgcccccatcagagggagggaaacccagctggagagccgggtgagggtgagctcacagagagaataggacgcattcctgctctgcgtgccttccctacgtgcgcgccttccctacgtgcgcgctcccgctctgagccctccctacgcgcgcgctcccgctctgcgagcccttcctacgcgcgcgctcctgctctgcgtgtccttcctacgcaccctcctgctctgcgagcccttcctacgcgcgcgctcctgctctgcgtgtccttcctacgcaccctcctgctctgcgtgcccttcttacgcgccactcctgctctgcgtgcccttcttacgcacgcgctcctgctctgcgtgcccttcctacgcacgcgctcttgctctgcgtgctcttcctacgcgtgcgctcctgctctgcgagcccttcctgcgcgctcctgttctgtgtgcctttcttatgcaccggggagcttcacctccctgccttggcgccttctcgttcctcccacaccccagggtgtggatcttcggaacaagcgtcctgaccgtgctctctccactctcccgtgatccctacgagttacacaatgtgcttggcattcttcctgagctaccctgcgatgctggtgatattctgataaaaactgacttccaaactgcactgtgcgctttagaaaagcctcatgtaaaacggcaaataggaaatacgcagagagaattgagaaccccatgcaggtatcacctatgaaatacacagagaatactgatcacctatgaaatatgcagagagaattgagaaccccgtacaggcgtcacctacgaaatatacagagaatattgagaaccccgtacaggcgtcacctatgaaatagaattgagaaccccgtacaggcgtcacctatgaaatagaattgagaacccggtacaggcatcacctatgaaatacacagagaatattgatcacctatgaaataagcagagagaattgagaacttcatacgggcgtcacctaagaaatatacagagaatattgagaaccccgtacaggcgccacctatgaaatatacagagaatattgagaaccccgtacaggcgtcacctatgaaatacacagagaatattgatcacctatgaaataagaagagagaattgagaaccccgtacaggtatcacctacaaaacacgcagagaatattgagaacccggtacaggcgtcacctatgaaacacgcagagaatattgagaaccccgtgcaggcatcacctatgaaacacgcagagaatattgagaaccccgtacaggcgtcacctatgaaatagagagaattgagaaccccgtgcaggtatcacctatgaaacacacagagaatattgagaaccccgtacaggcgtcacctaagaaatagagagaattgagaacctggtataggcatcacctatgaaatatacagagaatattgagaaccccgtacaggcatcacctgtctcccacaagtggtgactctcaggctttcctgatgctcctctgcgcccactacagccccctgctctgccctgggatgattctaaagcaaatccagacatcgaatgatttctgaagatgtgaggccctagctagacagacattctcaacacacaaagagcaactgcacccgagcaggaagggaggaccctgtgataatgccagggaacagaaaacttctttacaggtcagagaacagggccaccctcctgtcgcacggtcgggtccaacatgagacccttgctgtttagtcttcagagagtgggagagaagacccacgcgtacctgctcccaaagaagcagtcagtcaacgaggctgcgggctgaacgcatatgacaaaagtttacctggtaaaagctttaaaaagagactctcttccttcacttattcataattcacatctggtctcctttcaaagagctttaaagcaggttcagtggaaggcctatctaaggtggggtgacggggaggacaacaggtgacgtgcagtggccggtgaaggaatttggggctcatctagttcagcgtctccagtttccccactcgagacctggcaaccatggaccttgttgctgtctccatagtttgccttttcctgaatgtcctggagttggaaccttacaatatgtggccttttcagatgggtcacatgccttgaagattcccccatcttttcatggctcgatggctcatttctctttagtgctgaatagtattgtattattacattataatccataacactccattgtatagatgggccacagtttattcgcctactgaggaacatcttggttgcttccatgtattggcaattattcataaagctgccataagcaccctcatgcaggtttttgtgtggatataagtctttaacttctactggttaagtaccaaggagtgtaatcactggatcacatagtaagagaatgtttggttttggaagcagccaccaaactgtcttccccagtggctgtggcattctgcattctgcgtgccaccagtggtgaatgagctgctgttgctccacatcctcgcctgcattgggtgttgtcaatgttctgggttccggcccttctgagaggtgtgtggtggtgtctcgttgtcattttcattcacatttccctgatgatggaggaagcagagcatcttcacatgcttgttttcatctgtgtatcttctgtggtgaggtgtctgtggtggtctctgggccatgttttaattaggctgtttgttttcttattgttgagtttgtaaagttcttgaatattttagatattggtcctttatcagatatcagatatgtcttttgtaaacattttctccagtctgtggcttgtattttcattctcttgacagcgtcttttgcagagcattagtttttattttaatgaagtccagcttaccaattattttattcatggattttgcctttggtgttggattttaaaaagtcatcaccaaacccaaggtcatccagagtttctcctctcttacctttaaggagttttatggtttttcattttataatgaggtctgtgacccattctgagttagttgtgaaaggtgtaaggtctgcatctggaattgtttctgtacatgtggacatccagttgtccagcaccatttgttaagaggcgatcctttctccatagcatcacctttgctccttttcaaagctcggctgacctcatgtatgtggacccatgtctgggctctctgttctgtttcattgatctgtttgtctgtgtcatcaaccccaccctgcctggattcctgtggagttggagtgagtcgtaacaatgggtgtagtgcatcctaatgatgggtgctgttgtcctccgcctttgttcttcttcagtattgtgttggctgttatgggtcactcgcctctacatataaactttagaataaacttgcttgtatccaaaaaatgacttgctgggattttgactgggatttcattaaatccatagatcaagttggagaactgacatgctgacaatattgagtctttgggagccagtcataatcctgaaagacacaatcctgaatgccatagttctgaatgttaagatcctgaaatatcaaaatccctaaggtccctaaaatcctgaaaatcacagtctcaaaatatcaaaatcccaaaaatgtaattctggaaaaaattatttaaaagacatttatttacatttttaaaagggaatttatttgcaaaatatataaaatcgtgacaaaacacttcataggccattttacacaataaaataagcaataataacattcgtatttttgcagacataagccctcagatatcttgacgacagttgcatgggcatcacacttatgagcagatgaactgtgtttatgaagacataggtcaggaagggagatgtataaaagcatgtccctctgcttggtaattgtgtgcacccagctgtataactgcaggcatctgaaataccctgatgaacaacctaaggcttttgacaagatgagtcaaaaaccctgatgggtcactgctgcataaacagtcgaagagctgagatctcaagaaattgtatctttcgcaaatgcagatgtacaaaaaggacattcttcatttattgaggaagttgcagtgtttttgcattgagaaccagggaagctgatgatgtaactctcagtctgaagacccagggacggctggtgtgagtcctggagtccaaaggccgccaaacctggagctctgatgtccagggcagcagaaggaaagtctgccccagcactcagagggagcctaattcaccctctgtgtttgttctctctgggccccagctgtttggacagtgcccgcccaccaacactgaggcagaccttcccccagccctctcagactccaccccaatctccctggagacacctcccagaaacacccaaaatgaagctttactggatttctaggtattccttaacccagtcaagttgacacttaaaacgaagtctacagtttcaccccttgtcaacttggcactcacacacaactccttaagttatgcttaatttccaaataaagacaataacaagctaatagctccacccagcaggatgcaactctcctgtggttatgatttaggggattttaaacattagcaacactagacttttgggatttagactctatttagagattttgatattcagatatttggggatttcactatttgggattatggcaattgggactgtatcttttgagattatgatccaaacccatgtcctgctagccatgagcatgtaatatttatacgctgcttctccatttctttacttttgctttctttcatcagtgctgtagttttttttcatatagatacggtacttgtgtaatgccatactttcagctcaagactctgatgacagcgaaagcgttttggaaatcactttaggagatgcatcagacaccgttttctaaatgaaccaatgacaaataatgtgtggggtgtccactgttgtaatccttgctcattgatcaaacaccagccacactgaacgggaaacaaaaccggtaaccaacctgttagaaccctttctttcatcatcttggttctgcgccctccagagcctggatgggaattacaagtccctaattcacatcatgacgactgacttttggttctgaatttcacattgcaacctcatcccaacatacctgatatttcttctattcaggtgtcttattatactatcgcttgtatggccaaggtaatcacgggtctccacccagccagcctctgtcctaagatggggcccgtggtgttcatgtgggaagtgcactcggaaactcatgtggaagctggaagaacttgtttctgctgccggccgtgcaactctccagccatgcaacgcttcgcgtggttattcccaagttcactcattcattcagaaagcacttgcaaagtcccggccaatcacacgggctcctgattctcccaagttcactcattcattcagaaagcacttgcaaagtcctggccaatcacacgggctcctgattctcccgcgttcactcattcattcaggaagcccttgcgaagtcccggccaatcacacgggctcctgattctcccgagttcactcattcattcaggaagcccttgcgaagtcccggccaatcacacgggctcctgattctcccgagttcactcattcattcaggaagcccttgcgaagtcccggccaatcacacgggctcctgattctcccgagttcactcattcattcagaaagcccttgcgaagtcccggccaatcacacgggctcctgattctcccgcgttcactcattcattcaggaagcacttgcgaagtcccggccaatcacacgggctcctgattcttccgagttcactcattcattcagaaagcccttgcgaagtcccggccaatcacacgggctcctgattctcccgagttcactcattcattcagaaagcacttgcgaagtcccggccaatcacacgggctcctgattctcccgagttcactcattcattcagaaagcacttgcgaagtcccggccaatcacacgggctcctgattctcctgagttcactcattcactcagaaagcacttgcgaagtcctggccaatcacatgggctccgctcccagttctctcccctcatccaaaataagcgtgttctggtcctcttctccttcgagccttccgtgaccctgaggtcctgcgttggctggtggggtgcccacttccttgtcgtgttggtggtgggaatcccagcctgaaaaccctcacagagaagggcgtgttccccgcagcccagtctcaggagggcactgaaccaaagctttgacttttcacggtgacagcagtagattataacacagaaataactgataccaatgcttctgtcactttggagaaaatatgcccacacttttggggtcattttcacttgaaaggaagcacctgctgccttttcgtttttgaagaaattcattcatatttgaatgcatcccagtgctgctcagtgctctaaacccaagcacgcctcttggcttaaaaaaaaaaaattagaagagaattggccacctaatcactggcacacagaggccgcctctcacaggctgctccaggaggaagccactgataaattgttaatctcggatccatgcccctggctggagttcacgagcaccctctaaagcaggaggagaaggcacctatgttatcaaagtgcctttcatcctagcgaaacagtcccgggctcagtgtgcactgcctgaggcctttcttcctgtgtgtcagcacaccgtggagtcagcagcagcgcactctctcccaggggagcaggcgcaggagagggcacccggggtgctgggggggtcactctgtggcttatatagcgggaacagggttcgtctcactgcaccttgaggacacacccacctgctcagcaaccctgacgtggatgcgcccagtgcggggtggcagcggccgtgtgtggctggcagcctcggacctgcgtgtggctggcagtcccggacctgcactgctcggctccacccagctcatgtcttctcccagggggaggaggctccccgacttctgcactagtgcagagtcactgctttcagatttgggagaagtaagagtcataaactgcccccatgtgagaaatctcttccccggtgtttggctgatgtccttacagactctgcttaaacacctctgaggtcactgctttcctgccaggtccatgctgctgtaagccagctgcatttgctggaaagatttttactttgagaattgggttgaaatttgcctctgtctgactaggaattggcagggcacctaaaggcacctcactgtcactgcccaacccctgaggttttcctcccaccaccttctgccatggctccaagggggaggccttccagagccacatggaacaggggtgctctctgctgtgttagcacaatggggaggccttccagagccacatggaacaggcgtgctgtccgctgtgtaagcacaatggggaggccttccagagctacatggaacgggggtgctgtccgctgtgtaagcacaatgggtaggcctttcagagccacatggaacaggggtgctctccactgtgttagcacaatggggaggccttccagagccacatggtacaggggtgctgtccgctgtgttagcacaatggggaggccttccagagccacatggaacaggggtgctctccgctgtataagcatcctctgcatatgatgtcatccttcctgtcacttttccaaatctccccagttccaacctgaacgctggtggttaatggagaccgctgattacatggtgatgcttccgctctgagggcacagggcaggtgtagggaaggcactgggggagcctttccccttcccacgggtgagtgcgtcacaggctggaactgggggctcgaagccccagggcgttctatgcagcagttggtttgctttgggtctgatcatgccgagcgtctgactgcagctgtgtgttcacctgccctctccaccggcatttctagaacttttcgaggtaactgttcccattacgagggcgtttctgcagatgtcggcttagctcatttagcgaatgtgggcagctccgaagtcccaaccctctgacatctgtaaaacattttctcttctggtcttacctgccacccagtccacggtgagctgcgttacctgtcgtccgtcagttcacgttctgagtgtgcaaactcacactaacatgaacctaaaggaagcagtctttagaaagccatttgactgccaatccccacaccccactgaagtcatgtcattaatgccagagctaattggatatatttttttcttctttgcctcagtattgcattcaatagagaaagtgtcagactgggtgaatgctgagccctgtgagtgcaaaatattgcggcatgacagtgcaggagaagcttcatcccaggctgcagcatgggcacttttcattagtcagggagagatgcacactactcagctgtgattccttaccccctcatattggaagcagaatatattttactacacttgtgttgtttccagtgaaaatagacaacatgctggcatatgattatgtcagtttctccctgtggaagcccaaatgaggagagaatgcgataatgagctcctactgaatttacctgaatcctctgcaaatacccaagttttggaccccagcaattaaatgggctgtatgtcctctaaaccaaaggagcacagtccattccccatgatggtgggtgatggtgatgatggtggtgatgatgatggtgttgatgatggtaatgatagtgttgatggtgatgatgatggtgatggtgatgatggtgatgatggtgatggtgatgatggtgttgacggtgatgatagtgctgatggtgatggtgatgatggcactggtgatggtgatgatggcaatgatgacggtggtgatgatggtgatgatagtgttgatggtgatggtgatgatgatggtgatgatggtgatggtgatgatggcaatgatgatgatggtgttgatggtgatgatagtgctgatggtgatggtgatgatggcattggtgatgatggtgatggtgatgatgatggtgatggtgatgatgatggtgatgatggtgttggtgatggtggtgctactgatggtgatgatgggtgttcagatgtggctaactgtgtaccttcatatatacatggttgtaaaggcacttaggagcaaaagctgttgtgcatgattcccattgtctttgtgaaaacaatgttgtggcgaggttatctgcaggctgttgctgattgtttaaagcttgtaccattttgtttggaaggccctacaatgacatataatttcaataggcctggctgtggcagttgagaatgcagagtcatgtgagctgatctcttactccaggctttacacatttaatatcctgacattttgtgtaattgccttatgagagcccagttggagcactgaaagctacttaaaatgtcattatgaactggccagattgcagaattacgtggtgcagttgatggaacacaacgttttactttgatattcttgttatctgtgctctgtgctgccgcccttcttcaacccaccagggctcactggatgctgcaaaacatacttcctcatttctcttcatcttcaaatggcaggtagtggatgcttctgagataactcagcatgttcataaaatgctgtgtgtgtggtttgtagaggttacatgggaggggatccctagtatgcattaactgttctcccataagctgcccagcaacttagaattttctcttatatacttatgattttttttaaagttatttttcattaatgataacctaaaaagtttctttttcagatgaggggaagtagtttttggaattgtactttattattccattttgaaggtggatgtttcctattatagtgattctaagaggcccactgaaaatgcctcctgttctctgatctttaccataaagaacatgaagttttatttcagggcagttgtatttctgctctcccatccatttaacaagactcgaaccaaagggagtcaaaggaaaagggatgcgtagcagccataagagagagtttttctgagttgttaaatgttacagcggtgttagaagaggggacacaacttcctgtcaacaaatactgagcattagcaggtagtagacaacacacttactatatttcattttctcagcaacccattcgagtgggagttattgattcagtttcacacagagggctcatgaggctggaagaggctggatgggtttccccgagtcccaactgtggtgaatggtggggtggagtttgagcccggtttggctgactccggagaacacctgtctctgcgttacgctgccttttctggaaggcagtgaatcttttagggtttctgccctgacattccctgcctgtgaccagcaggactctcatcccacctgcactggcacaagaccaaacatggcagtgtgggtgcctgccgggctcctgagggcctcccagcccagcccggaccccacaccttgaacgaaccctcccatggttcctacagcatggctgtggggccactatccatttaggtccttttctttctgtccccccatgtccagtctgttggcagaccctgctgtacctgccttccgagcgagcacacccagggtgccccctcctccccaccagccggctgctctctgtccccccgaccaccacccctaaccagatctgaccagacctggcctcctgcctctgaccttgtctcaggcctgcagagtggttcttgtaaatttgtcaatcagatgatatcccactgctcagagcacaccacgggcttctcatcacactcagtaaaaatcaaagctgtttgcctggtctgcaagaccctgcatatctgtggcacccccacccaccactcctctccctccgtgtcctgttgaaacgggaaaagttcccttattcccctcacagggcgtgcgatgggggagtggctcgcttcttcagtgccccgctgctcaaacctctaggggagctgacagacgggtgggctgtgggctcagaccccatggcagtgtctaggggtgaatgtttacagctcctaaagccccagtgggcatgtgttacagggtgctcttttggtttcgctcctttaattttgccgtctataggtggcttgtgttagtcagctcaatcagaccccttccttatcacaaggacagagggctttctgaatgctgggttcttgccttagtgtactggaagaatcagatcatatgtgggcttggagagtaagtgcaaggttgttttgagtagaagtagctctcagcagatgggggagccagaagggagatgattttcccctggagtccgaatgcttgatggcctgggctctcctcagactgccccggccacactcggcatcgttccgctggtcgatggtatgctggtgtctgtcggtctgctcttgtccccccagtcggtggcctgctggcgtgctggtgtctgtcggtctgctcttgtccccccagtcggtggcctgctggcatgctggtgtctgtcggtctgctcttgtcccactggttggtggcctgctggcgtgctggtgtctgtcagtctgctcttatcccatcagtcggtggcctgctggcgtgctggtgtctgttggtctgctcttgtcccactggttggtggcctgctggcgtgctggtgtctgtcggtctgctcttgtcccaccagtcggtggcctgctggcatgctggtgtctgttggtctgctcttttgccaacgtgctcctcttgacatccagccacttgtgtgtgtgcctgccagggtcttgggggtttttataggcacaggatgggagtgtggtaggggccagggtggtcttgggaaatgcagcatttggtggtgaaggcaggagtgcctgtcctcacctaggtctgtggagatggagccccagccagggacctgccttcctcaacccagcacttcccttcacacttctatatcatttaaagggaccagctctccccttcccagcactcccatatcactgtgaactctccacgtggggctgcattctggacactttggcctcctgtctgttcttccaacccaacacgccaggcagcttctgcccacggccttagtgctcactgctactcctgcctgaagacagcttcccaggccccactaggcccatgctcacctccctcaggcctctgctgaaacttcaccttctcaatgaggctttctctggcagtgcggtatgaaagagcagtgctccagcccccgatccttcatactctgggttatttcttcgcagcatcaatcaccaccacatattctgtgcattcatggttttttttttttttttttgagacagagtctcactctttcacccaggctggagtgcagtggcgtgatctcggctcactgcaagctccgcctcccgggttcacaccattctcctgcctcagcctcctgagtagctgggactacaggcgtctgccaccacgcccggctaatttttttgtatttttagtagagacggggtttcaccatgttagccaggatggtcttgatctcctgaccttgtgatccacccgcctcggcctcccaaagtgctgggattacaggcgtgagccaccgcgcccggccgcattcatggtttttatttgtttcctgttccttctaacatagatggaagtcacacaaaagcaaggactttgctcatggatttatctctgcgccttcaaaggtagctggtgcaaaggagatgtgcagtaaatatttgtggcaggaaggaaggaaagaatgcagctagcaagggagggagggaggaagattggggagaaggaagaaagaagggaaaggaaacaagagggaagaaggagggggcgggggagtatttcacctcctgaagctctcatctgtccctgaaggggagggcgtggctcataccacccaccaccaccaccccaccacaggcagagtaagaggctgcctgcagatcgcctggagtaggacgtgcggtgaggagcagaaaggcgggcggtgtgggcagggagaggcaggaatagaaaggcgggtggtgtgggcagggagaggcaggaatagaaaggcgggcggtgtgggcagggagaggcaggaatagaaaggcgggcggtgtgggcagggagaggcaggagcagaaaggcgggcggtgtgggcagggagaggcaggaatagaaggtgggcggtgtgggcagggagaggcaggagcagaaaggcgggcggtgtgggcagggagaggcaggaatagaaaggtgagcagtgtgggcagggagaggcaggaatagaaggtgggtggtgtgggcagggagaggcaggagcagaaaggcgggcggtgtgggcagggagaggcaggaatagaaaggcgggcggtgtgggcaggggtaggagcagaaaggcgggcggtttgggcaggcaggggcaagagtggaaaggcgggcagtgtgggcaggcaggggcaggacagtgacagggcctggcttcccgcataggaggcagcatgaggtgctgagaggaacagacattgctgtaagcagggtgggatgcacagaataatatttcccagcttctcggtgttgtgtggggcccatttgctgcaaaccagtaggataattccaccagcacgttgggttggaagaacagaaaggaggccagagtggctggggtgcaaccatcatgggagagttcacaggacacggagggagaggagtgctgggtcgcggtgctgcagatacgcagcgtctcacagaccaggaaagaagagagctttgcagatcaccatgatcacccacattcttccctctgcatgacagatctcacctcagtgacccccctgggttatgttcacaagggtggaattagaggggcaggagatgacaccgagatcttaaggagaaaaggtctttccatatagatgctccttgaccttctagaaatgcccacttgtttctgggctccaggagctggtgaatactgggactcacctgggttagctttgcagtgaaggtcagtgcaggggacacaggaacatccgcctgctgcgtcagtgccaggtcagggcggcagagctgccacttttcgagctgctgagggtggacatctcagccctgcatgtggagggcggagactggggtacacccttggtgagcccaggtactcagaaatggaacatgcttgtcagctgaatgttctggttacgttagcctttagcagaaacagcctggattcaacttgtttaaaaatctctcatgaatacatccatctatttttctgccttggccagtgttcctgaagcatgaaggtgggtctcacacacactgccccgcttgaggcaacaggagcctgcagggaacagcattgttgccggccaagcttcagagctcagcagaacacccacggcagccttctgccccacggcctcttccctcagatgactctgttttcttatcattcatgcccttgatgccacactacgccacctaaatctgatgtgtctgtaatgaggcttaacaaacagcaaagaattgtgttgcttactttctatttttatttttcatatgttttatttattttatattaaatttaaaatatattcttgccactttttgttcagcataacttagatcccaaaaattccacagtaatttttttgttttttcaagagacatcacttgggtttatcttttttttttttttgagatggactcttgctctgtcactcaggctggagtgcaatggcacaatctcagctcaccgcaacctccgtctcccatgttcaagcaattctcctgccttagcctcctgagtagctgggactacaggcatgcgccaccacgcctgggtcatttttgtatttttagtagagatggggtttccaccatgttggccaggctggtctcgaactcctgacctcaggtgatccacccacctcggaccccaaagtgctgggattacaggcatgagccactgcgcccagccgggcttatctttttaaaaatcagtgagttaattggattgcctttgttagagattaaaaataaggatttttttttttttttacctcttgagaaaaggtaacatcttatacattttatgttttaagagtttatactgaaaagacactggttagatttaagtttatgtcaatgtagttgttaatttccaggggttaaatataggcagtgatttacacattgatgacattgctttataaaagtttggaggtcttttggttggaaattgggttccctgtactataattggtgccagcttggagagcaggtcagcccagacactcgtgcacttgaggaggaaagacgtgtggcgtgagatggggtgtcactgagggggaaagacacgtggcgtgagatggggtgtcattgagggggaaagacgtgtggcgtgagatggggtgtcagtgagggggaatgacacgtggcatgagatggggtgtcagtgagagggaaagacacgtggcgtgagatgggatgtcattgagggggaaagatgtgtggcgtgagatggggtgtcattgaaggggaaagacacgtggcgtgagatggggtgtcattgagggggaaagacacgtggcgtgagatggggtgtcattgagggggaaagacacgtggcgtgagatggggtgtccttgagggggaaagacacgtggcgtgagatggggtgtcattgagggggaaagacacgtggcgtgagatggggtgtcattgagggggaaagacacgtggcgtgagatggggtgtcattgaaggggaaagacacgtggcgtgagatggggtgtcattgagggggaaaggcatgtggcgtgagatggggtgtcattgagggggaaagacacgtggcgtgagatggggtgtcagtgagggggaaagacacgtggcgtgagatggggtgtcagtgagggggaaagacatgtggcgtgagatggggtgtcagtgagggggaaagacctgtggcgtgagatggggtgtcagtgagggggaaagacacgtggcgtgagatggggtgtcattgagggggaaagacgtgtggcatgagatggggtgtcattgaaggggaaagacacgtggcgtgagatggggtgtcattgagggggaaagacacgtggcgtgagatggggtgtcagtgagggggaaagacacgtggcgtgagatggggtgtcattgagggggaaagacacgtggcgtgagatggggtgtcattgagggggaaagacacgtggcgtgagatggggtgtcattgagggggaaagacacgtggcgtgagatggggtgtcattgagggggaaagacacgtggcgtgagatggggtgtcattgagggggaaagacacgtggcgtgagatggggtgtcattgagggggaaagacacgtggcgtgacatggggtgtcattgagggggaaagacacgtggcgtgagatggggtgtcattgagggggaaagacacgtggcgtgagatggggtgtcattgagggggaaagacacgtggcgtgagatggtgtgtcattgagggggaaagacacctggcgtgagatggggtgtcattgagggggaaagacacgtggcgtgagatggggtgtcagtgagggggaaagacacgtggcgtgagatggggtgtcattgaaggggaaagacacgtggcgtgagatggggtgtcattgagggggaaagacgtgtggcgtgaaatggggtgtcagtgagggggaataacacgtggcgtgaggtggggtgtcattgagggggaaagacacgtggcgtgagatggggtgtcagtgagggggaaagacgtgtggcgtgagatggggtgtcagtgagggggaaagacacgtggcatgagatggggtgtcattgagggggaaagacacgtggcgtgagatggggtgtcattgagggggaaagacacgtggcgtgagatggggtgtcagtgagggggaatgacacgtggcgtgagatggggtgtcagtgagggggaaagacctgtggcgtgagatggggtgtcagtgagggggaaagacacgtggtgtgagatggggtgtcattgagggggaaagacgtgtggcatgagatggggtgtcattgaaggggaaagacacgtggcgtgagatggggtgtcattgagggggaaagatacgtggcgtgagatggggtgtcggtgagggggaaagacacgtggcatgagatggggtgtcattgaaggggaaagacacgtggcgtgagatggggtgtcattgaaggggaaagacacgtggcgtgagatggggtgtcattgagggggaaagacacgtggcgtgagatggggtgtcattgagggggaaagacacgtggcgtgagatggggtgtcattgagggggaaagacacgtggcgtgagatggggtgtcattgagggggaaagacacgtggcgtgagatggggtgtcattgagggggaaagacacgtggcgtgagatggggtgtcattgagggggaaagacacgtggcgtgagatggggtgtcattgagggggaaagacacgtggcgtgagatggggtgtcattgagggggaaagacacgtggcgtgagatggggtgtcattcagtctcttcacaggatcttaatggtgtattttccctgtaaactgtttgcttgttctatccattggtcaagtctctctggcctccaaaacattttagtgtgtctgtgctggtgtgagaacaatgttgtagccctcaagaaaatgaagcttttaattttctattgtttcttttttctttctttttttttttttttgaggcagagtctcgctctgtcgcccaggctggagtgcagtggcgcgatctcagctcactactagctccgcctcctgggttcacaccattcttctgcctcaggctcctgagtagctgggactacaggcgcccgccaccacgcctggctaattttttgtatttttagtagagatggggtttcaccatgttagtcaggatggtcttgatctcctgacctcgtgatccgcatgcctcagcgtcccaaagtgctgggattacaggtgtgagccaccaagcccagcctattatttcttagaataatgtttgttcccaggctttgatcacaatagatgcccaatacaggttggtgcaatcaatgggtaggttagtgggtggagggatggacggagactgggctttgactttaatgagaggttcatatttttttaaatataggttaacattttggttaatattttggcagaaaatagtttcaaaatgcataatcttgaattagatcttgagcaagttggaaggtgcctgtcagcttgtgtgactgagcatctaaggggctctctgactgtgttcctcacttctcacctgaggatcacaatgagctgtggcgagagcttctcatggagaaccaagtatttgttttcagaatggatgggaaagggggaaaagagtggaaaactaaaatgatttctcatcctctccttgtttcatgataatagttataatttattaagcacttacagtatgctgggcccatgcctcacttgtcaccattttacagatatggaaactgaggcatgaagaaatgagcgagcttgccccaaaccacagaccatgagcgctggggccaagactccgggagcatggtcagcctttcttcatgggagtccagcctggcatcccccagggcagggcagcacaaggatggatgatcggattgatgggaactttaaatgtgtctaaggtcctagctgcaatgatggaaaaagaaatgtgagctaacaccctacagattctagaataatcaggcctgagaaagtgtgcaggcagctgcagccacggcaggggagcccctgttggttcagtactggcagctccacgccaagcctggccgcgtctggccagggtgctctggctttcccgccgtgcctgatggcctttctgctcacgttgccatttcttcctcccttcctggtccaccatggagcctcagtttctcaagggtggatgcctgccagttccccaaactctacattcccagctgctctctgtcgatacaagtaggctgttcatatggttgagtgtggcgctcactgtaccacgctgtaccgggcactgccgccccttctcacgatgatgtgagggaagtcttgccaagccgtggtattctggaaccttctcaccgtgatgtgagggaaaccttgccaagctgtggtattctggaaccttctcgcgatgatgtgagggaagtcttgccaagccgtggtattctggaaccttctcaccgtgatgtgagggaaaccttgccgagctgtggtattctggaaccttctcacgatgatgtgagggaagtcttgccgagccgtggtattctggaaccttctcgcgatgatgtgagggaaaccttgccgagccgtggtattctggaaccttctcgcgatgatgtgagggaaaccttgccgagccgtggtattctggaaccttctcgcgatgatgtgagggaagtcttgccgagccgtggtattctggaaccttcttgcgatgatgtgagggaagtcttgccgagccgtggcattctggagacgtggcttgctgttcagttcctccttcagagcaggcacttggcctctgtgtgggtttgagaggggaataagcatcattttgcaaagttcagggtgggtcgacacacctgtctttgtgttaagcaggactcatcagtgttgacagtgacggtgtttgctgttagaaacacagaccgcagcctcttccctcggggtggtgggagaagcgccagcctgccctggagggagagggtgagcgctccaccccgggatgcctgctgatgtcccccttctccttccccttccccttccccttctctcgctctatcgcccaggctggagtgcagtggcacaatcttagctcactgcaacctccacccccaaggttcaagcaattctcctggtttagtctcctgcatagctgggattacaggcgcctgacaccatgcccagctaatttttggtatttttagtagagatggagtttcactatattgctcaggctggtctccaactcctaggctcaagaaatccgcccaccttggcctcccaaagtgctgggattacgggtgtgagccaccgcgtccggctgatgtctgctttctctttcttttggcattttcctgctggcaacactgtagccactctgaattgaataccctggcctgtgcacatcatttttataaaccttggggggctcagaaaagtttatttgtggatcagtatggcaaaacatgattcattttcactggaaatgccgaattcgagaacatttaaccttctttattgagaagtcacatgatttttattctctcaccatttgtcaaaatatcacaaccagcttttcagcccccttaggaaacacagggccttgcagaagaacggttaatggaactctgtcccaaacttgtccccgcacggaccacgtcaccttctctggagctgcagtggggtcgtctgggcaggtggtggcccggggctgcagtcctggggagctccggctgcgggggggacggtggccactctgctgcctgggagctcaggaaggcggtgtctacagatgcaggtggaggctcccaggccttgtggtgcctgctgtgccaagctagtgtgtggagagtccttttgtccttttgggagggcagaagggatctttggacttggaagtgaattgttctaccacacttggaggccctgccacttcctgcgaatcgtgacatcagaaataatggactttgccccagacgaggcctctggtcaggtcgttactctggggccctcctgccccactcacctgatgaggaggccgctgggcagccgagcctgtgttcattggttcgtgtccacaggaaggacctttccttagcaaccaccactcattcctcacctccctgtttctttccctccgatgaaattccatcacggggactggtgtccaccgtgagctatggccgggccgactctgacacacatcttggctagtgcaggcatgtgtggagacatccctcgcctcctaagcacggaggacgccgactgctggggacagccatgcccaatgccgagggcccttcaggtctccctgcagctgtgccggttcctgccgcaggctccggtgcctcctgccagttctctggggctgttagttttctgggctccgcctggtggagcccgggacccttcagaactcaggctcttgcctgtggccgcctacttttccagacacagctcttcctcccgatccctgcacttccttatttccattttctttgggatgagtgagccctttgttgccagcattggacctgtggacgtggacgagcgagataagactgtcgcgatgataatcgctgggaaagaaaaagatctgtggtgggaggagactgcagtgaatgagaatgaaaaggttgctctgggctcgtggctcggtggctcggttgcgaggctgagatggctcttctgattctgaaagctgcaatgagcagcacattttcaaaacagcaccgagggctgtggtatacacgcacctttaattccggagcacatcttttatcttctctgtgaaacaacgtgagcctgtcagcgtggaaggagctggggcatgggtgccgttgacctgggactgtccagcccttcagccctttgtcacctgcagacaggagtagcggtgaaggcaggctttgctgcggttttaggcatgtttttgtttgtgagaaagtgagatgtattttcctgagtttgttgctggaagctttctttgaaggtagcattccatcagtgaatgcatggtgagggctgatgtgtgggggttggtgggccctgggggtgtggcgaagggaggctggccctcccctccaaggctcaaggctaatgaaaaaacagaagagtacgcggcctccatgccaatccctgcgtttcccttcttctgttttaaacggcaggtttcattatgatttaggacggcaagcccgagagatctgggtacagctgctgttgaaacaacagtttgttacttacagattttgagaggagggggcaggccacgccatgggtcgatacagggatgcgccagcgtcagtccggaggctgggcgagggcaaggcagggtcgtcagggacaggactgcccagcttgaatagttccagccgctccggggccaggggctgcccgtgtctggtccttgccccagggtgactagggcagcggcctggagtctgagcccacagaggcggaggcgggcgtgggctccggatcgcagggtttgcatgtggaaagcctgcgtggagtgggtgactgttcactatctgggaattggctgttcgtgggaggggcagcccccagggtcagcagggccccagatgtcagagcatcagaaatgtggggttaatacggacacttcaacccgaaggtaaagaagccgccactgtctgccgaacaattcagaggcctcaacgtcggccagagcggggcactcggccaccccagcaggggacatcggtggcagtgaacgcccagcacgctccgatcagaacgcccgtgtccgtcacacatttcgtgtacagattgactttaaaggactctgtccgcttcatcccatgctaaactacacataatgctgtctcagaaatgcctgtcatggacgttcaggcctttacatcagagggtcttagtcatcaacagcaagtctggagtggcgctgacaggactcaggttttcaaaggggaaaatcagagggtcatggctgtgaccctttccatgcgagaccctggtgggggatggggtgcagcagagagtgttcagaaatgaagcaaaacacttcaaaaaatgtgtccttacagccgtgtagcaagacgccccctgaagaaccagcttcaattaatgggcaagagagactgcacttaaaaaattttcactcaaagaacccaccacaggccatcggcacttgtgtttggaaagtcatgcgagtctaggcggccccagacactgactcctgtcctgcgtatgcagtgaacggggcacgtggggaccgggtgccggccccgctgcctcggcatggactagacacagcctgcgctgtggagagaggacgggacgtgcggctgagtgaacgggggtgccacaggcagtgccactgtcgagccctgtgcagacactgcaggctgcagcccaggcctggtgatgcatttgacgcagacaaaaaacctaaaatgcctacatttcttaatttgtaaaaagcagaaataattcctccgcttctattgtagaggattgtgccgagatccctctagggcagagggtcgcagtgggatccctctagggcagaaggttgcggcgggacctgtctagggtggagggtcgtggtgagacccctctagcgtggagggtggcagcgggacccccctacagtggagggtcgtggtgagaccccactgaggtcaggacattctgtgtcccctctgcgtcactctgccggtgtcgttcgggaaggtagagacgtggccatgagctattttacataaacctttatgaggacagagatttcaacactgaatacaaaagaaagtcaggttttccttcaaagctcggaaatgggcccatgaaccttctttagggcagagtctttattgctgctgttgagggggagtatacacacggcgagatgcgcagaccgcaggtggacacgatgacgcgttggacgcatgtgggcctggaaccagcggccacgctgcacggcacaccctcacacccgacgcttcctcctgccccagccccacctgcaggtgatgcggctctggttgccctgggcagacctcgcccatccttgaacttcatcttctgttaacaggattctgtggattctctggtgaccggcttctctcactcagcctgactggttctaggtctgtcccccttctcgtctctgtggttccttctggctcagtgctggtgtggatgtggcctccttatccgctctcctgctgccgggcacatggactttagactctgtctgtggaactatgaggagtcaggctgctacccacagtctcatttaactctcatggttacgggtttcacttctctcgggtaaatacttacgagtccaatttctgggtaatacggaagatgtccttttggaaaagactttcctttctctgttgaaacgccctggcgcctttgaaacagtctcctcggagttgtcactgtgccacttcctggacgcggtgaggaggcttcagctccctctagcctcttgtgccatccagttcatgcctgcagctgttttatgaaccctaccttaaagtggtaataatttttccttgctaacaatcagttgttttttagataaagtaagaggagaaaagaagacggtctttcttgtttatgtaaccacatatttaccctttcaggagctttttggctcctcccgcagctctgggcttctgtgtggtggtgtttctcttcagcctgtgtgcaggcccacagggacccactggctcagctttgttcacatacgtgatatgaaaatgtctctcctttaccctctcgtttgaaggatattgtcattggatataaactcctggattgaatgatttttctttcaacccttcaaatgtggcattcattatctgtaacgtcaaatgcctgactctgcacattgtatgaaatacgttgttcttacaggacatgcagggtgtctggcggcctctgcgctcctgggaccctttccattctcatgtgtggagcgtgtcttccccccgccccgcccccgctgctttccaggaatcttctccatctctgacttgcagtagctcagctgaagtcatggcgtggttctccttgcattttattatcgtggaacttagtgactgtcttgagtccctgagtgacaatccttcccagatttgagagacttgtgggctttctttcaggtgtttctggttcctttcccacccccccgtgccctcctgactccgacggcttggatgccccaggggtgactgaggttctgcagaacgtctcccattctgttcttccaacgatgatcgcttctatgatctgtcttcagattcacaaaccgtttcttccgttatgtccacccgtaatggacataaattttaaatttcagacgccgtgctcttcacttacagaatgtgtgttggattctgttttaatttccccactctgctgagcagcgggtgcacacatctctccgcggttatggcagctccacaaatggccttgtctcctcgctctaatcatcgactgccctattctcaatttcgggttctgtttttctgcctcctcctgcatctgttgctgcttgtgtgaagtgggggcctagaccctgccaccttcctttaaggggcttttccggcagcagttactttcttggacgaggctttgaccctgtgtggctgtgtttagatgtaattagagttggtccatgctgggcagggtgtgctgggcagggtgtgctgggcagggtgtgctgggcagggtgtcctgggcagggcgctgtccttgccaggcattgtttctccttctgccaagtgagggggacacagctcatcccattcttttatcctctggaggacatggtgaagttgcctagcccatctctcttcctggcttggtcattccagtgttttctggaagctgtgctttccatcctcctgagcgcgtggatgagtctgtccttccattctgtgggttttccacctctggggaactgaactagtgatggttacagggtcaggtggatttgagattcaagtccaatatcccaatcttctctgagcactggcctgcgcctggccctaggtggccactgccttgggacgccgcagacgcccaccacacccctatggtctggaggccctcacctttgcattcgtccacccacaacgtccttgtgtttgtgtgtgtgcccctaggagcacggattcataccctcctgaaggacctgcagaggcagccggctgaggtgaggggcctgagtggcctggagctggacggcatggctgagctgatggctggcctgatgcaaggcgtggaccatggagtagctcgaggcagccctgggagagcggccctgggagagtctggagaacaggcggatggccccaaggccaccctccgtggagacagctttccaggtgactgcagcgccatgggtgcccacacccaggggtgctgcggggaggggaggcctcagggctgtgcagagactgctggctcaccaagtgcaatgtgggctttctgctggggagatggggatctgtattaatgatttttatctgtttgaacttttgcctctaaaagctttcttaacagactaagcctaccagagcaattatgttgaatggcaaattgctctctgcgaggaggtttcactcctccatgctgaggctgagtcaggaaaacaggcgtgatgggaagtgttgtgtttggactgtgtaccggtgaatattgtcaaatatttgaatagcagagtgagaggggatcattcaaatgtctgcttggggcgtgcattggtcctctgaggctgctggggaagcagaaggcagcccctcagcaccactaccccggcaggcatccggagccctgtggaggccccatgggtcagccaggacttctgcagcctgatggcttctcacagcgtggagctgcaagaaagcacctagctcagctccccacacatggcagccccacaagtacgtgctgaaaaccaaatgacagacgtgcccctctctctgcacgggtgcagagggggccttgctggaagctggaagcctgacttggctgacaggcagggtgcaggggagtagtggaactgcaccccgggagggcctgtgttaggtggtcgcccagtggttgaaggaatcgggacccgcaccatggctaggagggatgcaggaggccctggtgtgcgtgctgtctccaggggcactgttcaggtgccatgagtcacgcacctttgggcactgaaagtaggatattaattaatttatttattattttattttattttttgagatggagtctctctctgtcacccaggctggagtgcggtgacgtgatctcggctcactgcaaactttgcctgccgggttcaagtgattctcatgcctcagcctcccaagtagctgggattacaggtgtgcactaccacgcccagctaattttttgtatttttagtagagacggggtttcgcctgttggccaggctgatctccaactcctgacctcatgatccgcccaccttggcctcccaaagtgctgggattacaggcgtgagccaccgcgcccagccggggtacctatttagagagaaacgctgaccacagtgaaataacctaagtcagtggattctgaagccatcttaattgtgaggtggttttggcgaaggcttcactttgctttttcatgacgtgaactgctcggtacgatggggtttttttttgccgtgagttaactttgtcgatcacgtgagacccccagagctgggtgaggtcattgtggctgccttcacgtctaccatttagctcctcagtcccctccgctctcgcgaagtttacagaatgccattttgtgctataaacagaaaaggtttactctatggcaggacttaggccagcgtcatcacacctcacctttcgtatggaggggtctgcagggtcaccctttttatgtctgtggcaccctgtgatgacattcttgatgagggtcttggtaacactggtgtcttttacagatgacggagtgcaggacgacgatgatagactttaccaagaggtaagatgacgtctctggtgtttgtttcatgttaaatgtggaagttggtgatctttttgttcatggtgtgggaacatttatgaaatacaaaagtttttttcccagaaaattatggagaaacccctcataatctccaaattgaaaaacagtataaagagaacatacaaaagtgtgtatatttggatacgaaatatctcttttcaaattataacctaatttatccatggtagaaatatgaaagtcgtggtaaatgcaaagaagaaaattaatttttcctggaatttcccagccaggattatcacacggcagcctgtgcccactttgcacatttgatgcctcctgcatgtgcggattcctgaggggttcagctcactcacacctggctgtcccgtgtggcacctctggccacatgtggccatctaaacctatatttaaattgaataaaattaaataaatgaaagatgcagtgccttggccgcactgggttcaggtcggcggcacgttagtcgcatgtggctcagggccaaggcgctggatgccacaggaagaggacggtccaccatcccagagcccccgtgggcactgctgctccggaggcagtcagaagaagggcccagtcgcaggcgatgtccacgagctagacactggccttccctgttaagtcttttagcctcttagtttctctccctttaagaacctttggtcgtgaatacaaggccgaaggatgaagaaccgttctaagcaacagcagtgacattgcatggttctgggaaacccagttttgggggtggagaaagaagagtctttggttagtcattctctcctcagattctcttactggttagtggttccatgcctgttggcaagtgcaggaagaaaacatcagcagttctggttttgaatatccatcagaaatgatgggacctgctgtctgagctgtggagggagaagtggggctgagaaacacatttcctaatttagggagtcggggagacccagccctcccacctgaggggcagggagcgctctggggggctgccgttagcctaagactccctgacttttagaccacaggcttttcatcctccatgcgtggaattctgactcagttctctgttgtttggggtgtattttcaagcaattctgtttctcaaaaagggtatgtgagtgttgtattttctgacttcttatttatttaaaaacatctttctttttcttctcacatgaaacacaatttaagtgacaatattatgctttttcctagctctgtttagtaacgtcaacggctacatcctattgtcattgaggatccaaatttgagcagtgtttttatcacactactattttgtttaaattttaaaaaatacaaaaggaaaagttgtaatttgtagccaaaatgggaataattgcctctatagtccttccttaattttcttaaaagtgtgttttggcaaagtgagttgtaaagtgaatcagattttcctgtttacatctaatataatattgaagatataatttcatggttggaaaaaaaccctgccaagtagacataagacttttggcatcacatgcaccaggaggtgtccgtgggttgcctggtatgtgccagtggcaggagcagacccggtctttcctaggaagcagtgtagggtgcctgggagggcagtgcggcccaggggtggagatcatgtctttgatggcccttagacctgagttccaattctggatctgataatcacgacttttgtgatctggtaccaataatttgatatttaacctctgtaaactccagagtctacaaattaaaggtgaaactcaccctttatttatggggttggagtagtaattacatgagaacccacacaaagcaaatctgtacccggtgcatagtcagcagaggtgccagggggttccgagggatggcttgtccaggaaaaggggatccggctgggagactgtagcccgtgtgaggaccacagatccctcaggtatcgttagaatcaattacacatccctgtgatgtgcccacttgtgggttaatcgctttgtgcctccgtctccccttctgtgaactggggttactgagggtgccccacccacaggcttacgtgaggactcagtgtgttcatgcagataacgcatttagtacagtgcctttgtgtgctggaagagctcagtcgttgcaaatttgttattattattattattatttagtgttcattgcttctagagggctggggtgggatcttgatatcacacagtttatttttaaaaatatcaatgccaaagacctacacaaactctacaaaatctgattcttcagagaggtgtgtgtgtgagcatgtgtgtgagagggagcgggagggaggagaaaacagcacgtaagtgattcggatactcagcgccctcacacctcatgctcggctagacatcattctaaatatagactgcacacacttcgccttcctcccacactctccttccaggctgcccatgtcatccccacagtgactctgtcccgggcagcccttgattgcatgtgtcacatcagcattcctttcgcagacgtccctcacggaatgtcctctctgtcaggtccatcgtctgagtgccacactcgggggcctcctgcaggaccacgggtctcgactcttacctggagccctcccctttgcaaggcccctcgacatggagaggaagaagtccgagcaccctgagtcttccctgtcttcagaagaggagactgccggagtggagaacgtcaagagccagacgtattccaaagatctgctggggcagcagccgcattcggagcccggggccgctgcgtttggggagctccaaaaccagatgcctgggccctcgaaggaggagcagagccttccagcgggtgctcaggaggccctcagcgacggcctgcaattggaggtccagccttccgaggaagaggcgcggggctacatcgtgacagacagagagtgagtagcagccctggctaagctcctgtgtgccgagggagggcttgtcccagcaggctggaggtggggcgcctccttgctgtggcggatgcatacgcttttaagtgtcttcaactgaataatggggtgcaggcatccctggagtctcaggcgcggagggcagccaggtgcctggacagtggctcctcctgatgcttctgagctgggctccagagctggagagccgttctctgaagggcatcaaacaaaaccaaaccaagcaaatcccttcctgggtttttggtcctgactggtcacctgcaggccgcgcctctctgcgggtcagaatcaccttcagcggcggccaggcagggtggggtctcggggcaggtaagtgtacagcaaagcctgagcacggcccgcgcgggaatgcgggatgggacgcggccctggaaactgctgcaccccggactcctcctgcctgttaggaaggactccaggtgctttatctgttttgcaccaaagtggcccaaatatcctggcgtgggcgcccttcagaaggaagaaggggcttcacagcagcgagcctctttccccgccctcatgtcgatctgaacttaacgagtctcagaattcagacatcacgggcccagcaaggcacaagtggctggcccgttctcaggtcaccccgttaatgaatctgacatttgatgctttgctttgtacaagtgttgtgttttcttcaagtgatagaattggtgtttcaaagagaaggacgtgtctgcctggatgtacacacacccacacgtttgtatgtgtgtgtatatgagtgtatgttgggtaggtgtgtgtgtgtatgagtgtgtatgttgggtagatgtgtgtgtatctgcatacgcatgtgtgtgtatatgagtgtgtgttgggtagatgtgtatgtgcgtgtgtgtatagtgtatgttgggtaaatgtgtatctgtgcgtatgtatatgaatgtgtgttgggtagatgtgtgtgtatctgtgtgtatatgagtgtgtagggtagatgtgtatctgcatctgtgtatatgagtgtgtatgttgggtagacatgtatctgtgcatatgcatgtgtctatatgagtgttggatagatgtctgtgtatgcatgtgtgtgtatatgagtgtacgttgggtaaatgtgtgtgcatctgtatgtgcatgtgcgtgcgtgtgtgtatacgagtgtgtgttgtgtcgatatgtttgtgcatatgtatgtgtgtatgagtgtgtgtcgggtagatgtgtattggtttgtgcttatttgcatgtgtgtgtatgagtgtatgtcgggtagatgtgtattggtttgtgcttatttgcatgtgtgtgtatgagtgtgtatgtcgggtagatgtgtatcagtttgtgcgtgtgtgtgtgtatgagtgtgtatgtcgggtagatgtgttatccgtatgatgtgcatctgttcgggtatttcgttgtgtgtatctgtgcgtgtgtgtgtatatgtgtgtgtgtttggtagatgtgtatctgtgtatgtacgtgtgtgtgtatgtgtgttggataggtgtgtgtatctgtgcatatgtgcgtgtgtgtgtgtgtcaggtagatgtgtatcggtttgtgcatatttgtgtgtgtatgagtgtatatgtcatagatgtgtatctatgcatatttacatgtgtgtgagtgtgtgtgttgggtagatgtgtatctgtgcgtatttgcatgtgtgtgtatgtgtgtcgggtagatgtgtattggtttgtgtatatgcccatgtgtgtgtatgtcaggtagatgtgtatcagtttgtaggtatttgtgtgtgtgtgtgttgggtagatgtgtgtatttgcgtatttgtgtgtgtgtgtatgagtgtgtatgtcgggtagatgtgtatcggtttgtgcgtatgtgcatgtgtgtgtatgagtgtgttgggtagatgtgtgtgtatctgtgcatatttgcatgtgtgtatgagtgtgtgtcgggtagatgtgtatcggtttgtgtgtatgtgcatgtgtgtatgagtgtgtatgtcgggtagatgtgtattggtttgtatgttcgtgtgtgtgtatgagtgtgtatgtcgggtagctgtgtatcagtttgtatgtacccgtgtgtgtgtatgagtgtgtgtgtcgggtagatgtgtattggtttgtgtgtataagtgtgtgtgtatgagtgcgtgtgtcaggtagatgtgtttcagtttgtatgttcgtgtgtgtgttgggtagatgtgtattggtttgtatatacgtgtgtgtatgagtgtgtgtgtcgggtagatgtgtattggtttgtgcaaatgtgcatgtgtatgagtgtgtatgtggggtagatgtgtatttttatgatgtgcatctgttcaggtatttgtgtctatgcatatttgcgtgtgtatgtatgtgtgtttgttgggtgtgtgtgtatgtacgtgtgtgtatatgagtgtgtatgtcaggtagatgtgtattggtatgatgtgcatcttcgggtatttgtgtgtgtatgtgtgtatgtgcgtatgagtgtgtgtttggtagatgtgtatctgtgtatgtgcgtgtgtgtataagtgtgtgtgttgggcaggtgtctgtatgtacgtgtgtgtataagtgtgtgtatatgagtatgtcaggtagtgtgtcgatttctgcatatgtgtgtttgtgtatatgtgtgtgttgggtagatgtgtcagtttgtgcatatgcatgtgtgtgtatgagtgtgtgtgtcggtagatgtgtatcggtttgtgcgtatatgcatgcgtgtatatgagtgtgtgtgttgggtagatgtgtgtgtatgtacgtgtgtgtatgtgtgtgtgttgggtagatgagtattggtttgtgcatatgtgcatgtatgtatatgagtatgtcaggtagatgtgtattggtttgtgcgtatgtgcatgtgtgtatatgagtgtgtgttgggtagatgtgtgtgtctgtatgtacgtgtgtgtgtatgagtcaggtagatgtgtattggtttgtgcatatgtgcatatgagtgtgtatgtagggtagatgtgtattggtttgtgcatatgtgcatgtgtgtatatgagtgtatgtggggtagatgtgtgtatctgtatgtacgtgtgtgtgtatgagtgtgtgtgttgggtagaagtttgtgcatatgtgcatgtgtgtatatgagtgtgttgggtagatgtgtatctgtatgtacgtgtgtgtgtgagtgtgtatgagtgtgtgtgttgggtagaagtgtgtgcatatgtgcatgtgtgtatatgagtgtgtgtgtcgggtagatgtgtatcagtatgatgtgcgtctgttcgggtatttcttccttggtgaagaagtacctcttattttgaggatcattcgcactggaggtgggagctgcatgacagctagaacccatctgtcctgcgggctctgcgagcctcgcagtgctcgggctggtgctgtcgctgtgctgcagatgctacatttcatcagggagaattagctgcatatcataattgggcagaaatattttatcttgagctcaaaccgcagagtgtgtatcaaagccaaattaaaatttaagatgattttcagctgtaggtgattatcttagttgtatctttaggtaagttgtaagcagcagaaacttgaagcttacactaaaatatggactccattttctcaagactgctttacataagtcaggatgagctttcccgtttccaggctctttgcttggaggaggcgtcccacgtgtctgtctgtgcccttgctctcctgtttgtagagtcaggaacttctcatggctgttcatttctttgctctcaagcccagtggagaatcacaggcaggccctaagtgatgtgttctgaggctgcgtgtctgcaccagcagagccaaggggaggcgcctgcctcagcactgggtgacgcagaccattatcatgaccgattcctatgggtggtcaaacgccctgtgctgtggacgtctccctccctaggaaacactgctttgtgtgtggtgtgggtgttatgtgatgtgtgtgtggtaatgtagtgatgtgtggtgtgtgttgcatgtggtatgtgttgcatgtgtgttgtgtgtagtgtgtgttgtatgtgtggtgtgtagtatgttgcatggtgtgtgtgtgtgctgtgtgttgtggtgcacagtgtgttgtatatgtggtgtgtggtatgtagtatgctgcatggtgtggtatgtgttgcatgtctgttgtgtgtagtgtgtggtgtgtgttgtttgtgtgtggtgtgctgtgtggtgtgtgttatgtgtagtgcgtggtgtacagtatgtgtgtagtgtgtggtgtcctgtgtggtttatgtgttgtgtgtggtgtgtagtgtgtggtgtgtagtgtggggtgtctgttgtgtgtcgtgtgtggtgtgctgtgtggcttatctgtttgtggtgtgtagtgtgtggcgtggtatgtgttgtatgtgtgtggtgtgtagtgtatgtgtgtagtgtgtggtgtgctgtgtggtttatgtgttgtgtgtggtgtgtagtgtgtggcatggtgtgtattgtatttgtggtgtgtgtgcatggtgcacagtgtgttgtatatgtggtgtgtgtggcacatagtgtgttgcatggtgtggtgtgtgttgtaggtgtggtgtggggtatgttgtgtgtgtgtgtgtgtgtttggttgcctgtgtctcctcactctgtgctggagccctcttttctcctgaaggcccccatgttgtgttcgtggacactgtgtgtttccctgcaggtgtcctggggacttgagccacccttgcagggggacggccgcccatccctgccccggggtaggagagtgccccagagaaccagtgatctggtcattttaagggctttccaaatggatgccgaggtgttcacccggagagcaggaggccggtgtggtttgctagggaaccttcagagccgacaatcctgtgccattgctgctaatgggctcaccctggagggaaggacaggagggcccctgtctgcagcagcctcgcactttctggggaaggagacctatcacattgggtcatttcctgtctgtgcttgtgactttccagtagaaaaaagctagggcttttctttgcattcgagtttattttcttgtagtgggtttgccggccatgccttttggactggaatatttacctcctatgagcagtgggttaaagaaaaaaaaaatcatcatgttatcttggctgacttcttttcttttcctttgcgacttcaactggttggaagctatctggtgaagacagcacagctttttgtcagcaatttgtactgcttgagcaaggtgtgatgcactaggtgaggtctcctctcttcttgcaaggagattgaggtttttgccctattatcagactaataatttgtgattctcttgggcaagttttcaccagatttcagcttaaaccttaacagatcagctattaatttccaagacacagatggcattctttaaaaaagggggacttttgtacatttggttgtcccacagaaaggagaggaatgtggtttagaactcggtgtcacctcagcatccacatgctcttggtgctgaggttcagatgggaggatggtagggctcggcttttccaggcatgattttctctctcacattttctgatggacacagtaatcctttgccatttacatttttatcctttttacaaactagagggattcttgaagactggacgaagggcaggacagccgccccagtcctccaaggacaactttaaaatgatttcatgttaggtttccagaaggaatcacaggacggacaccaggtatagggaggagggagccccttacctctcagcaaagaggaacctgccttctaaatccagaggcaagagcttcagagaccacggctcacacacacatgcctctctctgcctaccccagaccccactggattgggatgtattctgcggaacgaccacgctgagccagtgaggtggattttggggaagtgaaacctgtagtcaggaaaacatgggagctgaggcagaggcttgagtctggggtggcggccacagtgctgttggagaaggtggcctgggcccttgacccacggaagtccggcatccagggtcagggtcccacggcagccccgagacctagaatgtggcaaacgcccctgtgcttgggtttcctggtctctggagtggcagccgcagtgtgtggctcctggactgtggagagatgaacggggctcaggtggagcagagcccgggccacgtgcagaggatgcagggcgcaagcagaggaggacgcagggtgcacgcagaggaggacgcagggcacaggtgcacggatgagcagcctctgtcagcagtgggaagaacacagtgttgcttgaaagaggaggagccaatggatttccacgaggggaagctggagaggttggagccctgagtcttgcggggaggccggctgagggaagaatgtgcaaaaagtggcatggggcggcgttgacctctccgatgcctctcaatgctaacaagggagacagctgcagctgaaatgtttcttccttcaagtgtttcttatgacaaaactttcttgcacctcggagaaggcaagcagcaaaatggcagatggtaccgggccaccgttaggggctgctgcgtgctcacctctgtgggggttcagttggaatgtggaattcagagaggccagtgaaggcagggatccgccggccagggagaggaactttggaaccagaagtctggaaggaggtgggggcttcggtctctccatctgccaccctcagtgagtgccctggccctgcaggttcccccagccccttcctcggctcactgtgagatgtgaaatgtgaaacccaccgagtgctcaggaaccactgcccgctctccgggggctggtgtggcggagaggaagttccgccgcccgctgtcctgggggctggtgtggtggagaggaagttccgccgcccgctctccgggggctggtgtggcggagaggaagttccgccgcccgctgtcctgggggctggtgtggcggagaggaagttccgccgcccgctctccgggggctggtgtggcggagaggaagttccgccgcccgctgtcctgggggctggtgtggcggagaggaagttccgccgcccgctgtcctgggggctggtgtggcggagaggaagttccgccgcccgctgtcctgggggctggtgtggcggagaggaagttccgccgcccgctctccggggatggtgtggcggagaggaagttccgccgcccgctgtcctgggggctggtgtggcggagaggaagttccgccgcccgctgtcctgggggctggtgtggcggagaggaagttccgccgcccgctctccggggatggtgtggcggagaggaagttccgccgccgctgtcctgggggctggtgtggcggagaggaagttccgccgcccgctgtcctgggggctggtgtggcggagaggaagttccgccgcccgctgtcctgggggctggtgtggcggagaggaagttccgccgcccgctgtcctgggggctggtgtggcggagaggaagttccgccgcccgctctccggggctggtgtggtggagaggaagttccaatcctagtggctgcccaggaggcctcaccgctcaggagcccctcaggggttcagcgagaagagcgcatcacgagaaccagcagggtgccaggacggggtgcagccgaggtccggactgatgcttcctgctcgtccttccttgttagagtaaaggaaaccctgaggatgctgaagatggattctgtgtttctggcgccagggcagatttcaggggttctgttttgttcttcagcctccacgctgtgttgtgacttcctgttcagaaagcgcagtcctcacctctgtagaggcccctcctgagggcggacatgccctgccttgtcacttgctcctctttgctttgtggtcttaaaagaatatctgtagcatgatggatttattatcatttaagaagatttcaggtggtgtggggttatagccccgatgggtaaacatgttcacggttgcttgtacattagaagagaagaaggcgagaaggagtggcatgggggtggggcaggaaaaagaggaagaagaagtaaacaaaaactctcccaaacctcagcatccccgacagtccagcccatcctgctgggagcggccgtgggaagtacgcgaggcaggggggtggccgtgggagggacgcgaggcagggggcggctgtgggagggacttgaggcagggaggtggccctgggagggacttgaggcagggggtcggccgtgggagggacttgaggcagggaggtggccctgggagggactcgagacaggggggcagccctgggagggacttcaggcagggaggtggccctgggagggactcgagacagggaggcggccgtgggaggcacttgaggcaggggggtggccatggttgggcctgagccatgtctcgccagcccggcagctcagtgggctctgtgccccacccggctccctccatggccagctgtctcccctcctatggctccatccatgctgtctccccttctcccctcttcccttctcccaccctggtccaggccatctgagcctcttgcctccgcactgcggggccttctctcttgcgcaccagcatcacggctctttctttctcacccgccgtgcacgttgaacccaaagaggactcgacaaaaccaaatctggccccgtcaccctctcctgttggaatctggctgtgactccactggtcctgagatacagaccccagccccagcgtggcccaggctgaccagcagctctgcaggtgcatcttggggacactccaccaggccctccctccgccccggcagctgggctcctgcagaaggtcccagctctgcacctgtcccgtctgggaggcagcttcctgttcacgtcttctccccattcagagaggtctgtccacacccctctttcccaagtctctttgtcaccaattttccattatgtttcttcaagactctgagcatctggccaaaccattggccatggcctattaatttgtaataatcacacatttggctatttctctttccaagcaaagtaaaccagatgtacagcctatagttctgcccattggagaatttcccttcaccgctgtccttttaaggatgttccagaaaggggcagtagtgctgcagttgtccactaacgtgggggcctgcatatcatgcagaaccatctgtaaaccaggcccaggtcttcctccgtcagctgattttagggaactctccaggagactgtaggtgcaggctgggagagagaaggcagcatagcgggagtggggaccgttggcattggcggcacttctttatgtaacttgtgcctttagggcctacttaggcccagacacataccacttccatttgatgatggaatgctgctgtgtacacccaactttctggcttggtgggtcggaaaacattcagttcatgatgggcaactcaggtcccatggtaacttggtggtccatgtcggcacgggatctgaggtcgaatcagattagagaaccagctccgcctgggtcggcacgggatctgaggctgaatcagattagagaaccagctccgcctgggtcggcacgggatctgaggtcaaatcaggttagagagcctgttccgcctgggtcggcacgggatctgagatccaatcagattagagaaccagctctgcctgggtcagcacgggttcacggctcctgctggaggcacttcccgatcctatttggcacactttttaaaggtgacgctatatagaccttccgtacctagatctttagttagctgctggcatttaaaaagtgtttatagtgagcagtacagtctcatccttatgccaaaaaataagttgtcagaatacagtggttttcctctattgattttctgcctggaagagtcgatggtgtggacagccccactagcagtggtccagggtcgttggcctgggtgcggcacacgagctccggggctgcatggcggtccgcaggaggaaggttcagtttgggtgcacaaagcatcaaaacctccttctcccagaccctgacattagactcctgcaggaagagagtgggcgtgcaggggatccagggtggagacagacatggtgtcggtcactgcggcgtcggtcaccatggcgtcggtcaccgtggtgtctgtaggatactgtggcgcctgtcagtcaccacgcgttggtcagggcacctccccagcccactgtttgccaccctcgaagcgttgcttctctgcatgggggaggttcccgtgggctggaaacattttaactactttataagatgatttaaatagaataaatttcatggtttgttttaatgatgaacagggataactagaataattggttgatcccaagaaacctcgtttatctattggttttgagtattgtcttatcaaaagagtttatatcaaagttgactcattttcccttcacatttggctccctagctcctggtgggttttgcagtaaatagtaaaatgtcccagatcgggctggtgaagctgcagaagcacagagcatggtcagcaggagggtcggtcatggcgggtcctgttcttggcttgatttcatctggcccacaaggaagaggcagtaacaaggctgccaaaatgagacgtggagaagttttatgcaggcttccttcggttttgttaagaacaagtgtaggtcgcaacaggtccccgggctcaccccacctttctgggcacctacgttggaacatagcctgaatgataaagtgttccgtttgagcttttctcctgggagtttcctagtagtgtaattttgggcaatgactttagtttctctagcctcggtttctcttttaaatgaggccaataatagtgtgttcctcaggggtctgctgaatgccagatcccaccgctgtgtggggcctcagtgtggcgtccagcacaggagcttcccagagtttttactactctttatatttccgacccctacgtacttttcactagtctgatttttaggggtgacactcccgtagtcattttctgctcatgcgtccacccgtgcactcatttcggggtgatgtggatgccacacggaagacccagcactgtgccggggctgagaggacaccgtggaagagggacactgtcacttcttactctgagcctccctccagtgagtgcttgccgaggccttagggcctcccatgtggctgattcagtagatccataggaacaggcttgtccaacgtggttgagcttagagacgtcacaaacttgccactgtccttcagaactgaaagactctagagagaggagacgccatcttcagctttgaaagtcctttccactgccctcacaggcactcctagctctgaccctgaccccataaaagttctcatgcctgtttctcttctacggcaatattagtgtccaggtattgagggtggaagccgccacatgcagacacagcacgtcgcacctgctggatcctcccactcattttcaggatgacgtccaactgctttctaaggaagttcaggcctcggaatgacagatgatggctgtggctttagagatgaaataggaatggctgcgtgatcattgtgagcacagtcagccctgtcttgtttgtctgctttacagaatggagccagcactcttctgctttacagaggagccgtgatgcccctgcccacctggccggcactgtcacccttgccaggctgaggaaggaagggagtggactgcacgtcccgtacactttgtataactggggacaccttggcttgtggaggcagcgggttcacaaacacattctgggcttgtggacttccttgttgtgttcagggtgttgtaggagtcttgtggatgcttctgttggtttccatattggagcatggagggcagagggctgggcccaggattcgtggtggagcccctcccatgtcctcataccatccccttggtttgaaacatgctagaaaaggagactcatggaatttggtagcaaacattgattgggaagttggcttatgctccgcagggggcagtaggcttggaagaaacaaactcagatgacacgtggctcctgccctcaatgagtttgcagtttgtagggggaggcaggattaaaatatgaaagtactggagaccttttaaaataagtcatgagctgagtggtgctgatcaaagcacacagggagttttagggaaagcctgaagagcagcagtttctgtctttgctgattggagtggtgtggtcggtcctagccttctccacctgcccttctgcacctgccctcttcctaatggctccaaggatggggaggcccagggaggctggggtgcagggggctgaggcaaggcaggtcagcgatgggagcaggtaggctggccctttggagcagtcaccaccaggcccaggcagagagaaaagcccaggctgctggggagcacaggagccgggaggaaggaacctgcagccacacgaaaaaaaggaagggctcatctggaagcatcgcacttgcctgccaggagggtttggcttggagcagggaggctggttggatgcaagtctggagttcccagcagcctgggctggtctcagccggggtggagctgagccggctgtggtgggtcattgctctgtccagctgcagcctgagtttgtctttgtagccccgcctggctcccttccctgttgcctcccttctggcccaacatctggccattctgacactttttctggcaccagtgcccttcacaagctgttcagatggccctggaggatgttttgggacaggagctgacctgggttagagcagacatccaaaatgtacaggaaaagagaggacatctgggacccctccccttccagcagccactctttaaaggaaaatggcttgtttctcaattgtaaaattacacagaatgcagccttgaaaaatccactttaaagaacacgccacaggctttccttggagacagggagcagaaaggagctttgccagggatccagcaggaacttggctcagctttctccgtgagccacaaggagtgttctgctgaaatagagattggacgaaggctggtacactgccttggatgtggggagcagccacacgtcatggtgcttttatactaatcaccttgtttcatcttcccaatttcttgtattttattaacatatagataacataaagtttactgtcttacccatgtttaagcatagaattcagtagcgttaacatttgtgctattgtgcaaccatcaccgctgtccatccccagagctcttttcatcctgtaaaactgaagtttcatccccattaaacactaccctaccccagcccctggcagccttcactctactctgtgtctctctgaatttgaggattctaggaacctcacatgggtagacacacagaatttgtccttttatgcccaggttatttcagttaccatcatgtttcagggttcatccctgttgtcgcatgtgtctgaatttcttcctgttcagggctaaataatattctacttttggtgcaggccacgctttgctcctccatttgtccatcactaggcccttcagttgcccccatgctttagtgattgagaataatgcggctgtgaatgtgaggcactaacatctctttgagaccctgttttcaattcttttgggcaaagtagtctcccccttatctaagggggagacattccaggaaccccagtggatgcttgaaacttcagatagtgcagaaccctatataaactatggcttttcctatacatacatacctatgataaagtttaatttataaattagagtatgagattaacaacagtagtgataaaatagaacaattataacaatttactgtaatagaagttgtgtaaatatggtgtctctctctctctctctctccctctttcaaatatcttcttgtactgtacctcaggtacctaaaacacagaaaacaaactgcagctaatgggggactactgtagataccaaggagtggagttactcgatcaaagtgcaattctatttttcatttttttgaggagtctccatactcttccacacttgatataccgtgttacattctcaccaacaaggcacaggagttccaatttagccacatctttgccaacgtttactattttctgggtttttttcttcttacagtggccatcctgataggtatgaggtggtatcacattgtagttttgatttgtgttttcctaatgattagtgatgttgagcatcttttcatgtgcttttggccatttgtatattttctttggaggaaaatgtctattcaagtcctttgcccatttttaaatggtattgtttgtatttttgttgttgagttttaagagtactctatacacgctaggtacattatgaggtttcttaaatagtgatgtaaatattttactttcctttaatagtcaaaatgagaaattttacgttaaactaaaaatgtagcaataatacactcacagtgctatctcttatattaaaagaagatattggccaggtgtggtggctgatgcctataatttcagtactttgggagaccaaagtggtggatttcttgagcccaggagcttgagaccagcctgggcaacatggcaaaaccccatctctacaaaaaatagaaaagttagcaaggcatgctggcatgaacttgtaatgtcagcaaatgggaaggctgaggtgggaggatcacctgagcctggaaaggttgaggctgcagtgagcaacgatcatgccactgcactccagcctgggcgacaaaaaaagaagacattattgacatgcttgaaaacaaagactgtcatgtttatgcttatagttaatgcaaatagatatcccttgttgtgtactatagaaatagtccttaaaagatctgtggaatatcatattttgctaatctctgtcttttgattggagagtttaatctatttacatttaaagtaattaatgatgaggagggacttctgtcattttaatatttgttttctatgtgcattatggattttttgccactcattttctgcattactatcttcttttgtgtttagtagatttttaaaaattaaatgcctaaattcctttcttctttttgtacgtattatgtagctattttctttgtatttatcatagaggattagatttaacatctgaaaattacaacactaacttaaatttatactagcttgacttcaataacatacaaaaattatgctcctttatgctatttacccaccctttttggctattgatatcacaaaattgcatccttatacattgtatgtcccaggatataaactaataattgtttaaaatttattcgtttcttaaattatgtagaaaacaaaatgtggagttacaaaccaaagttataatactagttttaactagtaattgtttttaagatatgtactagtctcttaaatcatatagagaactaaaaggagttacaaaccactgttacaataatactatattttataattcaccatatatttgcctttattgagattttaattttttatatggctttgagttattgtccagtgtcctttcatttcatcctgcagggctccttggaatatttcttgcaaggcaggtctagtgataacaaactctctcagctttggtttatctaagaatgtcttaatttcttcttcacttttgaagtgcaattttgttggatataggattcttggttgacaggttttttttttcttttcctgtagcacttggaatatattggttcactgctttctgttctgcaaagtttctgctgataatattatttggaaagcctggtgtgtgatgaactgcttctttcttgctgctttcaaatgtaagaggagaattctctgtttgtccttgtcttttaacaatttagttaaaatgtgtctctgagttaattttacttggagttcactgagcttcttggatgcttatatccatgtctttcatcaaacttgggaagttttcaggtattgttcttcaagtattttctctgcccctttatctcttttttttcttttgggcacaatttcctctcacaattcatatactggttctcttagtggtatcccacatgtcccttagggttttgtcacttttcttcaatctttttttctatttcttagactgaataatttccattgtcctatcttcaagttcactgattctttatttttcttgctcaaatctgcctttgaatctctctagtgaactttttaatttcagctattgtattttgagcttcagaatttcttttatattttaggttttctctttgacattttcatttttcatacataatttttctgactttctttacatctttcttttgttcttcaagcatttttatgacaattgttttaaagtctttgcctagtacatctgccatcaggtctttttttagagacaattattgttgacttacctttttcctttgaatgggctgtagtttcttgtttctttgtttcttgtttcttgcaattttttgttgaaaactagaaattttaatctaactctggaaatcagattgtctctccataggtttgctattttttgtttatctttcttttaaattttttgtaggctgtctttgtgccaaggatcagcctgaggtgtaaacttgtggtattatctgagcctttccctgagcatgtgtggtgactttctaattttccctgtatattcagttacttttgaatattctggtctttaatttctggctcccaaaagcggaaaaagagaaaaatgaaggtgggaaaaatgggtgttagcattttaaatcccctgtaagtcattttggccagagggggaggagcaacaacaatgaggaggtggccaaacaatggtgccctcctcctttcctgcacctctgtgatgagaagcagcaatcagcagtgagattgcagattcccaatatttggaggacaacatctgtattgcctgttctggctcctgccagtgtgtgcaggctgctccaggaacatgtgcacagctgcttgccacagggctgaaggtgagtagcggtagctcctactgtgatgaaagctgacattgactgcaaggtgtatccagaccttccactagaagtcggaggccttcattaggcttcagagttcaaggatcagttacatcagacagatcctactagcacagtgttgtcaggtgggagacagattcctggtgtttcctactcaccatcttcccaaaactaattcatgctttactttagttttacagaaactttataaattgagtggggttcatttaatagtttacattttaatgatttttaaaatgttggattttttgctgtttttgacattctcgtgttcattcattcatgcagttaatgccaatgtagaatctacttgtggaatgagtacttgtgtccatgtgcagggagaggtgcatggtgcagtagccaaagcctaccccacgtgggtgaggtccttacttcaccgctccatgcagggtgtgcagagcgggcctgtcttataaaactcaagttcccagttactcacctgagcgaaccaggctccttccctgttccatctgagggtggcacagggtggagtgtgagggatgggctcagtgcagacagttgagggcccacccagtcttgtcatatcttcacctgatgccttgaaggcaacacagactccgtgtgtttgatgctgacctcaggatctttcctctgtcctggggctgtcctgagtccactcgcagtgctataacaaagcaccatggatggggcagcttagaagcaataggaatttcttcctcacaattccaggggttggaatccagatgccagtagatttttgggttcttggtggaggcacacttctgggttgcagatggcattttctcacatgaaggaaaaagatctacagagcctcttgtagagggcactgatctcattaggagactccaccctcatgacctgaccacctcccataggcccctcctcctcacaccttcaccttggggctaaagattggaacatacagattttaggggtcacaattagttcatagcagcctgcttcagaaaacagcatctgctctgctgtcccttcaaccctgcagagcccacctttctcactcacagttctgaacaccttacccgctgacacatcgcagtctatgaccatgtccacttcagtcaccattaccacggtccatgctgcttgagctcatgtctcattgagacaatctggaggccaccagctgtttcccttctgtctcctctggtctccaacctgttctttatccaggggagggaacttttgttgttgttgttgttgttattttggatatggggtcttgctctttcacccaggctgggatgcagtggttattcacaggtgcaatcatagctcattgcagccttgagctcctggactccagtgatcttggctcctcagccttctgagaagctgggaccaggagagtgggacagtgcccttgcctaggccctgttgatagctcgccattgtatttgggataaactccaatcccttaatgggtgaggagcacccatgtagttggctcccttccttctagccatccgtgcctcccctgccccttctctcaagttctctgagtgactgtgctacccgagggcatttgcttgctgtttccatccctgcgtctgcctctcgcgctctgtgccttagactagtaacacgatccattctctcagccctgtggtagttcttggggacccttctggggctcccttaccccagcctggaccaggctcccatgtaggccccagggccgtggccggtggcttctcttttccctggggtttgccatgggttttttaatgcatattctttaccgttgttcctgccagattagaggctgccgggggccgctggctcctcctcctctctcatctctgcttccatagctcctggctcagcctggtaccacaagtgctcaggaagtatttcttagatgaagagtagagcattcccgcggcacgtcttccacatccctcccaactgatgtgtagattgcctgaagctgagcgacctacgttagtctagggttggaagtcatgtggctttgttgctgattttatggtgtgggagtttggccaaggggttcccaaagcagatgcctgaacaagtgtcagcaccagtgggaacccacgagaaacacagattcccaggcctgacctgtggcctcctgactccgaaacgctggagggtggctggggcatctgcattcctggtgagtccttggcccatcctggtgagtccttggcccactcaggtcccagagccctggactgggcagggaaggcctgtggtacgtggatgcagcctcacctttccattgctgtaaccactcccaaactggaccagctgtcaccttcacctacaaagggtttttttgtttggtttggtttttttattttaaatacactgtcctgggctccagttgcagccacactggctgggcaggacaggcatgggcctggacaccctccccaggtggctctgaggggtacccagatgtaggggccaccggtctccctggaggtaccgggcttttgggacaggctcagcccctgagctcagatgtggctcctccctgagtggaaggcggcctgtgccccagctggtcccggattgctacgtgcctcgaagtcctggccaaggatggtaggctgtgtccctggtggccacaacaacagcttgtagcgtcgacgccatcagatggctttcttgttgcaggtgcgaggcccatgagaatccacctcaatgcgtctctctgtccccaggaaggattcataacccccaagaactaccctctctctccagctagtgcagctgcgctctgaggctagactagtcacggcatgcgcctgctcatgagtctgaatctgcaggccctgctgaggtcctctccccaaggggtccctgagtgtaagtcatggatagagaatgcctggggtctccagccctggtgccagttctgttaccattgtcctactcctgcctaaggcctctgcctgctctgggcacacacagccatgccctacatccagcaccttgtctcatcactcctatccctatgctagcatcctagacgtcttccagcttaacagaaactgcccctcttgcccccagaaccctgggcagctcttacagtgttggccccatctctcctttcctactctccatccctccaatgctgaacaggctgcaggtccctacagccttgcagaagagctcctgtgaggtcagcccacagccatcatgacccgctaagctcggcctcagctccccatcctcatctctctggaccaatctgaggcccggcccttctccttcttggaattcttgccagctcgctgcttgcctctgtcacagtccttttcattctcttttgccagttcccctcattgccctaaatgttggggggccctcaatgctggggggccctaaatgccggggggccctcaatgctgggggatcctaaatgctggggggcaaggctccgtcttaggtgctccagcttcagtcaccctcctgaggccagtgaacacctctggtcgtacagctccccggtctcggcattcatgatgcactgcccccagcacccagcctggacgccctgctgtggcctctgacctctgcactcacaggcacatcgcccctcagtacccagcctgggcaccctgctggggcctctgacctctgcacacatggatgcactgccctcagcacccagcctggatgccccgctggggcctttgacctctgcactgacagacacgtcgcccctcagcacctagcctggacgccctgctggggtccccatgtccacgtgtgcaggatgtaaactcctgactctgtcagcaccactcccagctgggccttcctggggcttctgcccatcttgtgttttcccagtgccagcggactccaccggcatggcctcagatgtccctccagatccccaggctccccaccggacagccgtggtggccagctcaggcccctgccccagctgacggcctcctgcactcgtctccaggccatgtccacccagctgctctgtgacttcacctcctcaccatgtggcaccgcggcccccttgccttctctgctcactgtctgataccctgtttccagctccttcacctctgttcaaacggggccccactggagaggcctcctatagcccactttacaagacagtctctcctctctgcccttccctccacagccctgcatgccacttctctacccagctgtctcctccagagaacttgtcagccgacaggagctagtctgcctgggctgctggcgcacacttccaaagtgggaaatccatcttctccctgtcctggaggctggaagtccaagacccaggtgtgggcagggctggttcccctgaggctgaggagggtctgctcccagcctcgcccctgctgctactggcctgagatgacttcagcttgtgggtggtttctccccatgtctttgcgacaccctgtgcgtttgtctctgagtccaaaccctccttttatacggacaccagtgatattggcttagggttcaccctattgacctcagcttaactaaatctatgatagccctatttccaaatcagttcacattatttgggttttaggatttcaacatatgaatttttaggtgacataattcaacccatcatagcatgattgatttctattcaccagcatctctagaatgtgaacccctcgagggcagggctggtcttgctgttcattgctgtatttggaagcagctcctggtgccctgcaggcatcctgcacgctcactggatgaggaatgcaggcgttttggtctgctggggtgaaagcctttgcggtacaacatgcttttacataatattgtaacttaatactccattaaagtggtactaacaggatttcacaggcaacttgtgactttcaacctgaatgctggccttcaggatgagtcatcaagctgcaaaccaccctggtgacggctcttgcctcttgacggacaggtccccagccaggtggccttgtggggagtctgcggccacagtgccttccgggagtgcccccgccccctgccctgagttgctgccagtgggctggctgcctggtttccatgctcacacttccattgggtagttaaattgcccctcactggggcctggttcacatcagaaatgagcccattaaaaacagatgctttctccatggatccgccccatcctcagtcagagtcccagcatccgccgcacctgcctgtcccttctcccttctcccctttattgtattttcactgaaggctgagaggagccagtctccacacggtgggccacttgcgattcccacagccccgtccgcactgcactgtttgtcttgttgctggaaactcaggtgactccttgtgcctgagggggcagctgaccccaggccaggagagcagggtgtgtgtggggaccagggagcggggctgtggggccacagggctttagttctccaggactgctggctctgtggtgactgctccccatccctgctgtcatccgcagccccctgcgccccgaggaaggaaggcggctggtggaggacgtcgcccgcctcctgcaggtgcccagcagtgcgttcgctgacgtggagtaagtacggggccctggggtttctgtttggctcctgttgcttggtcgcagagactgggtgggagggaaggagctgcgagcccatggctcttgttaattacatgagggaacctgtttagagaagtgaaaggtgatttcagcagctttggtaagttatttagaggcagtggaaaccagtgtttaaggggaaggatgaaaatctcctgaaggacagtgtcgctgcagccaagtgtcaaacctttggtgctgtaaccaccgaaggctctagaacattctgcacatgtcctatgccaatgtgtgggagcctctggagggcccaccccagagaacactgtgcagcgttcatgagcacctgctgtggacacggccctgtccctggctgtcaggaaaatgcgctgcccttcggagacctggctttggatcccgagtctctgcagcttccatggcaggcatggccatggtctcagcgtgacctggtttagagagttgtgggcatgaggcatgcagggctggtgggtgagtacacacaggggcagcctcttacctgtctcacgacaagtgcttgaggaaccatgcgtgcatatgtgaagcttggagcagagatggctgagtgcagaagctgcaggagctcccacagcgcacagctgggtgtggagaggtcagagagaagagggagggtagagtgacatccacagaggacgtgagacaagaggccggcccgggctgtgtgcccacctgcctgtggaccgaggggtgcctgcctacacgtgttgttcactcactggccccttcacacgggtgacatcattcactcactggtcccttcacacagggtgacttcattcactcagtgactcttcacacaggtgacgtcattcactcactggctcccacagagtgacgtcattcactcactgactcttcacacaggggtgacatcattcactcactgtccccttcacataggggtgacgtcattcactcactgactctttacacgggtgacatcattcactcactggctccctcacaccggggtaacgtcattcactcactgacgcttcacacaggggtgatatcattcactcagtgactcatcacacaggggtgacgtcattcactcactgtctccctcacacaggggtgacatcactcactgagcctttcacacaggggtgacatcattcagacactcttcacatgggtgacgtcattcactcactggctcctacacgcagggtgatgtcattcattcactgagtcttcacataggggtgatgtcattcactcactggctccttcacacagggttgacgtcattcactcactggccccttcacacaggggtgatgtcattcactcactgtctctttcacatatggggtgacatcattcactcacagagtcttcacacaggggtgatgtcattcactcactgtctccttcacacaggggtgatgtcattcactcactgtctccttcacacaggggtgatgtcattcactcactgtctccttcacacaggggtgatgtcattcactcactgtctccttcactcaggagttatgtcattcactcactggctccttcacacaggggtgacatcattcactcactgagtcttcacacaggggtgatgtcattcactcactgtctctttcacacatggggtgatgtcattcactcactgtctccttcactcaggagtgatgtcattcactcactggctccttcacacaggggtgatgtcattcactcacggtctccttcacacaggggtgatgtcattcattcactgtctccttcacacagtggtgatgtcattcactcactgactcttcacacagggctgatgtcattcactcactggctccttcacacagggttgatgtcattcactcactggccccttcacacaggttgacctcgttcactcagtggctcctcacagcagatgctcactgggcacctgtggcaacctggcctcgcaccaggagctgggcatcccctttgagatacatgggccctgcctcaattctgccatttattaggaaaagacagaagagtgtatgggtcattagcatggagggcactaggggacatgcatgagaagcaccccagccagcctgggatcagaagtttctagaagtagaaatctgaaggacacatggaggcgtcccagagagagatgtgacatgcaactccacactgctcactgtggcccacaccgttcctagggtacagacatatgcaatgagcaggttcaaggaaatgtccatggacaggaaagatgtggagggacagggggctccatacatgccagggctgctggggtttccctgaaatggggtggtccggtgggcaggccaggtaggactgctcagcagggacagagaggccatttagggacccagtatgtagagtgagaggaccctacagggtgaacacagtgagatggtctgactagagctgagagagagcagccctgaggccacctggggaaggtaaaggagggagcaggtgcaaggcgggtgtggtggcaatgggagcacagagatccaggtgagggggggctatttgtggggctatagtgggtgagtgggctgtagagatccaggtgagaggtggcaggtgcatggggctttaattggcaggctcatgcagacatccaggtgagcaaagggtcacgtactcagggctgcagtgggcaggtggtttgcagagatccaggtaagagtgggaccaggcacagggtgaatgcagtaggaaggggctatgctgagatgcagatgttttttggggggcaggtgtgtgggcctgcagtaggcagcagaggtgcagagatccaggtgagggagggggcaggtgcatcaagttgcagtgggcaggggactttcccagatccatgtgagagagggggcaggtacatgggcctgctgtgggcagacggtgtgcagggatccatgtgtgagagggggcaggtgcagggcagatgcagatatccacatgaaagagggggcatgttcatgggctgctgtgggcaggggacacgagaagatgcaggtgagggaagagagcaggtacagcgtgactgcagtgggtggccactgggtgacttctgcctgggaagcaggatttgaagaattgtagaaaggcagcttcaaggatgagggtagatctgagtgcaaagtgtgtgttgatctacacagtgtgatgcctgcccatggaaacaggcaagtagggcctcaggcagaagtcctggtggcccctgggcagtcaagtgttttccctgtggctcacaatggggagggcctgttgttcccagagtggcctgggatgtttgggcatctggggttctggaggtggcgggtgggcaggggctgcagctgtttcccacctggtaggaaatacttcagtgttttaacttctgatgtgactgagggtactggaaatgtatggagtggctttcagcacaccagggacttaggaggggggagggtttgagggagcttcctaacaggtttgattgataggtttgtttcaggtacctggatgacttctaaggggtgctgtccaggtgacttaggggacagatctgggtaggtgtatatgacataaccttaatgtacagtggacagcaagatcccagtttctgatgggatcaggagatggaggtaagggaagagaaggggggcagcagcgatgtggggcacgtggacccttaggtgtatgtgagaacagagacaagtgtgcatgttggcaccaccttggtttcttgtgaggtagctcccagtcagtgttttgggttcctagggaagaaatattaactctagggaaaccacacaggacagatttcacagaggttgaaaatagaagaagctcccaagacctgaaagagctgagatgcttccaggatcttaaaatcttcctctttatgctgaaggagaattagataatctggttttatgggatcctggggaagtgacttttcctctctgggccatagttttatattttgaaaattagaggggtttgcctacttcatctttagtgattactcaaggattaatcttctgtgaacctgtgacctgggacactagtgaaaatcatgtaacaggcactctatcaccttcggggagcagggcacagatagtgtgacagggttatatccccaagggcagactccacaggtaggcgtttgtgtggagaggctcatttcatcagcccctggagacatcctctttatcagtgttttggatattcccaaagtggcacacttctgagcagtgataaacagtgagtcagaaaaggtggaaatagcttcttccagatgatacacggaggtgtgtgtgtggaggcagggagggagctaagaaagaagctggagccaaggatggaggtgatggtggagctttggaggaaactgcgctggagctgggagggagcagaggtggaggttgggatggaactcaagagagagggagatgagctgagatgaagctcagaaaggagctggagatgccacttgtaaggaataaggataaaaatgagatagagcagaaatggagctggggggaagctagagggagctgcggggaagctaggtggatggggctgggatggactgggatagagctaagatagatcagggaaggaactggaaatggagatgggatgaagctcagaaaaaaagctgagatgaatctgaggacagagcaggatggagctagaatggagcagtgatgatctaggatagagctgaatggagttggaatggagatggaaggagctgggaataaaacagaagagagatggggatggaattcagtggagctggatgaaggaggggatggaactggatggagctgggatggagcagtgatagagctgggtatacagtagtatggagatgagatggagtagtgatggagccgggtatagagtagtatggagatgggatgaagctgggtggagctgcaatggagctggatggggctgcatggcgtaagatggagctaggatggaaattgatggagataaggataaagcagggcatgcatctggatggaactggatggagatacaatggagatggatagagctgggatggatttgtggatggagatgaggtggagctgggatggaggtggatggagctccatggtctgggatagagttgatgaatctggatggaagtctatggagcttggttcagcttgggatggagtagggatggataggaatggagctggatggaagttcatggagctggggattattgaagccttggatgtacctggggtagagctgggatggaatctgctgtagctgagtggagatgggatggagctgggatgagggtgaagctagggtggagtttgatggagctcagtggagttgggatggagctgggatggagtttgacggagctgagcacagttgggatggagctaggatgaggatggagctcggatgcagttcagtgaaactgagtggaattgggatagagttgggatggagctgagggtggagttgggatggagtttgatggagctgagtggagttgggatggagctgagggtggagttgggatggagtttgatggagctgagtggagttgggatggagctgagggtgaagctagggtggagtttgatggagctgactggagttgagataaagctgaggatggagctgggatggagtatgatgacacttagtagggttgggaaggagctgaggatggagctgggatggagtttgatagagctgagtggagttgggaaggagctgagagtggagctgggatggagtttgatggagctgggatggagtttgatggagctgagtggagttctgatggagtttggataagggtggagctgggatggagtttgatggagctgtgtggacttgggatggagctgagggtggagctgggatggagtttgatggagctgagtagagttgggaaggagctgagggtggagctgggatggagtttgatggagctgtgtggagttgggatggagctgagggtggagctgggatggagtttgatggagctgagtggagttgggaaggagctgaggatggagctgggatggagtttgatggagctgagtggagttgggatagtgctgaggatggagctgcggttggtgctggttggagctgggatggattttgggatggagctgggatggttgtgatcatgggtggttgttggctcttcctcaagctctcctccactactgacaaggcctccatcagtcctgttctctctcttttctcccttctgttctcctctctgtccctgcctaggtgagccctatagtcttcatctcctttttcatcttgtgaggggccctgctgctgatcttggtgtcttactatttcctcatctatgacttttttatccatccacaaatccctgattttcacagcggtatctttgctcttaagttgtcttgattcttatgtgtcttccagggcctttctcaggagtctttgagcctgagattcacctgacctccattgtcttcatcctggccttcctcaggccttctgatgcctcagactgctctggggagggcatagtgaggaagcacagaaaagaaatctcaggcaggatgccctgatgctccattgccttaaatctgtctctaggccaggcacggtggctcatgcctgtaatcccagaactttgggaggctgaggcgggtggatcatgagctcaggagttcaggaccagcctggccaaaatggtgaaaccccatctctacttaaaaatacaaaaattagtcgggcatggtggcaggtgcctgtaatcccagctacttgggaggctgaggcagagaattgcttgaacccgggaggcagttgttgcagtgagctgagatcgcgccactgcactccagcctgggcaacagagcaagactccatctcaaaaaaaaaaaataataataatctgtctctaagaaccagaaggaaatgtgtccaggctgctaaccatcatgggctgagtgggatgatctgacttcatgggcattacaaagagcagtgtgctgtggcccccgacaccattggtgtccatcacatcaagtgggggcctgcactgacctggcacagagcaggacatgtaagaaggggaacactcatccctgcccctgagctgtttgaaacctggctcatgagacaaacaaatcggacagtgctagagaaggttctggaactgccagtgacctcagacattctgagtacaactcatgctagggaagtgaggctggagaggaagggaatctcctggggcccagagagtgggccctgcctcggacatcgctgctccatgggcacagccacgttagtccagaaagtgcagttttcctgatggtctttgagtctcacctgtgtgcagggctcttcgcgttctttttcctactgctgttattttaaggctttttacctcttactttgaactggaaggagccacctgccatcaagtgtcctgaatggttcaaactgcattcctttccacgaaggattccatcccaggcctgtatctttggcactatccctccctatggcccccaggaaggcgcctagttttaggactcaggaactcatcgtgggcccaggccatgcgcacagggaggatgaggccacaggtggtaagtgggagcctcacactgactgcagccaatgaccgcaggccctttgttctaggtgctcacgcctgcttctgctgtcagacagggacgggtgcatgtctggacacccaggccttactgggtcctgctgatggcttatttcagaaggaggggttccccatggactgatgccccagctcctgtcccgtcaggctccctgtctaggactcagctctgatgccgctgaggagcatgaggtactgtcctgggggtgtgtcctcccgggtctgcagtgccttccctgcaccgtggcccccagaacattagccgtgtgctgtctttctccccagaccatcagctcctcagtgcctatctatgtcctgaacccggctcagtgactgcagagaagtgtgcaagtgcacacttgcatcttaagtgcaagtgtgattcaagcgtgatgcaatgagtccttgaacaacaaaggcctcatccctccaacacccgcaaagctgcaggcccatcccacacccccttctgcctctctccatatatcaaatacatggggcatgctctgtgattctgcagccctgggaaactcacctgttgctgccaaggcccacaattactgatgaacgtgtggaggtgtggatgcctccttagttaaaagtgagattgtcctcagggacatttgagggccatggaaaagaagcagcctgggtaccatgagaggtgcctccatgagcagcagggcggcctggagccatgggagggaggaagctgttgcacccagacacataactgagataattgggcagagggcaggcagtcacaagaggtggctttggaataaagcatcctcgggccagctcgggatgcgtgcattgagtttaccatattttcctctggcaaagcccttctgtggtggctgtccagcacgtggaaggccgtggctcaggcgcacaggggctcagtgttttctgaaggttccctcctggccgccctgctgctgatggctgccatgcactgttagcatcatggctccagggtgaaggcgtgggctgagggctgcctggcacctgggctcagtgcctgccacatgggtccagtttgcgatctggggcttgggagaggaaccacttcatcctcaggacaggagaggggccccagggtcagctgcaagctccatggctgctcactgtgagcagatcctgggacctcagggcccaccgtggcgtagtgacgggcagagatgggcctgccgctgctcactgctttggccatctctgccctcccccagtaacatcccctgggagagggtgggccagaatgaagaagggaggagtggttggccacatggccaacagctggacggtcagggtggccaggggctttgctgtccacactgattggagcagacctgaggctgacgggtgcactactgtgctgggtgagattttcttaaataccaggtgggatttcttttaaagtctccatggctttcatggtgagctgggttttaaactcttttggtgcaatggaaggtgtgaggtctttctttgtatacagtgggattgtttgggctagatgactggaagaaggaatgagtttattctgctgattgtttcttttgctgtgcagaaactttttagtttaagtcccagctatttatcattgtttttgttgcatttgctattgggttctttgtcatgaagtctttgcctaagccaatgtctggaagagtttttccaatgctatttcctagaaattttatggtttcaggtcttagatttaagtccttgatccatcttgagttgatttttggataaggggagagatgaggatccagttttattcttctacatgtggcttgccaattatcccagcaccatttttgactagagtgtcctttccccactttgtttttgtttgctttatcgaagatcagttggctgttaagtagttgagtttatttctgggttctctattctgttccattggtctgtgtgcctatttttataccagtaccatgctgttttggtgactatagccttatagaatagtttgaagtcaggtaatgtgatgcctccaggttgttctttttgcttagtcttgctttggctatgcaggctcttttttggttccatatgaattttaggattgtcttttctggttctgtgaagaatgatggtggtattttgatggggattggattgaatttgtagattgcttttggcagtacggtcattttcacaatattgattctacccatccatgagcatgggatgtgtttccatttgtttgcgtcatctgtgatttctttcagcagtatacagacaacccaaagagtgagaaaaaatcttcatgatctatatatccgacaaaagactaatatccagactctacaaagaactcacattagcaagaaacaaacagtcccatcaaacaatgggctaaagacatgaatagacaattcttgaaagaagatatacaaatggccaacaaacatatgaaaaaatgcccaacatcactaatgatcagggaaatgcaaatcgaaaccacaatgttataccaccttactcctgcaagattggatataatcaaaaaatcaaaaaacagtagatgctggtgtggatgtggtgaacagggaacacttctacactgctggtgggagtgcaaactagcacagccactatggaaaacagtgtggagattccttaaagaactaaaagaactaccatttgattcagcaatcccactgctgggtatctacctggaggacaagaagtcattatacgagaaagatatttgcacacacgtttatagcagcacaatttgcaattgcaaaaatatggaaccaacccaaatgcccatcaatcaatgagtagataaagaaatcgtggcacacacacacacacacacacacacacacacacaccccatggaatactattcagccataaaaaggaatgaaataatggcattcacagcaagctggatggaactggagactattattctaaatgaagtaactcaggaatggaaaaccaaacatcatatgttctcactcataagtgggagctgagctatgaggatgtgaaggcttaagaatgacataaggactttggagactcagggaaaagggtggcaggagggtgcaccaaaatctcacacatcaccattagagaacttactcatgtaactcaacactgcctgttcccaaaacctatggaaaataaaaataaataaagaaggaataagtttatttcatgaacacaatgatccttatgagggaggagtggggagaggaagtgaagcatgaccactgatgggatggggggaggaagaggaggcagccgggatgtgttggggggaggaaggggaggcagccgggatgtgttggggggaggaaggggaggcagccgggatgtggtgggaggaaggggaggcagccggtgatgtggggggaggaaggggaggcagccgggatgtgttggggggaggaaggggaggcagccggggatggggggaggaaggggaggcagccgggatgttgggggaggaaggggaggcagccgggatgtgttggggggaggaaggggaggcagccgggatgtgttggggggaggaaggggaggcagccgggatgttgggggaggaaggggaggcagccgggatgtggggggaggaaggggaggcagccgggatgtgttggggggaggaaggggaggcagccgggatgttgggggaggaaggggaggcagccgggatgtggggggaggaaggggaggcagccgggatgtgttggggggaggaaggggaggcagccgggatgttgggggaggaaggggaggcagccgggatgtggggggaggaaggggaggcagccgggatgtggggggaggaaggggaggcagccgggatgtggtgggaggaaggggaggcagccgggatgtggggggaggaaggggaggcatccgggatgtggggggaggaaggggaggcacccgggatgtgttggggggaggaaggggaggcagccgggttgtggggggaggaaggagaggcctccgggatgtggggggaggaaggggaggcagccgggatgttgggggaggaaggggaggcagccgggatgtgttggggggaggaaggggaggcagccgggatgtgttgggggaggaaggggaggcagccgggatgcggaacccaggaatgaggccagagaagaagtgggtcttcaaggctgagaagcccggctcccctcaaggacccaggaacgctgcaccccgcactgtcaccttctaccatcttctccggccctccccgcggccccgttccccgtcccccactgcttccttgctttctcgctttctccccagctcctcggtggtcacgctttgcttcatgtctcccactcctctcccataaggagcgtcccgcgttcacgagataaacgtccttcttcttccagtccccgagcccaagcaaccccattcaccttcacagagtctcagcaaaatggtgggactggcagatgccaggccggggcgggcgagggaggcgtgtgcctcggggagcctctggtttcacagagcagctgggcctcgcccgtgcctgctccctgcccctggccctcctggccaccgccttcgctgtcggaagacggattctgagcacggacggcttctccgcattccgggagcagggctgggctttgccaggctcagtcctgggtaagcgtcaccctcgggcatctcccgccttaggacactggcggccccctctttcctacagagtcaaacctgagtcccgccgcccgtccctcggagccttcgggaatctggacctctccacctcctccccagggagcccccccggtggcctcacccgcaggatcctttgcgggtcccctgcccacattgcggagctgaagcctgattcttgctgcgtccagcgcttctccgaggtccccagtcctggccaggcagaggctgccccacgctgggtcttgagttctggtgcctgcgtgcgtgtgtgctcatgtgcaggggaccacgcaagccttacttccacgtcctgtgcctcacccgggcccagcagccacgggcacacacttggcaaatgcaccggctcgagggacggacgggggtgtgggctgtgcctcgttggtgtctcgaggggagcagctctgacaggcgggagacacggccacgcggtgctgcctgtcagagcatgttctgggagctgctcattgttccgggaaaggaaaagaggcggacaggatgcgcaagctgtcactctcagactctcctgcggttttgtggaagtgctagttatgctgaatatgttttgttagtggttatgtagctgtcacataaatcccattatttcttatgacatcattagagaccattaaaactgcattagcatgtgatgtaattatgccagcagaccggcagtgaccgcagccgggtttttacgacgtgattgtggctgtctgcggcggcggtgatcgatgccaggccgccttccgcggaatctcggggaggtgggcagtgctcctgggaaaaaggatgccaaagacacattcccacgagcccctgagtccacagtgagacgggctctgtgacagttctcttccagatggcttcggtggagctcccacatcagccacgaggaccgccggggcattcggggcacgcagcctaattctgtgatcaatcttcatgtgctctcctggtgggagaagcgtttactttctcatctgtgtgatttactggattgatgaatacggtgttattaccgaagaggcagcagtgggaattctcaaccctgatgcttcttgttggggtcttctctgtgcacggggcgcgggaggtgcctgtgcctgctcgatcctgtgacaaccccagtgctgcccgggcccctccacctccttccccagtgcctgcccctctcccaccctgccagtgggagaagtccctggggtttgccgggaaacttctggaaagtatgtttcagtttccgggggcagagttgtgattgttttgcccctagtcttgtccccatgcataggggatttacaaagatgttgtaggcagcaggaatcctgtgaggggtgagaatggtccttcattccctgggttggctctctggttttccctgtggcctcgatgactataaagccctggataattttgtctacacatcagggcagtgcagattaaccactgcagcgacagtgctgtgcgttagtaatatcactcaaagccaagagcccccgcagtgagaaactcccaggagccccaggggagggtctgggtaaatggcatttgcatctggatgtggtgtatccaccacctgcagactccggccctcacgggcaatgttgctacctgtttcacctgtgttctggatttgccaagtgaggaaggtggggaatggggcctcatgttatgtaactctccttcccaaacggagcccaggcttcgtcttcagtgccctgtctgaatattacaagcagttgcaaaggtgcaagctagtgtctcgagacagtgacatgaggttttcctggaaataaggaatgtcaaggaaatgtcacagtacgtcaaaactccccgtcccgtctttaagatgagacaacaagggaaggccactgtggatttgcaaataataattctgtttgagtgaaaggtggcatttctcaggttaagtgaatcccatgatttgattaaagatatttgtgtttaaaatattggtggagccttgtttcctagtatgaaatgatatgaccatttaggaggagagcagtttccttattttcctgagcctcagtttccccacaaggatggaggtggcctgggcatgtggctgagacccggctcttagaggccccacacatggttcatgctttgctggtaccatcttgagactcttacaattcttcaacaaagggccccacaaattatgtatacggctgtgaggccatgacagggttggagagactctaggaaaaactagaataacgtctgctgtggaggtttgcaatacatgttagctggacaattgcgctatttcattgctgttaggaaaaaaaacactctaatttctactgttaatggattcagattggcaagaagaacccattcttttctctagacttttcaatgcacttcaagtgtgaagcattgggtaaatgctggatttgggtactggacaccaggtagtgaagagtttcccaggcagttctgagttttcttgtaaaggcactttcatccataggacttgaatcttttatctcctggcctggtgcggcggctcacgcctgtaatcccagtactttgggggctgaactgggaggatcactggagaccaggagttttgagaccagccagggcaacatagcaagacctcgtctctgcaaaaccagaaccagaaagtatacactcctacgctccttgaaggcagggcctcagtctgtattgctcaatcatgcgtcatcagtgactagagtgtttctggcccataacaggggcttatttgttgaatgagtgaatgaatgattccacgaaagaatgggcagactgaattcaaaggcacatgggtttgactctgtttttctcaacttgctgtgaggccctgggcagattactgaagccacctggcctcagtgtgctcctccatggagtagagacgataatgtctacatcagagttgtagaattaaatgccctgcgtatgcagatacttaacaccaaataaagggtagctttccagatacattattaaagtaataaaatgtctaagccaagaaatatgtaaacacatgaacaagttagatttatatagaaatgacaccaaacactgtggtaaaatatgcattttacttatgacctacaccgtcaatactagataccctgcttggcgttattcttatttttctcaccaggaccaaataaaaatcacttcactcttccgaatgtgtctctccagtcagagacgttgcgcatgagctgattgcaggaggctttggggcagatgggcggggcaggttattcaggactcacctcctgcaggaaaggctgagacctgcaacccagggcagggaggaatataaacctgccccagttacaggacccagcggctcctcccaccacggatgctggcccatgagtgtgcgttacacttcatttgggattgcaaactggagttgtttgaaggctggcagttgccttcgggagttagcagcctgcgtgtccagagaaacaaaagtaaaacaagaaacaaaaccagagtgagccacagtgcccaggagaccctgagggatggtggggactgcgcagtggagccctcaggaacactcagggggaggagttctcacctttcctgcctgtcctacagcaccgaaggctgtggccaagctgctgaggcttcgggaaaaagcctgggtcctaattcttgggtgaatgcttctacttctaaatgttagtcactaataattcagtcatgtgtttgtgtagctcattaatccttaagcatcatgagagcgaagctgcaatagaaagcacagatgggggccgggagcagtggctcatgcctgtaatcccagcagtttgggaggccgaggtgggcggatcacaaggtctggagttcgagaccagcctggccaacatagtgaaacgccatctctattttaaaaaaaaaattagctgagcatggtggcaggtgcctgtaatcccagctactggggaggctgaggcaggagaatcacttgaacccgggagtcagaggttgcagtgagccgagatcacgccattgcactgcagcctgggtgacagtgcgagactccgtctgaaaacaaaaacaaaaacaaaacagaaaaaacacagatggggtggccctggtccttcgggaatggcgagcgttctgctgctcctggtgagatccggcccacccctgtgctgggggaacaagggtcttctcttgggactggtcatgccacccagcaggtgtaacaggaaagcagcctgcagtagaacttcaaaggaggcaaatgcttctaaagttcaaaggcaaagcatacatactgaacaatctgttttcttccaaatactccatgagaaaagtaagcggcaagacattccctggcacagaaaggatttcccaaatcccatgtaatggcaaagtaattgcaaagaagatacaatctgcacagtgatgcagttgctcaatgctttaagaaaataaagcatcattaataattatgttttcattaaggcttgcatgatgttaaattatcttgcaataactgtgtgtgtctttgtttcctcatacattcaaataagaattggttctctcttcttcctcctttgtaagctcttaggctagatattttgggaagttattgcctcatgtacgagaggcaggaatacacaattgtgcaggaaatgtggtaaaattaaaagtgtgtgtaaggaaagtaggtatgcattatgctatccacgtggaattccggagttttatgttcccgatgtctcctctgtaagaagacatagctggaatgaggcatgcaaagagaattctgtagcagccagacgtgagctcatttttttattggttttctgtcggtagcttggattagcccagcaccaagctgtgggcttgcctagagtgagggacgccagtgaacaaggaacaagactggaggaggcaagttatcatcaggaacaattcagggagtaaaagcacaaacagtgtgggggtcggtccagcgacagagtcaggaaaggacagtggtgcaggcctacctgtgggtccacagtgtgggggtcggtccagcggcagagtcaggaaaggacggtgcaggcctgcgtgtgggtctacagtgtgggggtcggtccagcggcagagtcaggaaaggacggtgcaggcctgcgtgtgggtctacagtgtggggggtcggtccagcggcagagtcaggaaaggacagaggtgcaggcctgcgtgtgggtctatggtgtgggggtcggtccagcggcagagtcaggaaaggacagaggtgcaggcctgcgtgtgggtctcacacttatactcgtgcctcgcagaaggctctcagccaagaacgccgaagttgtgattctagtggtggcattgatattagaattggactatttggagctagcacctaaaactacaagggtttcaacttattcatctataaaatagcgattgccaaatgagttgccttaggtcaaattttgtggttgttaccgagcaccacagcagcgtgctctcttggtttgcgcccacctactcaaggccagacacagggctggtttcttggaagttcccctgtgcctctacctcgaggctgaggggctggctttagggagcccctaaaacatgtactgtgtgtagtgagctcttccaggttttacctggcctcaaattatgttcagccagatatagtaagtctcttaaatcattatgattttgtttgataattttgagacctttattagcactgtgtttctctgaacataatactgactaagaaacagaatgagcaattcactaaatgtatagcccacaagatgggaaaggtttaatgcaaaatgattcttaagctataaacagtattttgagaaagtgtctaattatgtttgaattaatataagcaataaatatatacatatctctatccaccaaaccacccacctatcaatttttcatccatccatccgtctacctccccatccatccagccagccatccacccatatatctatccacttatccacctctctacccatccatccatccttctacccacccacccacccatctatccatccatccacccatcctccctcccacccactcacctacatatatatacacacacacatatatgtatatatatgcacatgtatatatgtatgcatatatatacatatatgtgtgtatatatatatatgcacacatatacatgtatatgtgtatatatatctctgccctcccattcacccatctactcatccatgtacccactcacccaaccatctctctacccatctatcacctatccctcacccatccacccacccaaccatctctctacctatccatcacctatccctcacccacccatctctctacccaaccatctatcacctatccctcacccacccacccacccaaccaaccatctctctacccatccatctatcaccgatccctcacccatccacccacccacccaaccatctctctacccatccatctatcacctatccctcactcacccacccacccatctctctacccatccatcacctatccctcacccatccactcacccaaccatctctctacccatccatctatcacctatccttcacccacccaaccatctctctacccatccatcacctatctttcacccacccacccaaccatctctctgctcatctatctatcacctgtccctcacccatccacccacccaaccaaccatctctctacccatccatcacctatctctcacccacccacccactcacccaaccatctctctacccatccatctatcacctatccctcacgcacccatctattcatgttatgggcttcactccaaatccaggtgtcaaatagataaagcacaggtcagtctgtcaagccagcagagagcatgctagtaaaataaacaaacaaaaaacagtctacagaagttttgtttttttcatttctaaataactttcaagaaaattcaccagttgaaaagagaagcatttacttttatgttggttgtaaagcatcaacattaaatgattaactttaaaactatatttgttgccatatatgccttggctatcttctttttatccacaaaaagtcaagggaatctagtacctgaggcctgtctttatttaaacggactacaaacttgttaactactgcttaggcagtgtctattcagaaaactgtagtcaaatgtgttacatttattgtagcccttaaaggttgacttgatacaaataagcctgtgttatgtatcgactgtatagtcgttactatacagaaataacaacccccagactaacccaaccaaatagaagcctcggttcttatttaaaaccatttccgaaacatggaagcttttgtcagagatttgttcatcttcttcattctcaaccggacggttggtctaagaacagatggagctcagtgttttctttcctgtggttaaagtgtcatgccctgaaaactaatattcagaaaatcactttgagatatatgattgctaagacaacaaatattagtacatcagtatattgatgttctaaaggcagataattatatgtatttttaaattatttcactcataaaagtaggggaaaaagagatttccaaatagtcctcagttaagaaaaggccttttacgcagaactcttacactcaacagtctggttgatggagggctggtatgtttgtctcataagtcttgagtgataggagtatcctagaacacaagcaataaaatcagtgttaaaatgctagatgtcacttctcttctttgttggcatgttttatgaccatcaaaagaaatgagcaattatcaatatatagtaaactatcaagtggaaccactgagtgataaagaactcaggaataaatggaatgatatttaaaatagaggtaactatagctaaaattacagtgatgaaatgatctcttatctatgtacaacatatatggtttccttattttggttaaaggtagttttaagtcagtgaattctgtagaatctcagtgatatattttttcatgttatttccagcccaattgggagatgactcctagcggcaataaatagcttttgtttctcctaatatattcttcataggacccatgtgaacacattgttcgagtatcacacctctgagggctctaggcagcaggtgtgtgtgaagactccctctttcatcaggggaggaagggtttgtgtgaagactccctctttcatcagtggaagaaggatgtgtgtgaagactccctcttttgtcaggggaagaaggatgtgtgtgaagaccccctctttcatcaggggaggaagggtttgtgtgaagactccctctttcgtcaggggaggaagggtttgtgtgaagactccctctttcgtcaggggaggaagggtttgtgtgaagactccctctttcgtcaggggaggaagggtttgtgtgaagactccctctttcgtcaggggaagacaggtttgtgtgaagactccctctttcgtcaggggaggaagggtttgtgtgaagactccctctttcatcaggggaggaaggatgtgtgtgaagactccctctttcgtcaggggaagaaggatttgtgtgaacattccccttttcatcaggggaagaaggtttgtgtgaagaccccctcttttgtcaggggaggaaggatgtgtgtgaagaccccctctttcatcaggggaagaaggtttgtgtgaagactccccctttcatcaggggaagaaggtttgtgtgaagactccctctttcatcaggggaagaaggtttgtgtgaagactccctctttcatcaggggaagaaggtttgtgtgaagactccctctttcatcaggggaagaaggtttgtgtgaagactccccctttcctcaggggaagaaggtttgtgtgaagactccctccttcatcaggggaagaaggtttgtgtgaagactccctctttcctcaggggaggaaggtttgtgtgaagactccccctttcctcaggggaagaaggtttgtgtgaagactccctctttcatcaggggaagaaggtttgtgtgaagactccttccttcatcaggggaagaaggtttgtgtgaagactccctctttcctcaggggaggaaggtttgtgtgaagactccctctttcctcaggggaagaaggtttgtgtgaagactccccctttcctcaggggaagaaggatgtgtgtgaagactccctctttcgtcaggggaagaaggatgtgtgtgaagactccccctttcatcaggggaagaaggtttgtgtgaagactccctctttcatcaggggaagaaggtttgtgtgaagactccctctttcatcaggggaggaaggtttgtgtgaagactccctctttcatcaggggaagaaggtttgtgtgaagactccctctttcatcaggggaagaaggtttatgtgaagactccctctttcctcaggggaagaaggatgtgtgtgaagactccctctttcgtcaggggaagaaggatgtgtgtgaagactccccctttcatcaggggaagaaggtttgtgtgaagactccctctttcatcaggggaagaaggtttgtgtgaagactccctccttcatcaggggaagaaggtttgtgtgaagactccctctttcatcaggggaggaaggtttgtgtgaagactccctctttcatcaggggaagaaggtttgtgtgaagactccctctttcatcaggggaagaaggtttatgtgaagactccctctttcctcaggggaagaaggatgtgtgtgaagactccctctttcgtcaggggaagaaggatgtgtgtgaagactccccctttcatcaggggaagaaggtttgtgtgaagactccctctttcatcaggggaagaaggtttgtgtgaagactccctctttcatcaggggaggaaggtttgtgtgaagactccctctttcatcaggggaagaaggtttgtgtgaagactccctctttcatcaggggaagaagggtttgtgtgaagactccctctttcatcaggggaggaaggtttgtgtgaagactccctctttcatcaggggaagaaggtttgtgtgaagactccctctttcatcaggggaagaaggtttgtgtgaagactccctccttcatcaggggaagaaggtttgtgtgaagactccctctttcctcaggggaggaaggtttgtgtgaagactccctctttcctcaggggaagaaggtttgtgtgaagactccccctttcctcaggggaagaaggtttgtgtgaagactccctctttcatcaggggaagaaggtttgtgtgaagactccctccttcatcaggggaagaaggtttgtgtgaagactccccctttcctcaggggaagaaggtttgtgtgaagactccctctttcatcaggggaagaaggtttgtgtgaagactccctctttcatcaggggaagaaggatgtgtgtgaagactccctctttcatcaggggaagaaggtttgtgtgaagactccctccttcatcaggggaagaaggtttgtgtgaagactccctctttcatcaggggaggaagggtttgtgtgaagactccccctttcatcaggggaagaaggatgtgtgtgaagactccctctttcatcaagggaagaaggtttgtgtgaagactccctccttcatcaggggaagaaggtttgtgtgaagactccctccttcatcaggggaggaaggtttgtgtgaagactccctccttcatcaggggaggaaggtttgtgtgaagactccctccttcgtcaggggaggaagcgtttgcatctgagtgggcagcattcctttttggcatttcttccaccctaaataggagtcacctttcacggtaagtgaatttgactgtcaaaaggtggatggttctcccaggaacagtgactcagaaactcttcctgctcttgcatcagacgcttcttaccatagatgtgcctggcacgaccatcgggacgacactttcaagatctaccctgacgtggccatttacagattcctcatgagatcttcactgcacggtccagggtcgggaaagagacagtcccctcccttgtatcaaccacgtcattcccgaaggaaagcaaccaggctccctgagaaagcagtacagcgtgcggggactgtgtgaacccacacaagccatagtcaatttagagagtggattttatggaagaatttggaggaggagcagacccctcctgactgagcagggcacagactgacagctttggttcagagggaaccctgtcgcatgtcagctatcctgcccgatcctccaatgccctgcaatgtttgtcttgttcccccgattttgcagggtaaataatgtaatgtgcaaaatcgccccgcgaggaagtggcggttaaacaaacaattggatctcaagccttgtaagctccagtgctcccatcctctctacagtataaaattgaaaaatgtgaagaagataataaggttattgatgtgtgtgaaagcgcttcaacacagatgctaggcagtcgatgatcctgttcattcgcagattctgtatttgcaaattaatttgtaacccccaaatcaatgcttatgccaaagtcattcctgcacacacacagagccataaagttcaggttgcctgacatgcctgtgctcaggtgggagaggacagctccgccttctcgtttcagctcatactgtaaaacaaggctcctctttatggtctattgagtgccacattttccacattttttgtgcttttcgttggtggttttgttgtttaaatggccccagcacagtgctgagtgctgactggtgttcctagtgttgtaactggctcaagtccagctgtttgccactcagaggccgaaaacatgagagtgaggtgtgggcagaggaaagcagttattaatcaaacgctggcagctggggaatggccaggctcatgcctttaacagaccattccccctttgtggctgagtgaggggtttaaggaggaaaaggcatggagctgtgtggagtggtgcaggcggacgccaggctgtgtgtctgttctgatggttatctcatcgtgcagaggcctggtttctatcattgtggcttcagcctgggagcggtgggctacctgttcctaactccccctcagcagaggattctgcagctcagtctctctgcctgttctgtttgaaaattggcccctggaatttctaagcaggtctgtaattagataggtgagcactgtgtaaggagcgcctggtggagaagggagccacgaagaatttcacagtatgcttcaaagccaaagcaggaatgggaaggaagtgctctgtgtgtgaggccgggacacgtggttacaatgtgcctgacggagaaaacacccatgtggatgggcgtcgtgtgtgtggatgggcgtcgtgtatgtggatgggcgtcatgggtgtggatgggcatgtgtggatgggcgtcgtgggtgtggatgggcgtcgtaggtgtggatgggcgtcgtgggtgtggatgggcgtcatgggtgtggatgggcatcgtgggtgtggatgggcatgtgtggatgggcgtcgtgggtgtggatgggcgtcatgggtgtggatgggcatgtgtggatgggtgtcgtgggtgtggatgggcgtcgtgggtgtggatgggtatctgtgtggatgggtgtcatgggtgtggatgggcgtcgtgggtgtggatgggtatctgtgtggatgggcgtcgagggtgtggatgggcgtcgtgggtgtggatgggtatctggatgggcgtcgagggtgtggatgggcgtggtgggtgtggatgggcgtcatgggtgtggatgggcatctgtgtggatgggcgtcatgggtgtggatgggcgtcgtgggtgtggatgggtgtcggagtgtatgggcatccgtgtggatgggcgtcgtgggtgtggatgggcgtcatgggtgtggatgggcgtcgtgggtgtggatgggcatgtgtggatgggcgtcgtgggtgtggatgggcgtcatgggtgtggatgggcatgtgtgaatgggcgtcgtgggtgtggatgggcgtcgtgggtgtggatgggtatctgtgtggatgggtgtcatgggtgtggatgggtgtcgtgggtgtggatgggtatctgtgtggatgggcgtcaagggtgtggatgggcgtcgtgggtgtggatgggtatctggatgggcgtcgagggtgtggatgggtgtggtgggtgtggatgggcgtcatgggtgtggatgggtgtggtgggtgtggatgggcatctgtgtggatgggcgtcatgggtgtggatgggtgtcgtgggtgtggatgggcgtcgtgggtgtggatgggtgtcggagtgtatgggcatccgtgtggatgggcgtcgtgggtgtggatgggcgtcgtgggtgtggatgggcgtcgagggtgtggatgggcgtggtgggtgtggatgggcatcgaggatgtggatgggcatcatgggtgtggatgggcatcaaggatgtggatgggcatcgtgggtgtggatgggcattgtaggagtgtatgggcatccgtgtggatgggcatcgtgggtgtggatgagtgtcggagtgtatgggcatctgtgtggatgggcatcgtgggtgtggatgagtgtcgtgggtgtggatgggcgtggtgggtgtggatgggcgtcgtgggtgtggatgggcgtcgaggatgtggatgagtgtcgtgggtgtggatgggcgtcctgggtgttttctccccgagagctgtaatattaggtgcagtacttgctcctaagagactctgcagggctctaggcatctttgttttactttttatttcctgattagtacagaaattccccttttgatgctggcaatatgcacatgggatttattcaattttccccaaatgtctaaagagacagaaagctgaacaagatggcagagacaaccaaggctccctggttagaaagaagttggtgggaaggctgacctcactccctacccagaagcctctcacctggaccacacagcactcagccatctgccacctgcacagcagacgtggcgggcggggtggggggtggtgggtggggttggtaacaaatgccagggcaagttcttcttgtggggagggatctctgctgctgatggtgctgggggcagagccagcagctcagctctggagcccccagtgttgcccctgtttactgcagacccgctgggcctggccaccagagtttattgaaaaccagggtctcctaggccaaagcaagtccaagaggacctgtgggccttgccacactcgacagctgagtaaactgaggcccagcggaagggcccaggagggccacagaacagtgactcatggagttagacctgtagtggggcctcgggatagagacttcttcccacgtcagagcctgcacatattcaagttagggaaggttatgcagttggggtcacgttaccgaccctctgagtctcctccggagacagctcctcatgccccgtcctcccacagggttcctgagagcacaagggccagagccagggctcagtgcaccgtgaccgcaggcacctgggtctcgctgggcctgacggcgatggtcactgggtgctcaccgcctgcgagatgtaccccgagggtgtcaggagcactccctggtgatgaccacagccccacgcaatggtgacgctcggcatgcgtgcaagaaaggacacgggctgtgtgggcctctcctgcggcccccacgtgaaatacggggccatgtatgggtcacatgcttcttcatagcataggggtctgggtctttggactctgaggaaccaagaacctcctcacagcctttagagaaaactttcagcacgtgagggaaaaattaggtttaggatattccagtcccatctgtcagggaatcttcagatgtggtcgagattacagtttcacagatgccgtgtgtaagcttgaagccctgtggctgagctctctgtcctcagcgttgtttcgggggtacatgagtgctgcttgtgttaatgaggactttctcttaattttagaaaaccattcaaccaaaatgttgaaccggtcacaaatatgaattgatcacctcctgcgtgggtgaggccgtggcagaaatcatcatgcatgcttcaaagagcccatcctgtgctcgggaagaaggaaaacatctataaaacgtctggtgtgccatttgagcactaaatatcaggcactcagggcccttctggaagactgtggagacagggagaatcagccactctcacagtgctcactcgggagtagggctttgagagggggtagaactcagcactcatgagcgagtggaacatcgttggcaggagagctgcagtccagggagggagtggcctcctcctttctgagggcccatagtggggaccagcagagggcccagccgaggcaccgtagacaggcctggggcctgggctcgagaagacaccagctcctgctccatggtcatccctggaggcggcttccaaggacattttgcatgcagtagagctggacgcaggaagtcactcagctctgctgtgacagggcacaggcttggactagaagatcacagtgggaaccaagaggcagtggtggacatggtgcattttccaagggtttccgcagaatttggtgactagctggatattcctggcataaggaagccaaagggaatatccgtaaggttagaatgctgtttgctcctcagagcaggcgctgattcaagggagaccttgttgagttcaaagtgatgctaagacgtccacatggaatattcagccatggtgttaggatggtaattgtgctgcctcgtaatggcacgacagtccccttcaccaagggcttgcacatggaggagctggccctggctgggagaatgagcaaaaatcccaaggaggaagaccagaggttgggactgaggtatcatgagcagagatgtctgaatcaaaaatacatgtgaggttgaaaggattttgggtgcaaaatccacagcctgggtgtcatatgctgccttgggatgagcctgtggtggagggtgtgtggctgcagtggggacagcaagggaccctgggctacatggtacccagtttcacagcttagatgtcagtgcaggcacctcccagggaccaggaagcaacagtcttagctgccctctcccacctaaattgggtcctcttcgcatttcctgtctgttccagggatttacttcttagaagacatttaaggggtctgttccaggaagagctatctatggctgtcatctgtggacatggggtcagtctgtctgtctttgggaatggaccctggattcctaattcattttgagatggctgtaggcacaataatcagtttctactgcatatggggtcttcagatgaattaaatggtttaaaaagtaaggtattttttcaaaattgtggttgacatagcatttaaaaagctttgaacaattttgataattcctgtctagcaattccctgccagttgtttttatacagagtagttcttaatgactttggtagttttttaaatggttcctgtcaaaagagtttaaaaaatactagtctctttcctctctgctctagattcatacatctcccttggggaccaaagactaaaatctatttcaataacaacttttctttttctctagcaagaatatctgcttgctgttgctgggttcagaggttgatgtgaattttttaggatagcatattacactgtgatgtgtgttttggaaaagcaaagcccaaaaacggaattcctggcaaatggaaacaaaggtcatggtgtgaaggaaaaccgacgtccagtggagtcgacgcctggagccacagcggccttggatgtttgcgtttttaaaaacacaccagtgttttccatgtcgttttcagaaaagcggtgtggcgcgtagacttcgttatgaacttattttaaattatcccttccagggttctcggaccagcagtgaccttcaaagtgagcgccaatgtccaaaacgtgaccactgaggatgtggagaaggccacaggtgaggctgtttccacacacacgtacacgcacacacacgtgtgtgcacacacacacgcacgcaaacacgcacatgcacagccagggcagagagagactcacactacccacatggggcaacccagaggaaggtctcggtttccgtggaaatctggtgtgcagtgaggggacgaggggcagtcacagggcaatgtggctgtccgtgggcaccatctgggatttcactgtgtggagagggactgggctgccctgatgtgtggaactggctcagatagaaggcaggagacacagggctgcaagtgaccgagaacaaatccggcttttggaaaagcaagatttggtgtttgtagtaatcccagtgtgtgcagagcacgtgcaattttgctttgaggtttttcattttgtaccagaccaggagcacacaccggccctgctcccgactgcggtgggcagagacaccacaaagtatctgggaggtttcagtaaaaaccggccgacttccagacggtttcactgtttagagcccagggttctgggcattgcgaatcacacatttttgagatgtacttacagatagagcttgagtaatctttgttatatgattaataattgtcattgagtgaaaaacacaaagctttactctccagagtcttgaagaacagaatgggatggtggacacaatgttgcattttcctcaacctgcctttttttttttttttaaacttgttgaaaactcttgtagagtgtattgtttaatcttcctgcctagtaagaaaaatacaggaagcataacagaaccttagcctgatggttttcagtgcattagggccattccgcaggcagggtgctcccgttccgtatcattgataagacaggacggaacacactgacccagccacagcgggaaatgacacttggttttagccagtcctttatattgctaaatctatgaacttgtttttttttttttttttttttttttttgcttaaatttgtgtctttttttcccagtgtaaaatgcagcaaaatactctggtttatttcgggatttcaatacttagttctcgttgattgaggcgtcactgtactggcaccctgtaaacttgaagtttctttttccagtgagagtaatcaaggtgtgaagtagccaccatgttctaagggatggagcgaattgctggtcctatctgttttggctgctgcgggttttgcttatgggatatcctcgtgccctcagtaactcctttgctcaaggtggtgatttagggggctgagaatttgtggttgaaatacagtgctttgcaaagttgtactaaacttctgcagtctgatttaaggtttgtggagacttgagtccccagtctcactttgttgccatactttgctgtgaggcttgtggagctggggtacaactcggaaaagcagcccagcatcctcactccagctgggcggtccagtgcggtcccagcatgaaaagtcagtgggatccataccaaacactcccacgcaagaggaatggggggtcccaacaacggcttcagtgcctcgtggctgccagagctccctccctccatggcatctgtttcgcttgctctagttccctgtcagaagtgattattggagatatttaagaccaaatccgtgatcaggtattatgcagaaatgcattgataattatcccatgattggcagtttctccagtactggggagcaatgccactggaattaggtttgcaggacctcaaggatgctaggaatggcaatcttgttatatttttaaaaatcataacaatatactcacagacaaggacctttgatttattttatggctctctagagaaaatgaggttgattatttgaaagctagtttctcagtcatttcaaatgtgttcatgttatttatcgaagtgctgcaccaagggggagccacataggaaatgtacatttgagtctcatattgacaactttctaaacacctgaatttgctaacttgcaccagtgcctccatgttaactcctgtggctgtgtgagtcagaatgtttcttgcttcttgaacgtgtgcaaaattgtttacattcatgcatgatttttaaagaattattttgaataattctatggtgtcatgaacgtgcctgatgctatataagaaacagattggccgggtgcagtggctcacacctgtaaacccagcattttaggaggccaaggtgggcgggtcacttgaggttgggagttcaagaccagactgaccaatatggtgaaaccccatctctactaaaaatacaaaaaaattagctgggtgtggtggctcaaacctcagctactcgggaggctgaggtgggagaatcacttaaacccaagaggcagaggttgcagtgagccaagattgcatcactggactccagcctgggccacagagggagaccctgtctcacaaacaaacaaagaaacaaaaaaaacccaagagattataaaaaagaattttgtgactgtgaagatcttgcaggtaggcagtggacatgcccatgtgtggtgactggcccatcggcctcaggagagcgcttagcacggttggtgactggtgactcgcccattggccttgggagagtgcttagcacagtgactggcccatcagcctcgggagagcgcttagcacggtgactggcccattggccttgggagagtgcttagcacggtgaagaggagcctcttactgagtttcaggtgagacgtagacaggctgacatgatagcagggaagaatttcaaattcaaaaggagtttcttatggtttgtgttttaaaagatgatgtggaatcctaatagtgtcatcacaaacgccctgtggtgatgggcggacacctatggaaggacgtgtggtggtgcctgtgttaccaacatacagaactcaagagcctgctgttgaaattactgggagtgctgggtgctgcctgcacctgccacctgccagctgcctggaagcccaatggctgctggcgtctggttccctcaagggcctgaggacctgaggctgctgttattaatgcggggagatcaccctggcggtagaattcaaagggcattcattttgctaattttatacaaaatgatacaaaacctaatgaataggcgtgtagttaatcccacattagtccccatcaaacgtcacgtggtattgatgccgaatgagaagggcagctgctttccattactcagcgtctcctctttatcgtaggcaatgctttcccgggaattctgctaatttatgaccttgggtatgagcacagggtattagtgaatattaaaaataagtgggttttgctcaaggaggcacttactctaccacaaagtacatagaaatgactggtagctacgtttaatctccgtggctcagtcacatagttgaactggcagaagagaaaaatcctttttattcttcatttccttggtagtttcttcttaaatagtatatttctgatcaatttttgtattgctcctttcaaagaaaaggaaattcatcatcctttagaaactgtttgcttttgctggctcccagtctgcagagaccctcacccggtggcctgtggggctgcctgtggtttatgagcttattgccaggaatcccctcccatgctcggccgtttccttcaggccgagttcaggctgtttcttcaaacattccctctcgggcgccacggagggtgtgtctctggcactcagccctgtgtggtgggggtgtggctcatagggggctcctgtgctgaccctgaatggtggggtgaggctcatggggggctcctgtcctgagcagtttccccctttgacctcagcatcctccacctgacagcctctaagacacggcattcagctgccattgtttctttcagcctgttggagaggcgccccgtgtcatttcagtagcggcgcctctgtattcagaggtacggtgactttccgtgacgtcctcctgcttctgcctgttcggcatctttgtgaagctggtgagtgtcagaacagggtcgtgtctgctgtgctgctgtctgtgtttcacgtctcatatgtagcgggtccacatggaggaagaggctcccctcctctcttgtgagcctctcttgaatcccggctcagaactggactctgtgccgatgcctggaccccatagcccgcagcgttctgcgttagtcacaggcctctctgctggagcaagggctgcccaggcttctggcctctcataaagcagacaaacgtgcttattttgaaaagcgtaatggcaaagtgaagtgaattcctttataacacatacttacaatccagccagccttaactatcgaccccaggcaggcatcggtgcttcacagtctggtccgctccgtgcggattctgtcttcggcaatgcatcacaccttcctaaggtgatatcactctggatgtcagtggccctgccctccagaagctccccccaaccccggtgccagggctgttcagacgggagttcttaggggcagtggatggcacatcggggagggcagggcagggcttagatgaggctccacagagaagctggcctttgggcagagcacagggactagcgtgggtctcaggggctgaaggtgagaggaatgagaatggtgcagcctggatgtggggtccagtgtgccaaggacatgccagtaagaggctggcaaggtggaattcagaatcggacttcatagtgtgggaacttcatcttcagcagccactaagaaggacttgggcctgagtttcactgcagctgatggaatcagctccgctgaggtggacacaggcaggttggccccgggggagggggaggggtgccttgctgctgcagcattggtccacaagcggcagacgttcctcatctgactcccatgcaccagctccccagggaggccacgccaggtggagctgcatgctggtcaccagcagtggggcctaaagccatccacgctcccacacacccactccccagggaggccaggccgggtggagctgtgcactggtggggcccgaagcccatccgtgctccggtaccaccctcatgattaagagattggagcaagacaagaggaactcctgagccatgagtgtggaagggaagttgcactcttattagaaatgaaggaggatgctttggaaatgttcaaaacagccacttgctgagaaaattgcctccatgtgcaggtgaatgagacacctgtcagactgatgaaagtgactctccaaggacctgcactctcctcaagggtcttccaggcacagggatcccagcgctccccttcgccagacctccagggtgcagctgagaaacagcgccagagcagtgagactggaggtgtggcctgggcagcccggctccaggttccgctgcacgtgggccgctgtgtcacgtcctccatggagctgagctgctgccaggatcaacgcaggctgggggctcctgggctccagctgtggctggcgtggggctcgtgctcatcctgctgctccgcagccatgaggttgacgatcccacagctcgcctggctgaggtgtcacccagagtgggcgagggagatgctcagagggaagcaccacgctctcctcctgctcttagaacatccctgactcacggcacagacacagacgatgaggagtaactaaaaagaggagcctctaagagaaaaagatgaagaagtggagggcgcggcgtgggaagcgtgggccggtggtgctggtggggtctgcacagtgggccccgcaggctcagtgcccgtctcctgctggacctgctgcgttgggggcggggagggggcctgcagtgtgtgaaccagccccagcttgtgtccagggccacgtgggctggacatggaacaagaactcccacctgcacgggagcgcctcccctgggctgccggagagaccagcagacaggaacattggtaaggactatggcgaggttctgctgccaaagagcaggtgccctgtggctgcagccccaggaggttgtaaacaagtttcggtttggatggaggctttagggaatcggagatggtaggagctgcaccccatgactccattctgaacagccaggtaattacttctggcattttgacaagtgtttgcaggagtggagctcagggctggcagcacccaggacctgtgctgaccttcccggctgcgaggacagaggccacccatggctctgtaattacaagtcccgaaagccgccttcatcatggctttaccctgagcgcagacaacacaacgctgtggtagaaaataattgcatcgccatcgacagggctaccagcgtggaacgccaggagccgcatgtgggggacactcggggatactgctaaaccaagggctaggaaactgcgttgctcagcagccacttttctgtgtttatttttacacagagggggtttatgcactggacataccactcatgggagcagctcgttctcacctgcaaatgaacgagcaatgctgatcctgctggcagagggtgctgccttgtcccctccgactcactgctggggagcacctggcccccctccaactcactgctggggagagcaggttccatttcatcctcactttcacgttcatttagaattcataccctgatcagggagaagagcccccagggcctccagcttcccctccacctcgggagccacgtcggcacgtctactgcgaggggctgactgtcacaggtggccacgggagctcacccctagttggctggggtttgggagcagcctagataaacacccatagaaatgccactaagaccttttcatgccaaaagttgtaaaacccgcttctgaaaaacatgagtgagagttttgaagtgcgtgggattctctgcaggctttcacatgtgcaggaggcttccgtggccagaggacctgttagaaacacagtgaatcaccaccacctccctgcgccttctgttgcctgggaagctgccgagggggtctcagctgttctctccacggaacgcccagcctcccagcagagggatcgtcggcaggaggctgtgatgctggtgcagtcggctgccggggcaggtgaaatccagcagaaggccctgtaccctggatgtgcaggagggggttttgctgacggtgtgacggtcatggagcacactgtgggcgtcgctgagtttcccaagtattactcttccctgcacatgggtttctgtcttcactgccccaggccccgtggggttagagactgacgggaggacggcaggatggctggcggctgtggccaggacacgtatgtcctcctgtggtagccgtcctagcccactggagatgagctgtgctggaggggagtcccaggggagccgcgtctgctggtgaagatgccgctgggctgtgggcctgggggacgaggcctcaggttttgctggaggagcctgctgtccacttggctctctgttttgctgtgttgaagccctggtccttccatgatgcgaggctgccatgcctgttttcacagccttttcttttcctctttgtccataagcgaatgctgtttccactctttccctcacctctgaatagaaagggcagtgtcttcataccttagtaggaagcggcctcatctccgcatagaaagggtagtgtctttataccttagtaggaagcggcctcatctccgcatagaaagggcagtgtcttcataccttagtaggaagcggcttcatctccgcatagaaagggtagtgtctttataccggagcagaaagtggctcattttaaatcagggctgtgttctgcagggcagctgggcagggcatagctttgagacctgaaggaggaaagcaaggggtgcccgaggaaggtgcacttggagcctgcagggagaggccagtgcggccctgaagccaacgcatgggcccacaccctcccccgggcacctggagacacaacttccagccagcacacaggtgcccaccatgctccttcctcctgcagccgcggctcacaggctgtctctgagctgaggggaggccgatgtctgccagaagccacttcttgggagttcttctaccaatatcagttcccatggcaactcgacagaagcagtaggggcagaggagccgagatggttctgagtgcaaagatggtgctgagtgcaaaggtggtgctgagtgcaaaggtgatggagagtgcaaagatggtgctgggcacctacctccccagcagatcctgcctcagctacagccgagccactgccctctgtccctggtggtcggcccaggagtcctgccctgtagctgcaccaggtcacaagcctgggccatcttgggcagggcagagggtttctcctgctctgccatacctatgggccccttgggacaagctcaggtcttgagacatgaattgtccaaatattatgacttttgagagactctgaagggctcaattatttaaaaaattatgttccgccagcccgttggcatctgaaactctcccttgttgtctccttgtgctttggggaccctacagggctacacagcagctggagtgtgtggcacaaaccccttggcagttggtgtcccctgtgagtgcacagttgatcagactaacacagagtcaccttggtgagcccaggaaagttcctcctgacaccaggactccggagaagcagctcttggttggaaggcaggggaggttcagtgaagtccgagagctgcctgggatgggtagggaggggtccctgagcacttgggaccagcatgaggctattcagcacttgggaaacaattgctcagaagcttgtctgctggggacgcttgtcacaggcaggtcttacctggtcaacacctgcccaaggcccctgggctctcaggccttgcatctgattctttgcacttttcctcccagcacgggaatgccaaagctctgaaggcccattcttgaaaatttacatgatgattcacacggcaaggctggcatctgagtcccctggccctgtaatcgttcttaataaggagggcactgcacaccatcaggcctcggacttatcggccaggacagcattctacgtatttgcattattggacaagagtccttgggtgaggatgagtgggttaaatgcacgctggtcagcagaaccaaaaggttcaactgaatggcatttagatcctacatgagcacctccaccaccatgagcacctccatactacgagcacctccaccaccacgagcacctccaccaccacgggaacctccaccaccacgagcacctccaccatgagcacctccatacgacgagcacctccaccaccacgagcacctccaccacgggcacctccatacgacgagcacctccaccaggagcacctccaccaccaggagcacctccaccacaagcacctccaccaggagcacctccaccatgagcacctccatatgacgagcacctccaccaccacgagcacctccaccacgggcacctccatacgacgagcacctccaccaggagcacctccaccaccacaagcacctccatcaccacgagcacctccaccatgagcacctccaccaccacgagcacctccaccaccaggagcacctccaccacaagcacctccaccaggagcacctccaccaccacgagcacctccatcaccacgagcatctccaccaccacgagcacctccaccacgagcacctccaccaggagcacctccaccaggagcacctccaccaggagcacctccaccaccaggagcacctccatcatcacgagcatctccaccaccacgagcatctccaccaggagcacctgcaccatgagaacctccaccaccacgagcacctcaaccacgagcacctccaccaccacgagcacctccaccaccaggagcaactccaccacgagcacctccaccacgagcacctccaccaccatgagcacctccaccaccacgagcacctccaccaccatgggcacctccactaccatgggcacctccaccacgagcacctccaccaccacgggcacctccaccaccacgggcacctccatactacgagcacctccaccaccacgggcacctccaccaccacgagcacctccaccaccatgagcacctccatactaagagcacctccaccacgagcacctccaccaccacgagcacctccaccaccacgggcacctccaccaccacgagcacctccaccaccacgggcacctccaccaccacgagcacctccaccaccatgagcacctccatactaagagcacctccaccacgagcacctccaccaccatgagcacctccaccaccacgggcacctccaccgtgagcacctccaccaccacgggcacctccaccaccaggagcacctccagcaccatgggcacctccactaccatgggcacctccaccaccatgggcaccaccaccaccacgggcacctccataccaccatgggcacctccaccaccacgggcaccttcaccaccacgggcacctccaccaccacgggcacctccaccatgagcacctccaccaccacgggcacctccaccaccacgggcacctccacaccacaggcacctccgccaccaggggcacctccgccaccacgggcacctccaccaccaggagcacctccaccaccatgggcacctccaccaccaggggcacctccaccaccaggagcacctccaccacaggcacctccaccaccacgggcacctccaccaccaccatgggcacctccaccaccaggagcacctccaccaccaggagcacctccaccaccacgggcacctccaccaccaggagcacctccaccaccacgggcacctccaccaccacgggcacctccaccaccacgagcaccaccaccacgagcacgtccaccaccacgagcacctccaccaccacgggcacctccaccaccaggggcacctccaccaccacgggcacctccacaccacgagcacctccaccaccaggagcacctccaccaccacgagcacctccaccatgagcacctccatcaccatgagcacctctacagcagttggctgcttacctactgaagctgagggcaatggagcctccttactctaggtcagtccctgcttttggatgtctgctgtgttggccatagtgcagtgccccatggattaggcaccaatctaggtcaggtatcagcctctccagccctgcctggatgttctgtgccacttcatggcacctgaggttggcaaaatggaagaaggaaaaacaagagcttggagtttagaacttgagttcacagcaccctcccagctatttgcttgttttgtgactttggacgactcattgactgttttcaaacctcagggtgccttctctgtcagctagggccaatagttacactccgcgaggctgcattcagatcaaatgaagtgggaataatttgatgtgagagcaaaatgtaaagtctgagcagtttataagttgttggttgccattgctcactcaagatgtccattggccttgcgtgcctgggcatcccacgaatgcctggagtgggaaagatgccatggcaaatcctcatgaagtactctcttttcagtagtgttctttacttggctacaagcagacagtaagatgtcatggggttagaagaatagcaacaattgtgggtaaagaatggaggaggtggggcgtggtggccatgcctgtcatcccagcactttgggggttaagaatggaggaggtggggcgtggcggccgagcctgtcatctcagcactttggggggtaaagaatggagaaggtgggggtgtggtggccatgcctgtcatcccagcactttgggaggccaaggcaggagcatcacttaccaggagtttgagaccaggctgggcaacatagtgagaccccatctccacaaaaatatttaaaaatttagccaagcgtggtgatgtacctgtaagtcccacacaggaggttgaggtgggaggatctcttgagcccaggagttccaggctgcagtgatctgtcacaaccatggtcacaaccatgccactgcccctgagcttgggtgatagagcgtgaccctatctctaaaaattttgtttaaaaagaatgggagaggatcttgagctgataagacccaccgtgtcaggcactaagacatcttcttgcagtgctgctcactcctccctggactgtcttcagtgtcaagatgaggccgcttcactaacgagatgcgatgattcgtatgatgcaaagcccacggcttacagagagcacgtgaagatggtgtcggcagcagggttatcacatcctctggcaggcagcttgggaagggaagtttcaatctgtgttgatattttagcactgattaaaggtggatgtacaattagaccttttaaatttaaagacagtttgcactctatcaacaccttgtcttattacagttgtaatccatgagaaagcaagttaagaatgagaagtcatgggcaaaagtaattacacaatttcctcatgtggtataaaatggtacaaattgaaaatcccatcagcttcacagcccttgaccgaccaaaatgacatcccccaatgaatgctggtggcaggagcttaaggtgcttcctgcttagagagatctgcatttctgtttagaatgaagcaggtgtagataccttagttcacagtgatgatttgggctgagtgctcacattcaataggcacccggttccagtggtttgcggggtttgatgatgcatttttaaagtgaagccgtaccaatgcaggcccatgcttccctgaggacgcggcctccgttctgctgagtgcaaaggtggtgccgagtgcaaaggtggtgctgggcacccacctcctcagcagctcctgccccagctgcagtccagccactgcactgggtccctaatggtcctggcgtgggagctgtggcctgggcctcctgtgcactgcaccgtaccctcggctgccatgagcacgggcaccccacggggacagcaagctcagcacccagtgggcctgatcagacagccacctgcgtcgtttcatggctttctccttcatgttgaaggagtgacagggacactgagggatgaagtccccacgctctggcctgctctgctcagtcagggccgctggcatgggccgttcttcccctgggactgcacagcctggacccccaccaagtcctgttgcccaccctggctcagctctcctccagcccagcatgcctgccttcctccctcctttccccatacccggtcctgccatctcccagctgcaaggtccatgccaccccacaggaagagcctcagcggctgtcctcagaccccaccctgtctgccccgaccctgccgcctcaccaaattctaagcacaccatgacccggcctgccctggtgtgctgcccatggcccggcgtgacccagtgtgctgcccatggcccagcgtgacccagtgtgctgcccacggcccagcctgacccgacccggtgtgctgcccgcggcccggcctgacccggtgtgctgctctgggaaggaagcctggtgggaacagtgctcactcactcactctgtcactcgctcactccttcacgccttgtctctggcagctttcgccacaggcagagctgcgtggtcacggtggactgcccgacccacaaagcctccgacactcactctccagcccgttacagaaaccttttctcaagattgtagaacagcagttctgcaaacggggcccctgagcaccagctggaggtcgttaaaaacgcagactcttgggccccaccccagaggttcagaacatgtcctggaggcaaggccagcaagccattgggagcagcccccagggacctcaatggcactggagccgagtaccactcacagctgcagtccaagagctcctgaagacaaacccctgccccctgccagctgggagctcctccacagtagacactcagcaaatgcctgctggccggagcagcggcagggaaggtagacgactgcaaggcattggaaacggcccctctgcatcaggagacaccctgggtgcaggaggaggcttcgctgaaaagcattgcaacagcattatcacatacgtggaaataagaattgcatctcaacccttcccttgccctccacccatctaacatgcctcagccctcctgtggccatagtaacctgaacagtaactacagcagcaggctgcttaggtgccaggtgtaagaagagaaatttcatgaaaacaggaaaatatagcctgcttttctccccagctctaacctttcaacctataactactccctactgtaatttttgtgggatttgctgatattgaaggaagatgattgaaaatctgcttaagatttcgtctttatttcccgcttgacaggcctagggccccactgaggaagtgtttctctctgcagagccctcagccaccccatatgtcccagggatgtgctcaagtcacgaggaccagtcctttgtgtcacatcctgaggtccagagtcacctgccagccttgccgtctgcttggcattattaattttcccataaagtatacaatctgggtaaggatgtattcgtaagggacttcaccaggtgagagtcaccacaactcaggtgtcaggtgtgtgttttctaaagccgatcttagcgttaacgttctcctgtagggaaaactactttctgtctctctacagtgcctggttttggaatttctccacggtgttttgtaaatgtcttgtgacaccagctgaaaaggctgtgttcctttgagcactcagagcccttccatactgaggagttgggaggtggttgaaggaaaggaagcagcacagcttagagcacattctgtggcaaaactgccagagagagcctggggtagccatgctgcaggtcagtgtgcctgtcggccctggccctgagcctggcagcccatatttagagcctcatttcatcctggagccagaagggtggctgtttgcagagaaggccttgaatggaggggactcatccacctcatggaaggtgccatcccaggctggtggttgggaacggagagggaggcagagggggcacaccatcttgctgacggagtcttattttttgtgatgcctccgagcctcaagacccccaagctcacagccattccttgctagagaaacaaagcagcatattatgtgattttcagaggaaataaatggaaacatacaacgtcatgtcagagggacgtgggacacataggtaaactgaggcatggaaagaaagcccgtccctgtgtgaggttagagagccagggcaggatctttccctgaacgaaactctttgcatgcattcctgcccatccacctcttcccttttaaaaacattttcttcaagaattgaatggccacataatttcttattctaaaataagacagaaagacagtgccattcccatgctctggggtaatttccattttaaatacgcaatttctcctcttttaatagaagtcagatttcttttatctgtaattaaatccagaatatggttttttttaaggtcctcgtggagttttgactttactgttctgaaaatgaataagagttctgagcgtcagtttagtgaacaactcaactcattatccgctggttgtgaaatacaaaaccttggtctgacccgtgggggccgtgtggtggtggcagcccctgccctccccccgggtctgatggctccatctgccccgccagccactgtctttctggccgcagcccgttagcccagggccctttcagcactgacctgagacttggctctgacttggtcagatgaccatgtgaacacagctgcttctggaggcccatattccgcaaaccatgcccctgctcactgcaggattctgcacgttgcattttggagtaagtcttcggtagaccttacaggactcccccatgatcttatgtccttggttttcatgaagggtgcgaggtaagaaactcattgagaaaactcacctgaagctgctgaggaggctccgccaagtctctcagccaggacacgcctgagtgcatcttggggcccatgaccaggagagacgttggtgttcctggtgaactgcatggttcctgccaccagacagtcagagccactgccatgtcaggcgtttctctcgtcccgagtcggcaatctcactcccagattttgtgctcacctgcttagcttctctcacccagaagtatgccagattacagtcaattaccagatgcgcagcaccatctttctgcctttcttcccctggattacttgtttctcagccttggtctttattaagctgagtgtttatgcctgcgctgcctgcagcccctttggaagcaggtgaagcatccatcatccataaaattggccactctgtgccccatccccaggaggccctggcactcctttccccagggacacccgacagcccagcagtcatcacagagccacgctgtgacttggaggagaatggggttgagccaggagtcagttctgttgcggggagggtgaccctttctcttccctcccctgcaagtagaaaatgtcccccccaccagtcagcttctggaaatcactggcacagggggggctttggtgagtgggagatgacagaggccctgaggagaagaaaaaggagcatctggggaggaaggagtccttggcgtccctcagacacagtgtgtagatggctctctttttagcagccagattccaggaaacagctggacaggaaaccatggggcagtgtccggcgtgaccagtgtgtccaagcaacctcacagcgctgggctccccaggctcccccggctcccccatggctgtgaccccagtctctggccccacagctccctcatgcacctcccatgctctcccgggggctgtggctgtcctgggcatctcgtcttggtcgtctgggtaacaggtcctgagagacgtccccaggagaatgctgtgcatgtcccgggctctccagctgcttctgagccctggacttggacacccagcacatgttcaggttgccagagtcaatgcggttaaaccccaacttgctcgggatgcctgtttgttagatgaactatgtggaattcaccccaggtttctctgtcctcgtatgtgggaaggtttgtacttagaggctgagacctcgtcgcctctagcagcaggcacaggcccctgcatggccacattctgctgagatggtccctgctggtggaattgtggtatctcactgagcatgtgtgttgtcttgctgtatgagcccgtgtctcactgtgtgtgtgagtgattgtatgtagtgtgtgtctctcactgagtgtgtctcactttctgagcacatacatatgtgtgtaagtgtgtagaatggtcattagctaattggtattaggttttgtcgtggttgccttctggaaactctgtagggcaccccattccctgacctgctgtgtccagaatgggtgggttcttggtctcactgacttcaagaataaagccacggacccttgcagtgagtgttacagttcttaaaggcggtgtgtcccgagtttgttccttctaatgtttggatgtattcagattttcttctttctggtgggttcgtggtctcgctggcctcaggagtgaagctgcagaccttcatggtgagtgttacagctcataaaggcagtgcagacccaaagagtgagcagcagcaagatttactgcaaagagcagaagaacaaagcttccacaatgtgaaaggggacccaagtgggttgccactgctggctcgggcagcctgcttttttccccttatctggccccacccacatcctgctgattggtctattttacagagagctgattggtctgttttacagagagctgattggtcttttttgacagggtgctgattggtgcatttacaatccctgagctagacactgagtgctgattggtgtatttataaaccttgagctagacacagagtgctgattggtgtgtttacaaaccattagctagacacaagagtgctgattggtgtatttacagtcccttagctagacataaatgttctccaagtccccatcagattagctaaatacagagcactaaatgttgtatttacaaaccttgagctagacacagagtgctgattggtgtatttacaaaccttagctagacacagagtgctgattggagtatttacaaccccttagctagagataaatgttctccaagtcctcactagactcaggagcccaactggcttcacctagtggatcctgcaccagggccgcaggcggagctgcctgccagtcgtgcaccgtgagcccacactcctcagcctttgggcggtcaatgggactgggcgccgcggagcagggggcggcgcttgtcggggaggctcaggccgcacaggagcccatggcgaaggggaggctcaggcatggtgggctgcagatcccgcgccctgccccatggggaggcagctgaggcccagcaagaatttgagcgcagtgctggtgggctggcactgctgggggaaccggcacaccctccgcagctgctggcctgggtgctaagcccctcactgcctggggccagcagcgctggctggcagctccgagtgtggggcctgccgagcccacgcccacccagaactcgtgctggcccgtgagcaccacgcacagccccagttcctgcctgtgcctctccctccacacctccccacaagcagagggagccggctcaggccttggccagcccagagaggggctcccatggtgcagcagtgagctgaagggctcctcaagcagggccagagtgggcgccaaggccaaggaggtgctgagagtgagcgagggctgcaagggctgccagcacgccatcacctttcactgccactgacagtacctgggaaactgcagagccccacacacatgtgcactgactgtaacagcaggaatacagccagcacctgcagccctggctggtgtccacaggactgagtttcagtcccatagccttgacttacctgtgatgttggacacgttggtctcctccagccttgttttctccatctgtgaactgggccaacgctcctctgctgtgagctgatgcgaagccacctcagataacctctgtgctcagtgctctgtgccatggccgtcgcccgtcgctttactgaggctattgcagaagtcagcgtgggctctgggcttccgcaccaaggtgcgagatgctcaccccgtggaatgaggttgctctgacagcaggaccatggccgtgctcatgcccagctccgccttcgtgggacaccacgcatgggcactccctctggttggggaaaaactgtcatactggattgtgttccttttttgccttaaattattagctgccatttttgctcatcaaaaaagtggcattaggcacttccacatggatcgaagggccctgtcactagtgggttcctgctcagagcgtcttgtgtgatgtttcatcttgatgctttgacaggttaacaaccttctcatcaggatcattgttaggtccttcaggtgtggtcctggggaccggtgatgaaggacacccccattgcatctcagctacggctcttggaccatgggcagcggtgctgaaatgacaatcctggagccacagccttcctccgtccacagccagtgtgctcacggacgacacaagtaattgtggacaccactttgccaccacgactgtttatgctgcagccccaggggccacagcagcagctggtctctcctcaatgatggttcagcgccgagtgcattggcggcacggtccatttctctgccgagcgcttgtgttgtgcctggggtctgagccacagcggcaggtggatgggagagattccctcggaacaggtgtctggagcaggtgggttgcggggccactgtcaagcacgtggggactgtgcctgtggcttcatccctgcgtggactcagtcctccccttgttttaagtggtccctgggtcctttgtgcacatcagtaattgcagaggcgggacgcgcactctctgagcggagcagcttggctgggcttgtccctttaatttgcgatgcatcacaacaaatgattgtaatcagtcaccgcccgacggcggcctgctcttccatgaccacccttcagtgagccggcagctgagcgacacggacaaagccgcctggctcagggttggggaaaacactctttagtcagtagagttaaaccacctgatttattccatattgtggaaggtcagtctgatttaaggaaatgtcagtttgatagaatgttttgaaagaaatgcagctcataaatactgcgctgaaagctcagccttgatacaagctcacttggtaaaataacttaataaaggaaactttcgattcaaacaaaaagccttgaaaggtccttcttcatccctccaggccatccttcttagcaaggcctacatggtctctttccatgccattcatcgctttgcaaaaccttcccatattcataaataggcaaaggtaatgaatgcaatgtctctagcaggctgcctggtgtgcagtggacactctgtcaaccatttctgggtgacacctgctgtggggataatgagacctccagaaagttatggtcaaaacctaacccctgctacctgtggatttggccttatttggaaataggatctttgcagatgtcaataagaggaggtcagactccatgagggtgggtcccaatccaacatgactgtgtccttagcagaagaggggatcacctcgtgaaggtacagacacagagagcggccatgcgcagacagagacggagaggtgccgccacagccgtgggagctggggagaaagcaggttacacacacacggcgagacagtgagacctgtgatggcggccgctgggggctgcatgggagatgggggagtttctaccctgcactgatgtgtcaccgtgtgcagatggagcgtggctgcagtgatgtgtcactgtgtgcagatggagtgtggctgcagtgatgtgtcaccgtgtgcagatggagtgtggctgcagtgatgtgtcaccgtgtgcagatggagtgtggctgcagtgatgtgtcaccatgtgcagatggagtgtggctgcagtgatgtgtcaccgtgtgcagatggagtgtggctgcagtgatgtgtcaccgtgggcagatggagtgtggctgcagtgatgtgtcaccgtgtgcagatggagtgtggctgcagtgatgtgtcaccgtgtgcagatggagtgtggctgcagtgatgtctcaccgtgtgcagatggagtgtggctgcagtgatgtgtcaccgtgtgcagatggagtgtggctgcagtgatgtctcaccgtgtgcagatggagtgtggctgcagtgatgtctcaccgtgggcagatggagtgtggctgcagtgatgtctcaccgtgtgcagatggagtgtggctgcagtgatgtctcaccgtgggcagatggagtgtggctgcagtgatgcgtcaccgtgggcagatggagtgtggctgcagtgatgcgtcaccgtgggcagatggagtgtggctgcagtgatgcgtcaccgtgtgcagatggagtgtggctgcagtgatgcgtcaccgtgggcagatggagtgtggctgcagtgatgtgtcaccgtgtgcagatggagtgtggctgcagtgatgtgtcaccgtgggcagatggagtgtggctgcagtgatgtgtcactgcagatggagtgtggctgcagtgatgtgtcactgtgtgcagatggagtgtggctgcagtgatgtgtcactgtgtgcagatggagtgtggctgcagtgatgtctcaccgtgggcagatggagtgtggctgcagtgatgtgtcaccgtgggcagatggagtgtggctgcagtgatgcgtcaccgtgtgcagatggagtgtggctgcagtgatgcgtcactgtgtgcagatggagtgtggctgcagtgatgtgtcactgtgtgcagatggagtgtggctgcagtggtgtctcactgtgggcagatggagtgtggctgcagtgatgtctcactgtgggcagatggagtgtggctgcagtgatgtgtcaccgtgtgcagatggagtgtggctgcagtgatgtctcaccgtgggcagatggagtgtggctgcagtggtgtctcactgtgggcagatggagtgtggctgcagtgatgtgtcaccgtgggcagatggagtgtggctgcagtggtgtctcactgtgggcagatggagtgtggctgcagtgatgtctcactgtgggcagatggagtgtggctgcagtgatgtgtcaccgtgtgcagatggagtgtggctgcagtgatgtctcactgtgggcagatggagtgtggctgcagtggtgtctcactgtgggcagatggagtgtggctgcagtgatgtctcaccgtgtgcagatggagtgtggctgcagtgatgcgtcactgtgtgcagatggagtgtggctgcagtgatgtctcaccgtgggcagatggagtgtggctgtagtgatgtctcaccgtgggcagatggagcgtggctgcagtgatgtgtcaccgtgggcagatggagtgtggctgcagtgatgtctcaccgtgggcagatggagcgtggctgcagtgatgtgtcaccgtgggcagatggagtgtggctgcagtgatgtctcaccgtgggcagatggagtgtggctgcagtgatgtctcaccgtgtgcagatggagtgtggctgcagtgatgtctcaccgtgtgcagatggagtgtggctgcagtgatgcgtcactgtgtgcagatggagtgtggctgcagtgatgtctcaccgtgggcagatggagtgtggctgcagtgatgtctcaccgtgggcagatggagtgtggctgcagtgatgtgtcaccgtgggcagatggagcgtggctgtagtgatgtctcaccgtgggcagatggagtgtggctgcagtgatgtctcaccgtgggcagatggggcgtggctgcagtgatgtgtcaccgtgggcagatggagtgtggctgcagtgatgtctcaccgtgggcagatggagtgtggctacagtgatgtctcaccgtgggcagatggagtgtggctgcagtgatgcgtcaccgtgcgcagatggagtgtagtgattctactgcagtaagtggctagattttcatggaagaaaagaaaactcttctttatgcagatttacttacaatagatcattgtacttatttatttctagataattatttgtaaagcctgcaactaaggaagcattctgtatatgggttgtgaggagggaaactttcccattaaacagattagcaggaaacaaggaaaaaaagataatgtcgtattcgtagacctgaggactttaactccttcacggcccgtgttccttgggaagcttttgctgtgtgtctttccaggtgtggtctggctgccgttgtggaccttgtgcacatgaacatggcagatgggggcagatgaggggtcccaagcagccacgctgaggagctttggggagtggcggggatgctgaggctgggttcttggagactttgctgtggtccttttcctcatgaggaagtggggcctgggctctctggggtcctccatgcacccacttccctttgctcaggaggggagggcagctggccgtctgcctcacccactccaggccacagtgccacagcgttacgtgtgtttcccaaacacagactaggaaagaatccagaactctgttgtggggccagcaggtgagactgcagaggctattcctcgggtgtacctgctcggtctgtgactgactgtgttatggaatccaaatgcttgtcctgaaaaagagaccatcatcattgggctttgctgcctgtaacgtggaagttcatctcaaatcctgtttttccccaagtttgacgattctagcagaacagtcatgggaggctgtcaggagattcagtttcctgtgggcacagcagaagagcaaagtttctggttcattctgtggttgccgagaggcagatgtgctgggcaggtgtcaataggaaaaagcaaaaaggagggaaaggtgggttaagggtcatttctgtatttatcataaaatagaattgcagaggattgatgatagatgctcccgcgtccacaggtgctgagcggaatcgggagctgggcagcgtccccgagttgccaataaccacagagggcgtgaccttggggtcgctgggtgggtctagtgcatcttttgtttttgtttgtgaattttaaaagcttgatggacacatccgaggtggctgatcatcggataagggcgacattgtgagcctggaatgccacgagtggagcacgcgtcccgatgtgggtggcacagctgcacctgcttccaccatgctggatggccactcaccgtcccctgacctgggatgatgcgtgggacttaatgtgcagcttctgtaaggactccaagggggtcaatgagaggcactgccagggagagccactgtcctgctgtgttgattgtaggcactgaacaagaatcactcaaaagcattggcaaaatgtagctataagaaataggcctcactggacgctggagaagcagcagcaggagtccagcacactcctgctccagcagctgaccgagctttgtggagaacgggtctgctgtggctggtgacgggatgcacacgaaaacatcccatcgtcaaaccgagcaccctttcaggggcttctcctgcccatcctaaacccaggcacatgtggaagtattttgttctgttgaaaaatgcacacaaaagtgatttttacaaatgtgtttttcccaacactttcccctgggctcatgggaggacggagagagcacccactgtttgagcaccaaatccagtgcctgccgcccccatggggacagagaacaagccaggtgtgcccccctgctcccggcctctgtgtggatgaggccccggggagtgcctggtggccatgctgtgatggctcagggcatccattaaggagatctgaccttgtctggggcagggtaacactccttggcagaggtgacctttcaggcgagattagcaggacctgcgggagttaccaaggccaatacgaaggcaggaggagcttccaggtggagggagtgtgtgggagaaggtctgcattagagcagagcaagagcctccgaagattccagactgaaaaaagcagcaagaaccagacagagaggaaggggcctcggcccggactccacccacaggcagtggggtctggaacagggccccgttagaagtgtcgctctgtgtagggtccagccccacagggtcagtgggtttttctccccgtgtgtggagacgagagatcatagaaataaagacacaagacaaaaagataaaagagctgggccctggggacaactaccaccaagtcacggagaccagtagtagcccggaatgccaggctgcgctgatatttattggatacaaaacaaaggggcagggtaaggagtgtgagccatctccagtgataggtaaggtcacatgggttacgtgtccactggacagggggcccttccctgtttggcagccgaggcagaggagagaggagacagcttacgccattatttctgcatatcagacttttagtactttcacaaatttgctactgctatctaaaacacagagccaggtgtacaggatggaacatgaaggcggactaggagcgtgaccactgaagcacagcatcacagggagacggttaggcctccggataactgcgggtgggcctgactccacaagaggtggaggagtggagtcttctctaaactcccccagggaaagggagactccctttcctggtctgctaagtagcgggtgtttttccttggcactgacgctaccgcttgaccacggtccgcttggcaacgggcatcttcccagacactggcgttaccgctagaccaaggagccctctggtggccctgtctgggcataacagaaggctcacacccttgtcttctggtcacttctcactgtgtcccctcagctactatctctgtatggcctggtttttcctaggttatgattatagagcaaagactatgataatattggaataaagagtaattgctacaaactaatgatgaatgatattcatatataatcatatctatgatctagatctagtataactattcttattttacatattttattacactggaacagttcgtgccctcagtctcttgcctcggcacctgggtggcttaccgcccacagctctgaccacagtgaaggggacggctgggcagagcacgaaggatggggagcaggcaggggccacctggcctgaccttgggcactggcgtgcgggctgcagtctgcaggtgtcttggaggtgccagcagtgggatttggtgatggattggacagaggggaagatacaggaattaatggtgcccgcgcccccaggcacatcagctgcaatcatggaaggcagggctgacggtgctacggggcacactatgggcaggacttggtttggggtaggtggaggctctggtgcctgggagcagccgtgtagaggtgtgggatgggcagagaggtgcatgcacccccattactgggcccgccaaagggcctctcctggttgccagattctggagaggaggctgcacctgcgagacctcacccatgggccacctgaaggtgttctgacgtgttcgttgcatgaataatcaaccgcagaaaataatctcacggcatgtttcatagactcgactcacagacaaaaacagccggtaaatgtgtgtttttccttcgtgtcttcctctcttgctctgtcccccatcccacacagcagtctttttgagtgtctgcagaaagggtgtggcctttctttcctgaggagtgtcctgtccccaaccctgtcccactttgggacttcagcagttttcttcttggtctcaggacaagcacacagtcgaatcggcccacgcatgggaaaatttcggagagctgtgttcacatcacactccacaggcacattcctacttcacacaggccctaatcagaatagtaacttttagccgaaacctgtgtgtcagtgacttctctctagggcccccatgctctctagggtctctgcatctctggggtctctccgtctctggagtctctgcatcactggggtctctccatctctaggatctctgcatctctggggtctctgcatctctggagtctctgcgtctctagggtctctgcatctctggggtctctgcgtctctagggtctctgcatctctggggtctctgcatctctggagtctctgcgtctctggagtctctgcatctctggggtctctgcatctctggggtctctgcatctctggggtctctgcgtctctggagtctctgcgtctctggggtctctgcatctctggggtctctgcctctctggagtctctgcgtctctggagtctctgcatttctggggtctctgcgtctctggagtctctgcatctctagggtctctgcatctctggggtctctgcatctctggggtctctgcatcttccgcagcggctgtcccacagcttatttacaagcagcttcgggcaaatgcctgccatgtttaaatacatctccttttaccacattaaacctattgaacctctttacgtgtgtttataaaacacaccaggaaaatgtttctttccattttgtcataccattcgttcctcttcagaatttcccataatatcagaagctaaagctggttctgaattcttttcttttctgtcttcgctgttttccccttttctgtgatctttagctacacgttaattaaacagtcagagccacatcggagttcgctgtgctgtgagaggatgctgggcccttccagtggtgcctgcaggccctcctttctcatccagctcatgtttctccctcagtcactatggctcatctgctccagttgtgagattttcctacagtgtcagtcatttttaaagcgccttttagttcccagctgcagatggcccaaccatgaaggcacactcagaaattcccaggtaagcctgtgtctccccagccataaaaattcctctaggttagtttatgaaaatcacttttattgacatgacttgaaattgaaaaaaaatcccctcccaggactgagagagactgtgcttctgggggttgtgcccactgggtgcttgggaagcagacgccagggtgggatcgatgggggccagcctgggcagggagaaggcggcagagcctcagaccccagcaggagcccccgaggtgcagttcgcagaagggcggcactggccagggagggctgtccctgtagcccagggagctttgtcctaggctggggacagcctgggtggagcctggcctcgagggaacgtggtggaccccgagtggctgggaactgtggccaggtgtctccaaaagatccaaagggcacccctccacagccccctcgaggcaaagcagtggctgcacccctctaccctctccaggaggtccaaagggcacccctccacggcccccacgagacaaagcagtggccgcccccctctaccctctccaggaggtccgaagggcacccctccatggcccccacgaggcaaattagtggccgcacccctctaccctctccaggaggtccgaagggcgcccctccacggcccccacgaggcaaagcagcggccgcacccctctaccatccatgcggcggagactcagggcttccccaggaggctgggtgcctttggtgctgatgctcttggtggccaaaccacacttaattttatttcattattttaagaacttcccccaataacccacagaaccagtagtcactgcttctagaggaatctaattaaggctttctctctgtctttaactttcgcaatccaattttcatacctgggtttcttcactcccttctaagaggaagtcggaaaccaatcaacaaatgaatagaacatcaaaggcgatcacttatgatggagaatgcataataaacattagcacgtttcacaaaaacatttcctcccgtagaagtcattgccatattaatttaatcctgctgtctaagataatataatctctttgaaacagtcttgactttagtgcacagggacttttctggatcagaggcgcaatttccatcgcctggtgagctaattggatgtggcagcctcctatgcagatggggactctcttgtcaatggcctcccttcagagacaaagagagacaaatgtctatattcattccctcccctcatgcatgagtaacactaccttttccctcttcctcgctctctaccaggtagtcaccgcacatttaaatcttagcttttgtgtttcgagctggccaagcctgcaaagctgtttacagatgcctggcagccgggcctacttgtttaagtacagtgtgtattttgacatgtaaatttacatgaggcatatttaatcagtcacagtgatatgctaattggattcatctgtgaactgaataaaaaacacatctaaaaaaaatgaagtgaacatattaccagctgagacactttgtaatcagtgctgaacgtcaccaaaaggggaaaagatgaaggtggcgggcgctcgccgggggagcacgacatggatgtaattcagttagccacttttccagcttcctgagacagacagacagacagacacagctactgcaaaaggcctgcttttgtcctccttggtgctaatcagccaggaaccttggtgcacctgacacagggagggtatgtgaggcctttgcagctgctggcagacagacttgggagggacccaggctggggccagcagctccttgggagtcttgggaagttctgatgtttgaggggagggctgtgcttcctgtcctttaatgtccccacagtcccataatagcctaagaactgggttacatctggaacggagatcaggcagtttcctctctctgcactgtgccgtctcccctcagcaagctggtccagagctgggctggtccacaaagtgacactgctgagagctggctgacactgctctgtgctggatggggcccttggggacaacatagtgccctccagacccccaacagatgccccctgcagatgccccccatgggcactgctagcatctgtggcttctcagatgtacacaccacatctctgcatttcatcttttgggcagagactggcaaaggaagaagaaatccccggggtggctccaccgccatggcgtgcccctgggtgaccttccactccaggtggctgttgtctcagtgctcctcactcctgccgtggggagagcacttccagcgggaggggcaagcatccctgagtgcagccagaacccagacggggctgctgaggcctctgagctttcagtgcctctttgcataaagaggtgtgcacagaggaaggaacaggacttattttcttggtaggcaggtacttgaggagatggagactggcatggaagagtcgtgtgggggacagaatggtgtgggaacctggcctggcctgagtcttctgcagagaaggaggccttccctacccaccctagcacagagctcagcgtgacgggggagagcggggcccgagctgtgctcctggcacctgggagggtgtgcagctgagggaagccgggaggctgtgggatgcaagctgggtggctcctgcatcttggggaagctcagagagaaccagaggactgtctggatgcccgaaagacttctaagaacagcaggaggagtttccagagggagttggcttgaggctctgcagatgggagtcagtaaaaggcattgaggttgctgtgactttgttgtcactggtaaatctggaggacactgagccaaagaaatgtgaaggaaaattgcacccaagatattttcaaattgtagcttagtagaattatgaattaagtttttcattgattctaacagaaggtaaaaatataagcatgatcactttagaacatgaataatctacaaaaggctgcattccctgaatattttcactctttttaaagtaattctaataacagtgttttaaacagtaacctttctgaggccacttcaaaagcattctgactttgatgtaccttttcaggaacacgcttgttatataaatcacaatgtgcccattaccctacatgtattttatttctttcctaataaaatgggggtcactagcagtgaattaatgtgtgcctgcatcattccctgcccctttcaactccttcaggaaccaaaggtaatagctacattgcaacaaataagaactgagcaccacatttctatcaggttgcatttttttttttgagatggaatcttgctgtgttgcccaggttggagtaaaatggtgcgatcttggttcactacaacctctgcctcctgggttcaagcaattctcctgcctcagcctccccagtagctgggattataggtgcccgccaccacgcctggctcattttttgtaatttttagtagagacaggatttcaccatgttggccaggctggtcttgaacccctgacctcaggtgatccacccacctcggcctcccaaagtgctggggattacaggcatgagcccctgcgcccggcctcaggttgcattctttgaggaccatgtgggatcagctgtgaggctggtgccatggaaaaatataatgttgggccgagttcctcaaggaacttcagctcaaggatcagctgagggtcagtccgaaagagtgagtcctggcttcaggcctgtggatgctcaggcagcagttcaggaggtgagatgagcatgaagagctgtgaaaggaaggaagacagggcagagcatgtagtgtcggagttggagtcacccaccagtgtagcagagagggctgaacatgtagaggaagacggcacagagaatcgggagtggagatggctgggggaatgatgggagatgcccaactgaaaggacaaaggaggagttccagggccaccagtcagatggagatgctgatgacaatgatgatgatgatgatgatagtgatgctgttgatggcgatggtggcaatgatgattgatggtgatggtgatgatgtgatgatgatgatgatagtgatgctgatgatggcgatggtggtaatgatagtgatgctgatgatggtagtggtgggatgatagtgatgatggtgagggtgatgatggtgttggtgatagtgatgatggtgatggtggtgatgtgatggtaataacgatgatgatagtgatgatgatgatggtagtgatgggaccatagtgatgatggtgttggtgatagtgatgatggtgatggtggtgatatggtgatgatggtgatggtggtggtaatgtgatggtgatagtgatattggtaatggtggtgatgcgatggtgataatggtgatgatgatagtgatggtggtgatggtagtggtgggatgatagtgatgatggtgagggtgatgatggtgttggtgatagtgatgatggtgatggtggtgatatgatggtgatggtgatggtggttgtgatgtgatggtgacagtggtgatggtaatgatggtgatggtgatatgatgatggtggtgatggtgatggtggtagtggtgatgtgattgatgatgatagtgatgatgatgatagtgatgatgatgatagtgatggtgatgatggtgctggtgggatgatatgattatgatgcttattgatggtgatgatggcaatagtaacaatgatgatagggatatacattattcctatgtaacttactcaccttaaaatacatcattcaagttttcagagtcaagtcatgttcccttgctatgaagaaaacttaagtctaagaaaatgtaacatgaggaccaagaggagatgcccgtggctagcaggacctggtgatttatagatgcatgtaggacttttccccacatgtttctacatggtctgtaagataaggagagtttctgatgctatagagctctcacattgcagagatgaaaaggcaccatttccccaatattttatgatgaaaatatacaaacagaaaagttgaaagaatggtactgacctgtgtgtgtgtgtgtgtgtgtgtatacatatgtgtattcatgtatgagtttctatctagacagaaagtgtccttagaagaaagtgtgtatgcaccattcttggccaccttcgatatccatcgggtcccctgtccctgttgctctgaattcggccccattctagctcttcctgcctcatgcctgaacaaggagctgccttacgtgtgttccatgtgctcggtactcctacccccaggtcaccttgcactgccctgttcatcctcctgtaatgccacattggtgggttgctgactcacttgagagctcccggcttgcccattttgcactgagaaaagactggctgcatgttgctctgtgctttgctgtgcaacccagcctcagctctcctttgcagaatggacctcagctgcttctagtgcaccagctgtgcccagcagctgtccctccccggtggcctctaacatgccatcggctctgaaacgccagatgtgccgtgcctcctctcccaagcgcagtgactgcaggcagccctcacatgctcagtgactgcaggtagcccttgcactctcagtgactgcaggcaggcctcacacactcagtgactgcaggtagccctcgcaccctcagtgactgcaggcagccctcacatgctcagtgactgcaggcaggcctcacacgctcagtgactgcaggcaggcctcgcacagcacaagtggcctctccttccctgaggtgtgcagtggctccagcctctttggttgtggttactaagattgcccttggacatgatgtgtgtatactccttgtttattctcctgagctgaaagctccttgagagaaagggaactgagtgacctgccctcggctcctggcctgttctgcatggcccatgggctccagcctggcttttttggacttcggtgactgtgcttcttccctgctaaacctgcccatggggactgttgtattcatctgtgtgttcctcagaaagtagcagtgtgtgtcacacagagtctgcactcagcaaatgctctgtgaccagatgagtttgcatgagagaggaatgggatgtggtttgagttgagtgtatctggaggctccattccggggcgaggggcgggggcgtttttaggccaggcctccctcgcagccgctcgcctcccttgtgtaaacctgattgcctgcccctgtactgatcctgcaggattaaggttaaattaaaaataagcatggatggatttagatggactttttggtgagtgggcggaactggtgcaaagctagcggtacacacaccaggaaggaagacaagagctcggcgcctcaatggcagatgagggattattgctgagaaacccgtcctgccgtctccaaaatgtcaggttaggaaatctgcttcaggaaactcaagagcatgccaaggtggctaacagggatggcttttccctgtgttctgacacccagcccggcatcctctcctggttcctgcagccacagtattttaaagtctcgacatcctttagtcccagagctgctgcataacagtgcattcttagaaaccagctgggcctcaggtcatggtggaaggtgtggtgctgagaacctgccacatgagaaatcgcgggattgcctcagtccctgaagggcagtgcacagaacaagacagtgtcaggatgccaggattgcagtgtcaggatgccaggatcgcagcgtcaggatgccaggatcgcagtttctgctcctggacagaacaaggcagtgtcaggacgccaggatcgcaggttctgctcctggacagaacaaggcagtgtcaggacaccaggatcgcagtgtcaggatgccaggatcgcagcgtcaggatgccaggatcgcagtttctgctcctggacagaacaaggcagtgtcaggacgccaggaacgcaggttctgctcctggacagaacaaggcagtgtcaggatgccaggatcataggttctgctcctggacagaacaaggcagtgccaggatgcaaggattgcagtgtcaggacgccaggatcacaggttctgctcctggacagaacaaggcagtgtcaggacaccaggattgcagtgtcaggacgccaggatcacaggttctgctcctggacagaacaaggcagtgtcaggactccaggatcgcaggttctgctcctggacagaacaaggcagtgtcaggatgccaggatcgcaggttctgctcctggacagaacacggcagtgtcaggacgtcaggatcgcaggttctgctcctggacagaacaaggcagtatcaggacgtcaggatcgcaggttctgctcctggacagaacgaggcagtgtcaggacgccaggatcgcaggttctgctcctggacagaacgaggcagtgtcaggatgccaggatcgcaggttctgctcctggacagaacaaggcagtgtcaggacgccaggatcacaggttctgctcctgggtctctcactgactagctagccaactattggcaagccctttgcactctctgttccttaggtttcaaatgataaaacaggatgtctgtgctaaacaatctctgaaatctgcaattcagagaccgtctctgaatgtgccagctgcgcccacgtcctggggcacacctctctgattcttctttcctctccttcctgtttctcatgtcttgctatggatgtgagtatttagaatgctgacacaaggccaagaccaccaggagatgtgggtgctctgagtggcatttatctggatagctgggatctttaccatggagaagtgaaaaattagaaatctgattaatgtaaacatctttccaattacttttttaataaaaaatttatttctccagccatttggagcttcccgacagaggggctagctcagcctcacggatttgttgctgcctgctggaaacaaagaatgggctgctgtgcgccacatgactgctgtcccaaagccaccaactttctttaaagccgggtcagatatcaagcttccagtcatggaggcttttgggtggtttcagcatcaatctctgatcaattcaggggtcaatatcatgcatatgtgtaagttcagcccagtagggtttaagtggatagcaccatattttaatttagaaaggctttctgtaaaatataaccgagcagtggttattgacataactctcaagggtgtctaaggaagagaagttgttgttattgtttggggctgcccttcactgtttataatttttcctgtctgtgatgctcctcctggtgtcctccaggtgctctcgttgagaattaaatgttgctcctgcagcagactcttttgtacttagtcatcgccgaactggcacctgtcggcctatggtgcaggaaaagatctcttttccaagtagcagagaagatgttaacctgggccacttgagccctggacactgtttctgaggcagagctcccatcttggtcccctgggaccagctgtggtctcttcagcacgggttctccttgtcccctgtggcctcctgcagcctgtcctctgctggtgagtttggttgcagcagagtctttacaaatgatcgaggccccgagctctctgtgcctgcctgagagccagaggctgaccctgcctgagccctggagactgtgctctctttggtgatgcagataatttagaccaagctccaacacgttcccatttagtaggaaaaagaaagacacacacattggagtgcttgctttgtttttatgaattcctatgcaggtgcaggatgtgcggggagaaggggccccagagtcctgtacagattcagcagcagtgaggacgccccccacccctgcctcagggctgtggccgcccacagtctgctggttcaattttctcctccagaggtgagctccccagacgcaccagcttcaggattccccctcctgcctctgtgccacttaagtgttttttatttaaccaagactttctggacatttcttcagttgctgacttttaaaattgtgtaactcagataaagctattctaaatttttttatctgaaacaccctgcagggttgctttgggagttaatgacttttatgaaaatcatgtgtggcaggatgtagtccataagcataagatttacatatcctcactgcccatcacagcctcggcgtgtggcctttctctttatgctttgctccctctgccacgtcgagtgacgtggtcagcgtacgttaggtgctcaacacattttttgagcaaatgacaatcagtctcacacattttatgtaattgctaaatgctgagccaactgtgcaggatggtctgtgcgcttctcccctctcgccacactgtgaagtgtcatttctgaagaaatggtgggtctttccagaagtgtctgcagtgccgggaaggaaggcttgcttacttgggtgccctggcattgagaacaaaggctggtgagtaggtttataaatgtcaagctgcatttcctggcaacctgccttgtgctcagaaattggcctctttaatgcagacggccttgcagtgaggtcaggcccttctccttcccattcacggccatgtctgccacccaaatgccattctctcctgcaggagcttggtgctggggagatattattgttggtgagtatttttgttgaaaaacttaccaaccctttaaagtcaggtgacgagaatgggagtccctctgatgttcatccctgatccctgatcctcctgtccctggtcatgagagtccctctgatgttcatccctgatccctgatcctcctgtccctggtcatgtctacacccaggacacatctctgatttaactaataggtaagaatgttgttagtaaaggtgacacttttttctgtccatgggattaaaacctgggatttgctcccttagattagaggaaagtgttcccctccacatggcacattacttttatcactaggaacttttttttggtatttttttcttcatgagatggggtcttgctatgtttctgaggctggtgttgaactcctgagctcaagtaatcctcctgccttagcctcccgagtagctggaactatgggcatggccaccacgcccatcaggagcttttcactgtaacttcccccaaactttcctccatttttttggtctctgtcttggaatggcagatgcgttgcacactgaaggattccagaacctccaagagtgttttgctttgtattgaaatatggaatttataaatgaggaaactgttacaagcttttcttttaattatgaaaacagcataatacaaataaattcagaggcagttcataaaacctgttttctagtagtttcagccgtaagtctctgcaagccagtactccctttcttccctggcacagtgggcagcagatgctcgtcaccctggccctgagacactgtcacagacacccatcggattcttcactatggtgtctatcagccggctgtggctcaggacagccaggtcccttaggaagccctgggcctggcctgcccctgccctcccgaagcttgcaggcaggataccagcagcacacagcaaaaacgtgaactcagccgtgacgggatactgcgaagatgttaagtgcggggaaagtaaatggaaatgttatatttaggattagttcacagttccatggatctctcatctctttctgaataaatgattcatgcgtgtggtagagagtgcattaccctgtgctgcagagagtgacgtggatcctaccctgtgtctggtgcctgaacttgtgcagttctgagctgtgtttggctttgctccgaagcggctcaccattgatgggaacactgaatccaccggaactcccgacccctctgctggggaagagtcaagcacgatggggcagtcggatgagctcctggtctctgcgtttcactcccctgacttcttttttctggacgtttggaaatccattctctggtttctgtgggtatgaagtatgcacccaaaagctggtgtttcagtgcccgtggcatcttggtgcattgcatcacgagatggaggcccctcacaggctctttcgtgggcagaaagtgcgtgtccagccgcacgatctactgggcctgtgatcgttcttgtgatacagatatctttcttttgacattggtctttgctgaggcttaaagcaggtacatttttacataaagaattcaaaatgatgtgattactaagagtgttgcaagatacaaggatagtaaaggagcctgacatggctgaaggaagtctgtcctttcaccacagactcagccgtgggtaggaagaagtgtgattgggaagggtcacatgtcaatgacagcaaagacttagagctggcctcagaatcaccaagatcatgcaatactcgtttcgcttttttggacccaagcacgcaggtttctctttggccatagatttttcaagagactaaatattgactatttgtagccttcaattgtttcttttcttttctttttgttttctctctcttttttctggagacatagtccctctctcttgcttagactgtcaccgaggctggagtgcagtggcaagatcttggctcactgcaacctctgcctcccaggttcaagcgattctcctgcctcagcctcctgagtagctgggactacaggtgtgtaccaccaccccaggctaatttttgtatttttagtggaaacagggtttcaccatgttggccaggatggtctcaaactcatgacctcaagtgatctacccacctcagcctcccaaggtgctgggattatgggcatgagccaccgtgcccagcctcaattgtttctttattgcaatgttgttaagaactacttagaaaaaaagcaataagctattattgataatacagatgatgcatttgtattcttgctgtgaacttccctttataactagtagatctcttccaagtaccctggcttccttgctgttcctcaaacatgccaagcaggattctccagggcctctgcagtggctcttcctggtggtgcctggaatgctttccctggtatctgctgtgtcttgtttagatccgagtgtcggacctgtgtcactttccttctgtcagaagagcttcttttaacactacttgaaaagcaggtggaccgggcgtggcggctcacgcctgtgatcccagcactttgggaggccgaggcgggcagatcacgaggtcaggagttcaagaccagccttgccaacatggtgaaaccctgtctttactaaaaatacaaaaattagccaggtgtggtggtgcatgcctgtaatcccagctactcgggaggctgaggcaggagaatcacttgaacctgggaggcagaggttgcagtgagctgagattgtgccattgcacttcagcccgagcaatagagtgagattccatctcaaaaaaaaaaaaaagaaagaaaaaaagaaaggcagatcaactgctgacaaattcctttaatttttgtttgcctaaaaaagtctttatttcttcttcagttttgaagtattatttcactggacatagaattttaagttgggtgttttcttttaacattttcaatattttacttcattctctactcgcttcttcctaaaaagaagtccagcataattctctccgtgcttttctatgggtaaggtaaggtttttcccccctctctggctttgtccaaaaattcctgtctttgatttttctgcagtgtgtgtgcacgtgtgtgcatgtgcagtgtgtttgtgtgtgtgtgtgtgtgaagtgtgtgcacatgtgtatgcacgtgtgtgtgtgcatgtgtatatgcatgtgtgtgcgtgtccgtgtgtgtgcatctgtgtgtgtgagtgtgaatttgtgtgtgttgtatttacccttcttggtgttctctgagtttcctagatctgtgatttggtgtctggcattaattttgaaaatattcagccattattacttcaaatatttcttctgttcccttttctctttatctcttcctggtattcctattatgcatatgttataccttttgtaattgtcccacagtccttggatattctgttttgtctttttctttttttttctctctctctctttgctttttgtcttggggagtttttattgatagatcctcattctcactgattattcctcagctatgtctgctctaccaatgagcccatcaaaggcattcctcatctctgttacagtgattttgatctctaacatttccttttgattttttcttagagtttccagctctcaaatcacccatctgttcctacacattgtccgttttctcactagagcacttctcatattcatcatgggtatttgagattcattgtctgataattccaatatctctgctatatctgagtctgattctttttctctttgtgatttttttcccttttagcatggcttgtaatttttttgttgaaacctagatatgctgtattggataaaagaaactgaggcagattggcctttagcattaggttttatctttacctggctgtgagttaggctgtttactgtttgctggagctgtaattgtcagaggctaaaatttcttctggtgtccttgttttatctccctacttttctttgggtttccctagagacttctccttaaataaagtctgatgtgtgcagttcttttatctgtaatcccctgtcattatgtgggagccctgttggtattgatgtggtggtctggtgtggaaggagggcagcatcctctggccctgtgatcaggtctctgtctcagcctgaacctgcacacctgggctgtgacctcaagaggacttctcagctttttcttttcctcccataagtgaaaggaaggccagatgggttggaattgggtattttccatcccacaacattctggacttatttcatgactggtttcatgctgtagctatcctttcaagatgtgtttttcacacagaattatattttgaggatttatccacgcagatacctttagatctagtttatatgtaactatggcatggtattacagtataatttatgcattcttcctctactgcaggatatttaggcagtttttacattttttctatttccccacaatataatttaattaggtgttatcagacctctctttagtttatgccaaagggggagggccataaacttgtatcttattacaattttcatttgtctgtatctggcagacaaataaggtggagcagctttctatagctctgttagccattcaaatttcctcattagtgaattgcttgtttgaacacttcaattttcatgctgtgtttttttttgttattttattattagaatgtaaggattcttaatatctgtgtcattattctagaaatacatattttacatattatgtataatcttatatttctatattttatactttattatctaatataaatactacatattatataatataaatatacatgttacatataaatatatatgtagaccatatttatatagaaatgctatatgtgttatatatagcatagtattttattataaaatgtatgtaattatatttgaatactagttcttggtcagtgcattatatatgttataaaaatagagatatagcttatcttttatcttttttatggtgtctttttaatcagtgttttccatttgaagtctttgggtttcatcatggcatctttctctagtgatttcataaaaatatttgcccttattttcttctgaagttttagaatctttaatctgtcaggaatttttgttgttgtgagacaggggttgaattttatctttttctacttagatagggagttgtcctggcccttgtatttaattgttgaaataccctttctcctgcagtgtatgtcttcacattggttgtctatccagtccccatgtgtgtacttatatttctccctcctcagttttattccactggttctgtttgtcagtctttccaaaaccttgatgattttcttttctcaattcaactttctcatcttactttatacatgaatttctactggagtataacatatacaaagtgtgcacatcttagtgcagagcctgttgactgtgctgtgtagtcaccatccagctccagacagagcccttggcagcccagaccctcccctcagcatctcctcccaagtgagacccaaagcgggaggttagcggattcagacatcatgcactccatgtgtctggcttctctaactcaccatacatctgtgatactcacctgctgtggtacagagtagacacttggtgtctcaatcgttctgacaatgtgaaatctttctgacaaggtgaattgcaaccctcccccattctttccccaaattatctacatgtcccttattctaaaatcatttttcagatgagcttgtcaaatttatgaaaaaagactgattgggttttttgttgaatttcgatttaatgtatagtttagtttggacaaaactgtacaaaagtacagtcattgccacataacagcgtttcagtcaactactgactgcatacatgagggtggtctcctaagattataatcacatactttaactataccttttttattagatgtgttcagacacaaatacataccattgtgttagcgttgcctacagtactcggaacagtaacagtaagctgtgcaggttagatacgcaaatacataccattggttacaattgcctacagcactcagtacagtgatatgccgtgcaggttgtgggtgtgcagtgggctgtgccagctgggtgtgtgtaagtgcactctgtgatgttggcacaacatcagctaacgatgtatgtctcagaacatgtccccatggttaggagacctgagagtgtatttacgacatttggtcttcccatccacttctgtacttacatggcatgtgtcttcgctgagtgagatattcctttgccattcaatgaacttttagtatttttaaatgtaaagttcttaaaatattttattaaaattttttgaagtagcttaacatgatcaggattatttttaaattaacttctaactatttcaagatattatataattggttgttgctggcatataggcacattggtttgtattttgaccttgtgacctgtatctttgaaggaatcttatatttgttataattgcttgattggcagttctcttagattgtccatgtaaacaaatatgtcatctgcagctttcttcctttctaatgctgtatatcttaacatttgtcattgcattgagtatctagggtgttccaaatagtgttgaatcaaaggggtcaaggaaggcttcattatctatcccaagcattaagaaaatgtctttgacattttaccttgttaaaggatgattatttctgaaggattttattagataacttttattgggttaaggatgctttattcctagtttcttaaaatttaaaaaattttgaatggaccaaatcttattcttgaatctctaagatattactggactttttctccctttaatctcttagtaaagtgaattacatggagtagaaccagttttgcatttttgggatatacctttttggtcactttttgttttactgatttccctctgttatatttggttgctattattttttgagaaatggaattcccttattttcattgtgttactgtttttcagtgctagtatcgaagtaatactcatctcataaagtaaattgtgtcctagactgaaaaatctaaaatccgcataggaggaaacagatgttgcttgaagctttagtaacagtgtttaagtcacctggctttagtgctgtttatgagagttggtttttgaatactgatttaactaatggttacaagtatagtcagataccattcctttcaattcaattctggcattttgtgtttttgttttttttcctaaaaatgattcatttcacttatgtcttccaattacgtttctgttgtgcgttgcagtttcttgtggttttgcatatctccgtatatgttattgttatgcccctaattcatttctagtgttatttattttgcatctttcctttctggataattttgacagacatctttgtatttccttcatatttttaaacagtcaactctgctcatgtctgtgctctctgctgctttctggtttgttaatttctgccagtaagtctcaggctatcattttatctccaggtcagatggggttaattctctagtttgcgttttcttttaaattttgctcacactttctcattacagattgttttctacgtggtttataattttttattacatgcttgtctttgatgtctttcttttcttatgagaatcctgtggaagtcccaagaactctcattgttggaaaggttcctccaacattttataattagcaattcaaatcaatgtgttatgttagatatatgagtattttattatattaggatttgacactcatgtgggatacaggttcaggcttctatttctaatgagaggcatttgtgttttcatccagagcctgagaaagagaggctcttctgcccgcctgcctgtggacgggttgttggcattccttttgtgcagggcaggtatgcacagtccttgggggtgcgctgccagcacctgccccctgccctcctgtgggcagaccccaaccccagcctgctgggccctaacagacccccctgcctgccactgccacactcagctgcctcccttgcctgctctttgccccagctctgtgctttctctgttctggcatctgggatttctccttccttcctttcacgtttactaatgcttcaaaatttgtgcctgtccctttttatttacagtatttatgcattagactgggagcagggtctgtgctgtttttacaatgtgtgctcgaaatggacatctctagactttcttctcttcttatagttttatacttgagacacttgttgactatgaagtgagagtatttaaaagtgcatatattgtcatgctgatgcgtgtaaacacactatcgtgacgatgcgtgtaaacacactgactatccacactgggttttctgggcagtacaatttcaaattttgttcctcctaagctcaggccacatgttctgatttggagttttaaagaaatggagagtgagcctggaagaatttactaaattgatcccagctttctaatgttttgctcagggcagatagcagggaagcattgcaaatagggttttggctgacaggcaggctcctgtgtgcacacacaaagcctaccccacaaaagtagagtctgcttctccgaattcaggccactctcttgcagctgaagcctctgctactgctccctgtcagcagctcccagctcttacaccccaagtggcccaggcctcagctacgatgcaactcgactcagccctgttgtgtttgggggactgaggtgctggactcagggtgagacactcacacacctgccctgatttccagatcttggcctagcatgggcccctcccagcctgtgttagttttttttcacactgctgataaagacatatctgagactgggcagtttacaaaataaagaggtttaatggacttacagttccatgtggctggggaggcctcacaatcatggtggaaggcaaggaggagcaagtcccgtcttacatggatggcagcaggcaaagtgcagggaaactcccccttataaaaccaccagatcttgtgagacctattcactatcacacgaacagcatgggaaagacctgcccccatgattcaggtacctcccactggggtcttcccatgacacatgggaattgtggcagttacaattcaagaagagatttgagtggggacacagccaaaccacatcactgtgcagccagccacacacagagcattgctgaccagggatgcttgcccgggcctcagcatgcagagtttctattgaggtctcagtgtgcagccagccacacgcagagcattgctgaccagggacgctcacccaggcctcagagtgcagagtttctattgaggtctcagtgtgcagccagccacacgcagagcattgctgggcagggatgctcacctgggcctcagcatgcagagtttttaatggggtctcagtgtgcagccacacagagcattgctgaccagggacgctcgcccaggtctcagagtgcagagtttctattgaggtctcagtgtgcagccagccacacacacagcattgctgggcagggatgctcacctgggcctcagcatgcagagtttttaatggggtctcagtgtgcagccacacagagcattgctgactagggatgctcacccgggcctcagtgtgcagtttctatcgaggtctcagcgtgcagtcagccacacacacagcattgctgaccagggatgtgcacccgggtctcagagtgcagagtttctatcgaggtctcagtgtgcagccagccacacacagcattgctgaccagggatgctcacctgggcctcagcatgcagagcttctatcaaggtttcattacattggtgtgagggattgaaccattggccacaagctttaacccacccaccagccctcccctctcctgagatcagactatatcccacggctcagagcccccactcacccatcacattgttggtctttttggtgtggacagcccccgtcctgtcacctcatttgcataaacaatcaggtgtggtccgaggggcccaccacaaatgacctcactcccgtgactcaggaggctgcaaggactcaggctgcttccaggaacaggaccaaggctagccaaactccttatcacacaacatggctaaaacgacttatcattccagctaatcaccgactcgtttcttcctcattctctcgtcccacatcctcctccactgcccaggtagtcaagaagatcaccacagctccatgtgtggccctgatggctccatcaggcttggtggccaccaccaggcaccaaggctttattcgtggcccccaatggctctgtcaggcttggtggccactgccgcttaggctgacatccttcagattcatgcctctagccctaaaccattctgactccagagcaaattcttatttctctgagcacagcacctgggagacagaagttggctgattgcatcagtgagcgacttacagaaaaaaaaaattactgggtaagcacatctgaagaaacaactcattgaggtttctgataatgagactttcccttcctctgcagtaatgccttttgacaataagcttagcctattcatctctcccagcgtggtgcagcagagctcctctcctgaaaacctggaggcatggaagatgtaccgtcctccacacggtgctggacgtggggccgttgtggtcctgggtttactctgctcatgtcattaagccccatctgccctgcatgtgtccctctgagtggtcagtggagccaaatgcctggtgctctgtgattttaggtctaagccattttagaatctctgcatttagcgttgtatgaattcactgctcactgcacaatgcgtcctttgctctgaattgacccagttgagattctcggtgtccagcccgagtctattgcatacggaacgtctctgtgcatcagaggcgctttttcacctgccttgggtctcttggcatctgtctctcaggcggaggagccactcactgcatccggccttcctcctgtcattttgtttgcctttgccctcctctgaactttaattctcctccaccatgagaactgaccagaacttgccccaaatgcagcacctctgctttcaaagccggggaaggaggggcaggagagggccaggggctgtgctgtctctaatgtggcctagaggtcagaggaggggccttcatcagagcatcagccaccccttcctgggcccttgcttccccacagagggcatcttgctgctcccggcgaagcaataattgctgaaaatgggaagttaattggatgtgagtgcaatgccatttggctttttgcttagccagggccaggcgtgggggcaggtttccgaaagggaagccgaagactccacacagcagctggaatgccggggcctgagcagcccccagaatggctgctcttctttctcagcagtgctggagaaaacagccaaaggtcccttgaaagtgagagctgggctgctcaccatgtccttctgcaccatgaagaagaaacaaaggagacccagagacttcagaggctcgcgggcccccggagcgccggctgcagagcagcaccgtctttgtagttttgcagcgactgtaattaatgcatcttcctgaggctgctgtaaacagcccccgcgtctgacttccgcccaccttttttactcgatgatttaaattgtttttctgactttatctgtcactttatttaccagctcttaacctttcttctttttttaaaatataaatgagtataacatccactgaagattacgatgccttctggaaagtgtggctgaggctgtcttcctggagaatatcctctgcttgccctccatttatctttttctttttttcctgaagtctaataagcattaatttcccaattcctgaatatgcctaatgattatattttttcatttaacaagtaaaaagcagcttaaagggctttctaaatctctcacttgggtacactgtattctcacagagtgacggaatttggcacaaacatattggttataaatgaatattttatgacaattaagagcatttctgtggctttattatttgttgctccaccctctggtgagacctgtctttccttcaaaaccaaatagaccccaaatgtcagatactggaaatgagtgagtacagggatgcaggaaaaaattcaggaaggtgcaaaagtcatgacctcaccattgatgtctccatcacggtgagatcgaggtcgtctgtcagatcacacagtcttccagaacagacattcagctctgtttttacattttagaaaacccaggaagactgggaaaatattaaaggccacagtggtccagtttatcagcaagtagtgttttattcatcattcttgtccctggtttgtcaaattaaacacattatctgtggaccttcagcagatactgcagatttatcactcgaggatattattcaacgtgatgccttctcttctctttctgacttagcaacaacagtttagaaaggagaaggcttgcagagagagaaaacgagggccctgaggaagagctgtgggcctggctcatcgctgagctctggctgtgtggggccagagggtctgagatggcgcgtgcagtgcccaaggctttggcaacggagccccgcacactggcaggcttagaacagtgcaaagctctccaggccctgcaccccccagggtctgagatcaaggtcttagcggggccgtgcatctctgaaggctccagagagggtccttcctgcctcctccagcctctggtggccctgacacccctgccattcctcggcttacaggggcctccctcccacctctgctgggtcaccaggtgttctcgggaattctggcctcgccttcccactgggcacttctgtctctgtccagtgtctccttcttagggacaccagtccctggattaggagccactctgatggcctcatctttaactggcttccctcttcggagaccatttccaaatcacatcccatacacaggagctggagccaagactcagacgtgctttcctgggggacatagtccccaagcagctggctcagctctgtgctttgctgggggacatagtccccgagcagccatctcagctctgcagggggtcaggtgcttgcgcagagctgcctcatcctgcgggttctcgggtgcggtgaaggatccgtcctggggatgcaccatgcctgcttctggtgaattattttctgcagtcttctacctttaagagggacctggctccagacagaaggtacaattgccctaaggaaatgaggtcaccaggcgggctctgcactctgacctggtcacagggagcacgcctggcccgtgctttccactgggaccccaggtgatgttgcttctgtccaggaaaaatgcttctaatctaacaaaatagtattagaattatcattgttattattacctgtgtatgtattttctctctacatgtctttgatgatgtcgtaaactggtagatcgagtactgtttacttacatagagcccatcctcattttatcagctgttttgcagctgagttgggagtggggaggagaagcctgtgaacgtgttatttctggttgctatgtttgctgtgtggatgggcaggacaggagcctccagcccctgtgaacatgttatttctggttgctgtgtttgctgtgtggatgggcaggacaggagcctccagcccctgtgaacgtgttatttctggttgctgtgtttgccatgtggatgggcagggccggagctcccagcccctgtgaacgtgttatttctggttactgtgtttgctgtgtggatgggcaggacaggagcctccagcccctgtgaacgtgttatttctgcttgctgtatttgctgtgtggatgggcagggccagagctcccagcccctttgaaggtgctttctggaccttctctgcttggcaaaaacagctgaaggtagaaggcggttaaaggcttttcttctatttccaaatggcatggccatacacatatctcttctttttcttcaggcggcctgcagagattaggaagcctgatgttgagaaatgtcactggtttctttggggtagaattcggaagaatgcttttagagggaaatcataggattggccttaagtttaagggacacttagaggagacagaggacaggatatgaaccccatgccctagcaagtggatacggaccccgtgcccccggcgagaggatacggaccccgtgcccccggcgagaggatacggaccccgtgcccccggcgagtggatacggaccccgtgcccccggcgagtggatacggaccccgtgcccacggcgagtggtggggaggctgccaggcaggacagaggtgtgggttcttctttgctccagagcaggggtgttcgagtctcagtggctcatgtcacaccaggtgactggagcaaaatagccccatgtgctggtttgaacatgaagacagctgattccaccaggttaaccagccttcagcctggtgatgtggtggttctggcctggccgtggtccccgccctttcagagaccctggtctcctaatgccgcaaggagaggtggcctccctccttctggtgcacgctggactctccccacgctccctgagccagcagaggctcctgagggtctgcagctgccccgccctcctgggcttcagccagtgttgccttgcgcgggacatagtagctctgggtaaagaatggcccccggtcagtgttcaaaaaaattagggccttcttcctaaggccactactgttcaaacagtgttttccttctgacagttaaatatttactttctccaggtggcgtcggttggtcagtggagtccgcctgtctccgctgggctgcgtcggttggttagtggagtccacctgtctcctccttgctcctggcttgcggttctctcctctgccgtctctggctgggccttgcaggctctggctgcttctcctgcagttcattttgttgttctttcctctctcgtctgaaatggcctctgtcctagattcaggagggaaaggaggaaaccggtggggcctggccgctgcttctcctggccttgttcttcaggctccctttgaaggtttcgagcttctgctcttgctctcctgcctcttcctccatgcctgctgcttctgcgagctgtagtttacattctggctggccgcagccgggtcctcaggacttgaggagagggtcctgtcagggccagcgttctggtggggttttcagccatgaaaatgtccagagaattttggtctgagctggagaggagacaacagcgtggatgtgacactggggagaaaaagcttgggccctgattcttgtctggccatcttggatcatagacgaattattcacaagagggtctctgcctaaaactcaccatggtggctttcttggtgtacttttcatgtctaaaatgtatgtaaagttcaaactttaaggctgcagaaggaagtgaaggcttttgatgctgtttacaaatctctggtttctgactcaagaccatgacggtatgggggaacccaggcctgaccttctcccagttttgggggagctgcctcctgcgattctccctcggtggccctgttggggtggggcccatttcctctttgaaaatgacatcccagtcatcttactttctcggctgtgaacactcacaatatgttccacaggatgccagggctctgctccgctggagaaacctccgtcccaaactctgtcttgctttctcaatcatatttttagaaagtgaggctgggtggcttgtgggttccagaagcattgaggttgaatcacaactgtgaaaatatgggagtgaaaaacacagtggagacacaaaaggagcatcgtgtcaggatagaggattgtggagggtgcccatgtgttcccactgcagctggccccaaggttctccctaaggtttttggtcccatctctttccctctggaactcacgatttggccaagaatgagcactctcaggctgctcccaaggaggcccaataccagcccatgggggccgagagccacgtcaatccacatctgcccctcctggcatcaagggtcagccagtgccctgccttttaattttccatttatttaaacaggatcacatgatttcatttgagagtatttcctccaccacttctgagtggaagccaggagacgaggtggctttcagttccatttgacttcctgccacttacatttacctttcacgtacctgtggaaggatgaccagggcctggcctaggcatgtgggtaaagtcctggctgtggctgggcactttccacaggggccggctctgcctggggctggggtgggtgagccctgttggttctaggaccccggacctgcctggtcagcggagatgatggaggttcggtatgggaggagcaggtgtgctgtgcccgtgaatggcagttcctgggccaaaagggtcgagtgtcacgatggtggggtcatttgaaccgtttgtcaccagcatacctagggcagtgccaactgacacagtgcccagagccgagtggctgctggaccatcactgctgtgtgtcctgtgttcacgcagccctgcagaggacagggccgtgtggtcaggcctcttgatggggcctccttgcacctgacctgtcacggtatacgtggagggcactctgccttcctcccggtgtcctgtacgtctgagtggaagtgctttgtggggtgagggcacctctgtggggctcagggggcagctttgaaacagtggccagggtgctccccacagccaggcccactgcagctccctcctgtaccatctcacgtggaagagggtctcggttttgtctttaattggtaaaagttgttttagtgtatgattatgtaagaactatgaacacaaggaattatcttacattgtaaatatttgagtaaaaagaataatttcgatcaataaggatgcatatagcatgcatcactcagcttcgccaaaatccacgccatgctgtccggctggcatctgagggcagccttggtgcccgtcctcggccagtggaccttcccacatggatgttgtttgctttgcgttattatggtcccccccagcgagcccagcccaccagatcagaccatctcctcctgaatctttgcacaaataccttccatcatccctggtattttacctgtgaattactgttagggaaaatatatcagtagcagagatactgattctgtaatttttcctaaataggcacttactccggatgaaaccacaaagcctaaataatacattagcatgcgaagctcaccgagctccttccctccgcgccgaccccggtttccatctaaatcgatatctgtgctgcctcgacggggcccggcatgggccgtgcttggcatacagagcagctgcacctgagcagcagctgaggggtcttagggaagccgctgccccttccaaacatgactgcctttgaagcccctattaattgtcaataacaactgctacctccattacaaaaggaattgaaagcaaaaataagacccggacaatagaacgtaaacggaagagcaaatcccactccggattggaattgtctgccgggctcgttaatccctggcctggcgctgggagtgtgggtgccgcttttcttagggtttgctttctgatcttgtgtcaattactgcacaaagcttcacaccacacagcgaatcctttttataagtgttttagtttttgttcaatattttatgtttctgcttctaaatcttacttgccgatatccaactgataagctgagcagggaaatacaaatacaccagccatcatcccccaaggtggtcacatatgtgtgtgtttctttagcttaagtgaggttatttgatactcgtgtttgttctgtgtggagttaggccttgtcacatataagcagttgtgttcccacagggctattaaagaagtaaaccaagttggccacacaattcagcctctaaaatctgacattgttttctggggaaggcggccgtgctgggggtgccaggagagacttggggatgtcagtatctctcagcatggccgagaacaaacacccatccagttgtatcataccatgggggcctttgtctgctttttaaaatattaacaatgtattttggatgtttaataatagagcagatgagggtacatcaactgcattgtggctttacctgccaatctagttaccaaccatcacactgacaaggaggcgcggctctcccactctgaaatgatgcctttctcttctgagctcctaaagtgcagggtgtttttcagactcaaaggtcaagtccttcttagaatagggctgcatgtgtctttgtccagtgcatgtttgcctgctttcctcggggcacctgtcactgcaaagcccagctgcccgcttacccatctgagaagaaaagcttattctgacattcacaaaccacccactgcccacaatcaagcagacaaggactctgcaggccccaaaccccactcaatcttttcgtttctgttttcctttttcttttttaggtaaattttgttgcttattgaaaacttcctgtgtgtatgacatttttctaagtgcagtagcagaaagaggcagtggaaaggaattgaggtcaatgttgagagcacaactgaagttgctcatgccttatcctccctggaaagccttcatcagctcctgccaagctggccttggcccccttcctgctcctaaagcagttttctcttccattgcttgtttgtcacaaggtgtcttagtttctgccccacagatcagccccatggggtcaggagccacatcctggtggtcgtcttcttggagggcctaggatgcactcctggcttacaatgcctatgaccttgtggaggacgtgggcagcgagtgtccctagaatcacagctgcacgggtgccctgtgtgcccagggaatgcccagtgcatgtcttggcaatcattttggcatttttttcctcttaaaaatctaaatgtgtgtgtttcactagagatcttgaagttacggagggctgcagagcgattatttcagctgagtggacagctcagggaacctgtgttcttctgattgatttgcttcttggaaggaactgactgtaggtttgctgagactgaccagtcaattaagtcagcactggccatccagatgcctgggtttctgatgtgcaagtgctgaatagcagtgaggactcggaacctcaccgctctagagctttgctgggatgcactgggcatgttcacaacatcccggagctttgttggggtgcactgggcatgttcacactaccccagagctttgctggggtgtgtttggcattgtcatagaagacaaaatgaccctcacacatcaagaggaattgaaactgctgatagataccagtggttagcagctctgtttggaggtaatggtggtatctaccaaatatagaacccatgtgccaggccctgtgtgtgtgccggcatgtgtgtctgcatgtgtgtgcctgcgagtgtgtgccaggccctgtgtgtttacctgcgtgtgtgtgcctgcatgtctgtgccaggccctatgtgtttgcctgcacgtgtgtgtgcctgcatgtgtgtgcctgcttgtgtgtgcctgcatgcatgtgcatgactcaggagggactgacatgactgagtggcttgatgagggcaagggtaaggaggagatgacaaactgggcatgaagatttgtttactcatttcaagataggttaagaatgtgtgtgtctgctgaatgcaagctcagggtctctacgcaactgtcttccttagtttcaggaaatactgtagtccaggcagtgggggacaccgcaagaagggagcagaacaaggaactcgctcctcggctcttctcctttgcagtggatgggacagtgctgcagaatgtgcgtgtttgaaaacttctgcttgagttatttcaaaatatagattagagaaattttttttagagtgttaattaccgcaaagaaaaatacacacagccacagtagaggccaagatgtcttcagatattgggagcagcactggccacggagtgcagccatgggagcagagcctcacctggggactgagagagcagagactcacctggggtctgagagagctgtctgtcagtgtttcccaggacacaggcctgggagcgcttacgtggtgagctcctcctttagcgagatgttggagaaataaaccaggattggcttctggctactccttgtcgacatgggcttaggtgaattcattaaagtggttttctgtgctaaattgttgagagttttccaagatgaatgagtttaaaacttgttaataatgagtcacaagaaaacagccaccgttctgctttgtgccgtgatttttgtttatcagggataaatgcacactgaaaacaaagccctttcccatttcccattgaggactaaacaggagtgcacagagttcagactcaccagggcgaccctgctcttgccatcccctgcagaacaaggtgaaattgggcaaccgtggagggaaacgctactcttgatcattgaggtttctaaggtccagggatattgtcttctttttcttcctatttttcaagtaacccaacagtgccctgctccaggggtgctcagaacgcattccagactcatggcggaagcctccgtgggggaaagccttctggcgtgggcagcctgatgctttgctgcatcattaaaagccagaggctgccccagacagagtgcccaggtgcctgggccttggctatgaacacattacaggctgccccagacagagtgcccgggtgccggggccttggctatgaacacattacgggctgccccagacagagtgcccgggtgccggggccttggctatgaacacattacgggctgccccagacagagtgcccgggtgccggggccttggctatgaacacattacgggctgccccagagtgcccaggtgccggggccttggctgtgaacacatcatgggctgcgctggtcttccctcagtaatcaccgtgggaaatcatggaactggagagtgggggtgcttccttgggccctcattaaaggatgacctgaagtctcgtggtggaggccgtcaggaaggatggaaaacgctcggaaccgtgtaggaaacggagtcatcatgctgtagggtcagcaatggggaaagtaaaagcactcaggtgatgccccttgagtttcacaatttaaattcatccttgaatgtctcctctcaccatgtctgtggaagctgctgacaagcagaggatgcacttggctgggaaaacctttcctaccaggacaagcccaagaccgaagcttctggggacctgtcacccatctggcccttcagggaggaggccagctggagtgtggggtctcgcctcatggtggatgggcgaggctgcccggctcagccagggcagtagcagcagccatttctctgcctctccacagggaccttgtgaggtcacctcattttttattttaatacttactaggacagaggtgggtagattctaacccatggacagccccacctgttttagtaaataaagttttattgaaactagggttggccgatgtagtggtcttttctggtggactaaaatgctacagcctgggcagcttcagcaacaggagttcatcctctccccactatggaggctggacatcagagatcgaggtggggcagggctgctcctcccgaggcccctctccttggttggcaggctggacatcagagatcaggatgtgggcagggctggctcttccagaggcctctatccttggctggtgggcagcgccttctggctgtgtcctcacagtgctgtccttctgcacccatctctcggggggagatttatattctgtgctaattaccgatatattcccttctttttaaaatgatatcctctgtgtgtgtgcgtgtgcgtgggtgcatacacacacatttatgtatctatttaggtatttggtttttgccggcatcactgatgaagtttctcatggtcttgtcctgaattagaaaagcattatatgcattggtcattatcttccatgtttcctccctcttacctgctgctttcactcaaggcttttgaacttgttttcccttataattactgtggcttgaatagcatccaattctttcctaatacctgctgtgttctaacaaagcaaatataggcattagaaccttagaaaccagaggatgtcaacaaattggaggaaattcagagaaaagcaacataaatgattaagagactgaaggatttgtttgtgagaaaagtggaaaggaactaagtgtgtttgtcttggtaaagcagcaactaaggcagggcaataaatgcctttaagaattttaagtatagaaatctcaaggagagggaattatttttagggtggtagagggaatttaattaccttaagcaaaaaccgtctgacccgatgtccgtctaggaacagcctcctctatagagggggctccggctgtcgggggagcctgagtgaggacggcatccacacttccggcaggaccagggccttggaagaagaaggttattgcagtgatcccagtggctcaggcttcttccctttttattcagcaaaacacaactcctgtgcactcccttagacttgacacaggatccctacttttgtctttcttacctattccgtttctgtatcagtttctaccataatcattgggtgttggctggtgggctttgggagctgagacagccacgtcagaggaggagcacatggtgcattttacccccaacatggtgggcaaggctgccccagcccctgactgcttctgtcctgacggcttcaccatgaccccgggccggcctctcctctccgcacccactatcaagcccacagtgacctcgggacgtaggatgcaggccaaaccccacttctgtgccctcgcccctccctctcctcttgtccctcacgttccccgcaacccagagctgcaggtggcctctgcccaggcatcacctgttcctgggacaccccctcaccccctcatctctgagagctcagttcaggcaaagcccactcactgtaagaagtctttctgcgtctctacccagatggctgcacaaggccaccctccctggagctcatgtatgtgtagtgttggctgaaggaggtaagttgcagtagctgagaagcacaggtgtaactcacagagccacagtgataatgacagtggcagcaataacgggcagcactggggctggggtcaccccacctgggctctggccatcacacagatgctcctgagttcaaaccatgctcaacaaggacacagggccccagcttgggctctcaccaagaggatgagctgcagtgcagaagcctcagggctgggcattgaatctgggtcctggatggccggtgtggtttggagcaggaccgcggccaatggctggacctgaggagcagggtctgggatccagggatgtctggcgaagctgagggactggtaaaacagtggaaaaccgtgtcctgcggatgccgggggccgctgtgctgtgtctgtgcggccccagccacaccaaggccgagctgtggcctcaagaccgagcacagggtccgtttcatgctgcgcggctcccccggcattgccaggcacagccaggcctgcagatgtggggtccctgagaccaggtgggacttggaggggacacagcccgctcaccatcttccactgaacactaactctacagcctggtttgctcaatataggtcttgtctatgatgggacctcaaaaaatcctgctgatttaaaataatttaagcgccctctttcattctttgaattttttagaagaaagatactaaggaaggaaaagaagtaattgcacaaataaaaaacagttaatcacgaggccttgtgggcatcctgtgcagccccatccctggcctctaccgcgctgtctgacacggtcactccagctcacgtccttgtagccacccttaaagagaggcggcgtcagaaacaccacggcctctgccccctccttctatcgcatgtcctatccatgtgctatttaattacatgccgattgatttagcatatatttgttcattggaaataatgcttgaaacaaaataaatatcatttggtgacaaaacacactctattacagaaacagccccaggatcggggaggcccctgcagctgtggtctgagtggcattttgccagtgctgggagcccgtggtgggaggatgggcctgcgtgagcccttcggtggtccggctgcaagtgcttccgtgggggatccagacccagtacagttacacggtatctcatgctagcgtgggtcacgttagagtgagtttctacttcctaatgttaatgaattaatttcactctgtttatactttcttatattctctttttttttttttttttttttttttgtttttgaaacaaagtctccctcttgtctgccaggctggagtgcagtcgcatgatctcggctcactgcaacctctgcccctgggttcaaatgattctcctgcctcagcctcccaagtagctgggattacaggcacctaccacgacgcccagctaatttttgtatttttagtagagacagggttttaccatgttggccaggctggtctcaaactcctgatctcaggtgatcctcccgcctcagcctcccaaagtgctgggattacaggagtgagccactgtgcctggcctactttcttatattcttaaagagaaacaaactgaacgtttggttaggaaccgtctctaccacatacggtaacagtacaccgaggcagccactgtgggacaagagatccatttcaagccgagatgattttccttgtagaggcctcattttctgaaacaaatttcaaagttaagtgcacgtcactagtataggctaaaaatgtgaagctcccagaagttagcatttccaggcagatccagcttcacggttttctacgtcacaaacagggatttatatgctcccggttataaattccatcagagcatgcacgctacgcctgtcttctctggccaccttagccgtgtgttagaaacatcatacaggcaagagccttttccttctgcagacagcgtcctgtcctgttgtgctaatttgtatggccagcggcgcctgtgaacaagcacacagactgttccagttacccaccacttcagcagcgcatgtggcctagctccagctccacacgttccttgaagaggaatcaggctggtccttttaaattcccttccctagccatttagaagtccgcaacacataccccatcttggctcagaatctctgggaactttcaaacccactactcgcttggccccagaaactgtgaggtgcagggacacatggaatccgagagtgttcacaacactggggagtgcacatccaggccccagcccacagtgatgggctcggaggctcttctgaccatctctgagcagaggcttccattggaactcccggggctgactgcaatgcaaaattaaaagaaggggaccccgatgggcacagcctcaggtggcttctgtctcggaagctccttgtgcgtgtgtgaaatcctgaggtgtgagctgtggagccgtgcagagtcctgcgtccttctgtccctgctggccgcccagccctggctgggtgctcctcctttgtagcaccccagacccctctgacaagggtccccacgtgggctgctgctggggagtcagtcattccctcctgttcccagccctgttctcggctgctgagttagtcaacgtcagcatcaatgctgaaactgtgtggttaacatagaaatgaggaaaaagacataaattctcatggggcattttgaaagctgacctcaccccttaaagtagccacaccccatttcagaaatgcctctgctagttcaggcctggactccctgcacacaggtgctcctgggcacccctctctgcccccaagcactgggatggagcctggagcctagacccttctccctgctcctgggcctcatcctcccctccccagggaggggctgggcactgggaacctcaggagcactggactccctgggaagcctctctctagtgattccagcggggcctctttgatgttcctagctgggaaagccaaggtctataattaccatggccctttcttctgaaacaagctccttcattttgagccactcttgtcagcatgtgctggcgttcatttgcaaatgcaccttgctatcgttttaaagcaaaaaatgcatttcaagaagcaccactgggccctttgccatggcgtttgttaacgttattaatctgatttaaatgaaaattatcctttatattgcttcccacataggcacactttttttctctttaaaattggaaggttataccaaacgcaatgttttcctttcctgcaaggatgtgtggggctgttttaatacagattagtgagagtgcagcagcagggcactgtaggtggtgaagcccggttatcatgtgtatgattagtttcaccttgtagctatgtctctgaaaatgcaattaacagtttcatattcagcgtagccagcttttattcctgccgcatggtgtgcaacatttgcatcataaaaaaaacctaattggtaaacacggtcttgccagcttctctgcgatccacccaattctctccacgttaattggctcagcttcagcacacgctggatggaatttcaaaggacgccgcagattagagagctggcaagcacttgtgtttcacggaactgactccaaggagactcggggaaaaatattttaaattaatgccaattgcaggcgacttgcttgtccaattgttgccatggagaccgttgggtctgctaatctgatgggtgtgtgtgtatttattgggatccatctctaatgaccttcagagaggaagtcagccatgctgggctccgcgcctcggacagggaggcccctgagtggccccttctcgactcggcccttctctggtgactttcttacactcacagcccactccccctcgcccttcagccaggcgcgtctgtgctgtgggcccggcggggcacaggacggggtctaaacacacacaggccacgcaaggcatctgtggcttgtgaagtgtgacactctgcccgtgtccgtggggaaagtcatccggacctcccgagccctgcccatcctccccacctcccttgtatgagagactcggaatcatcagggggctcctgaaatcggaagcatcgttttttctctgagaggcatccgtgttgatttgctgattacgagtctgaatgagagttcttgggagtggctcttattccctgaacgaggaaaaacagcgggtgtcaggccatgcactgtgcgtgttttccaccgaggcccccagaacctgaaaaggccacgcaggtgacacactgggaccccacagccgtccctgccacgtgtgaggaaagacatgaaacttccccagggacgtggctgaggctttcttagcggaagctgacccttttgttccccctcctcctcgatcgcggcttccgtgtctatttttgtcttaattactaggctgtagtgaatggatgtgtttcccttagtgttggacctgggaccattagacaattgtaatagacagacatgtttgtgatttgttttgaactcctaataatagctggttgcttaattgcagaaaataggaagaaagacctcgtacgttctctgctactggcaaaaatcagttgtctttagttaaaaattaacaatatgaactgctggtgagtaaagagaaagggctctgctttcccctgaaagtggattccagatgcacatacaggggtgaggggcgggggcggtgaggacctttctgtcttcctcccacccctccctctatctccctctctccctctctccctctcttcctctctctctctctctcaccacccctcctctcactttttccctctctctccccatctcttctctatttgtcacacattaactaaaaagacctcagagtttttaatcggtagacaggggatttgttcattttaggttaaaaacaaaatgaacaatcagagaacaagtggggaagagggaactaaaggtataatggcttagagaagttcaaagatcaacaaccaaatcactagattcaaagattcaacgtggagtagaaatgaggcacagactggcactctgcagtgctcatgaagaaaggtcagctgaccgcctagaccccctgggtatctggagctgaattgtttccctctgctctatctgagcctctcatttcagcaacccacttttatctgagggatttgcaagatacaagggaagaaaaagagagacaaatgagagagcaaaaagggaaaagatgatattcaggagaagttcttattctcttaaaaattaggaaatgaaagtaagcttttgcactaaaaatacttgataaaaacaatcaaatcttttttgaaacaagaggaaagacagatggagataggtaggggatggatggatgaatgaacaggtgaatgggtgggtagatggatggatgtgtggtggatggatgtgtgggtatatggacgggtggatggatgaatgtgtggagggatggttggttgggtgagtagatgaatgggtgaagagatggctggctggctggccggatgggtggatggatggatgaatggagggacagagggagaaatggatgggtaaatagatggatggatgatgaatgatggatgatggatatggataggtgggtggatggatgagggatgggtggaaggaggaatgaacgggtgaatgggtgaaaagatggctggcttcctgaatggatgggtaggtggatggatagatgggtagttggaaagatgcgtggatggagggatggatgactggatgaacaagtgaattgtttgatggatgggtagatggatggagggatggatgaatagatgagcaggtggattgtttgatgaatgggtggatggatggacgaacaaacaggtaaagtgatggatgtatgggtgtgtgggtagatggatgctgaatgatggatgagggatggatgggtggatggatgctggttgatgaatgcatagatgagtgaatagatgggtggatggagggatggatggatggacaggtgaatgggtgaatagatgggtggctggctggatggatgcatagacaaatgacggatggggtagatggatggatgaataggtgagttggtggatggatgaatgggtgggtgattggatggatggatagagggatagatggatggatgaacaggtaaactggtgggtggatgcaaggatgggtgggtgagtgggtgggtgggtggatggatgggtggctggctggatggatgcatagacaaatgatggatggggtagatggatggatgaataggtgagttggtggatggatgaatgggtgggtgattggatggatggatagagggatagatggatggatgaacaggtaaactggtgggtggatgcaaggatgggtgggtgagtgggtgggtgggtgggtggatggatggatgggtaggtgggtgagtgggtgggtggatggatggggtgggtgggtgaatggatggataggtggatgagtggatggatggatgggcgggtgggtggatgagtgggtggctggctggatggatggatgggtgggtgggtgaatggatggagagatggatgggtaaatagacagatgatgaatgatggatgatagatggattgatagatgtatgatggatggatagatgggtgaatgaatggatagatgaacaagtgaattggtagattaatgtatgtttggatagatggtaggtcaatagatagagggatggatggatgaacagatgaattggaggatggatagatatatggatgggtagatgtgtgggtggatgggtggatggaaggaaggaaggaaggcaggctggagggatggatggagaaatggatggatgaatggaaggatgtgtaggtggatgatggatggatatatagatgaatggtttgctggagaatattcagcaattgcaatagctctgattaatgaacactctcttggaaacttgccaagtctgtgcagggagctgcctggctaagcaggaaaagaaggcacagggccatgattctgaagtggaattcaaggaacccagtatctccctcaaggagcctgctcttcagcttatggaagccctcctaagcttgagggggtaacattaacttttctcctttatggttgattttccttcagattcttacaggtgttcactggccttacgagtcatatatgagaggacaaacatggaagtgcttggcatcccgcctgtgggtggaaggatgggcacatgaacttttctaaatctctacttctgtctgaccacctccactctccatggagatgtggctgagcctaaggtctactttcctcttcttctggagagatagaactgagggtttgatttgggtcacagtcacccctacttggagtaaaatctgcatttgccagctccctttcatctaggtgtggccagtggatctcagctagaaggttaggtatgtgcctttgctccttcatttctctttctcatccctgctcttggaatgcagatgtgatggccggagctgatgctacaccatggtccaagaggtgacctgggaatttcaagaggggagaaaggagggcttcatggatgagtccccatattagccccgacctgcctgctttcacatttttatatgagaaacaaatgtaccatgttcttcaagcggtggtaataagagctggtgccagcagaggcagcagtccagggccactgcccatgcctccgtacccactccaagtcaatcactggacatactttttaacaatcttctttctacgctttgtgaattttggaaattcttccatacagatttgttactccttactttaaaatgttcttctgtggcttactaaacactatggattttttctttgaaatatttgccgtctgagtgatgtaagcttgctggagtcagtctcaccgtgatgtggtgtgtaaagccagcgtcgtgtcatctatgtatcagcccccggcagttcccccttcattccctaaccttttacctattcacgcactcactgagcagattgttttaaacatctgcttccgaaaggcacgtgtcagacactaagaacagtgcacaaagatgtgtggttcttgcccccaacacgtgggactctctcagccaaggagtgggagggagcagttatccaacaatttcaggacgaatggctctcctacaaactcgggatcggggcagcttcatccacattcagaaaaggatgctcttctcacccaagttgattctgaagtctttggtgagttatggaatatttgatctcttattgttgtagtttttcaaccaaaaaaagaaagaaaccatgatttgaccaagaaagaactgtggggaaaaagcacctcagtgtaaaataacaatctatgaccaactaatccagctggattttttctgagtaagattgttctttttctctttttaaaaacaaaactcatctcgcatatatctgctctcactttctctgtgggtccgagggaactcctctgtgagacagaaaattagatgacagttttttcaaaccccttgtccccgattattagtttgtaggataagttcccaaaaaccacagaggggacaaaatataaagtgtagtttcctactttcattttcactttcagtgttatataattttatatcttcctttgcttatagctccttaagaacctaagcatcatgatatgttcttaatttgtaccattttctaccacttaatatggtgatcgtcggtgacgatggtctgacggtttgggggtttcttttaaacatgtgctccctcttctggttgaatggatgcttcaaactggaatgaaatcaaacacctgtgcatcttttgtgcatctttgattcaggccattggtatttgttaaaatcataagggattttgaaacaaagatgatagagaagaggcctctaccaacttttaacaatcaccgggagacatagactctggcatgctcttttgtaaatttccccttctttctatgttgtgagaagacgggctgatgtgaaaaactttcacagcatcaaacaggcacatctgatgtctttagcaatgacgtacagacccaggtggggttttgtgtgggtaaaatcaccgcagagatcctagcagagaccactctgtcatctgcacaccttcctgtcatttgtacacctttgtggtgtttgctgggatctctgtgcaaggtgcaaggtgacagtcctatttcaggattccgtctgtgtttacaaactggtaacttctaaaaccttctccgtggaggcgattgttattctaagtggaaagatcttgttaaaatggggctcttcctcccctgcccacctgggaccatctggagtggggggagcagacccactggtctttgcagcatctgaggtgctccatggggggcccaaggcctcactgaaatttaaaggaggagtcttagtcatcaggaataaattaacttttgtttactgtgtgtaaggcagcagagaaataaacaatacttttttaaaaaatagactttttaaagtatataaacttctcatactggtgttatgtgggtaagtttaagttaccctgaaaatatatttatttggaataacttttactggtgctatataaatggggtgctactgtatcttccttaaaacttgaatttttttccatagtttctcatagtttcaagatttcttcattgcctgttagcctaaatgcacagtgggcaggacaaaacagaactgatgtttgtagaagtagctggtcagtggtgtttctgaggttttgagtaaatccatccatcttggaattcttactttttcaagtgtagaaatgatgtagtgtgtaccccactgggaaccacccaatgctgttaacacacttttaaacacaggttatttgtgtgtctgtgggttcactctctagatgtctctgtagcacctacaacgtctgaggcctgaagtaggtgctgagctggtggatgggtgagcagaggaaggaaaggacggacctggaggatcctggccccccaggatctcgtggtagtggaggaaaatgaactccgtcctcccgtgttgaggctttaccttgtgctgagcttgctgagggctgctggggatgccggagtaagcagggcagttcacacaggcccctgcctcctccacaaggacagggacaagatgaagtgctctacggggtcctgcaggggcatggctggaagtgagggtggagggtctggggcaggcaaaggccagcctggtcttgaaggatgggcgggagacagtgcctactcagtgggtttggctggtgcccatggtggggcaggatggcatggggaattctgggaatggcgtggcgtagatcagtgatgatgagtgtggaaatccaagagtttcaagtgtgcagtgagtgtgtcattagcaatgctcatagatccaaatcagaaatttaaatgcttggttggtgttacctcgtgtgctgtttccaacaaagctcaaagattgatctctttatcatgtgctatatacccagaaagagctgtgcccaggcaggaaggaggtttggaactcccaggataagctttgctttttggccagaatttaaatgtgtccttatactcagcttgatgtcgtggtttttatattaagtgggaaaattttactcatctaagatttttgattaagattatccaattattaagaatcctggccttatcattggaaacattttatctattatatttttaatatgctgttatttacaaatcacatataccaacatttctctcatttgcgggttctgcttgtacatgctgaatcggcttcatttgcatttaaaataagacactatctttcccatggataagaacaagttgctatgtagaatgaagacttcttttgggaaattcttggcaaagaacctagctgagtggtgacggttaataaatagcacgtattgtgtataatcgtgcctcagaactgcttgcatttgaattgggtggaagcagatttgatcattgatcagagcgttttcaagtccgacctggagagtgagatggtgaaatgtctgaagcgtcgccttgtgcatgggaacctttgcaggttcactgagggggtcggtcacgggcaccaggtggggcctcctggggctctgttcgtttggacaaatgagaagaattcctgctatgcctggtggaactgatcacataggaagctctgtgagtgcagtgacctcggggaagtgcagggagtgcggggagctagaggcaggaagagcatcttggaaacaaaggtgaaaggagaaagcctgtgtctcatttcagaagaagtctgagtatatcaacgtgataaaattgaacagtaaacatttactcaccacatttagtagcatatgtacttagtaaaactttttaaaaaacaaacttacaatgactagaccatgagaaagacagacacgtgcgtggaagagaagatagaaagaaaacggtgatactagagtcactgaaattctaaacattcgttagaggcccgcatgcgccaagcgctgtgtgaagataaatcacaacgtggccctgaaggtttaaggccccatggagacacgtcactgctgcctgctggtggggggcaggctgctgcttttggaatgacttcctttattgttcaggtgcaatttgtaaaataaataagaatcagtggaagacaaaaatatgaaataaatgctaagctgctctttgatagtgagaaagcacctgagggtgtttccgccgtgtaagccgccaccacgcgcgcgggacaggttcatctgtttatgaggaaggacagaactgagttgaaatgcacagacctggcggggagcccccgcggccttctctgtaaacaaagccctgcgttttggtgtctcactcctgttttctttctcctgaaaatgaaaataagaatgggcaattattccatattttcccatcatgcaatcagtagaaattttggtgggtgtaatcattgattcatggatccgttcattcctcagaacccatcaggcagtgtgtatgcacatgcccacacacatacacgtgcaatgcacaccccacacacagcacacccacacacactcacacatgtgtacatgtacacacccacacacacagcacacccccacacacagcacacccacacccacacacagcacacccacacacagcacacctccacacacacccacacccccacacacagcacacacactcacacgtgcacaagtacataccccacatatacacaaagcacacccacctacacacccacacccccacacacagcacagccacacacaccctcacacacgtgcaatgcacacaaccagatacatacacacacgtgcacatgcatgcatccacacacatgcagcacacacacacccacacacccccacatgtatatacccacacacatacagcacacccacccacacacagccacacacagcacaccctcacacatagcacagccacacacaccctcacacacatgcaatgcacacacccagatacatacacacacatgcacgtgcacacagcatagggaccaggctgactgtgatacttttctttctagccccttcctgtccccttctgtgtcttcatgccttcatcagatgcacctggcgcttcctccacagcagggccacatctcatcaccaccggccatcgtccgctctctgctccctgtgggaggtgccctgtgaggccccactgccctccgtagtccctgcgtctgggtcccctccatcactgtcacaccctgtgatcactctccccttgtcctctctccttgatgtggccttggtgttgggtgggctcaggtgaggtttacgagaagcaaaggaaatgttagggccaggacacctcctgcctctgatccctcgtcccctgcttacccttcctgcccacccccagcaccagccacaccccgcactgccgcagctccacctgggatgggctgacgtgtgttccccaagttcacctgggaagcgccaacacccggggccgcataaggcgactgtatttggagaaagtgtctttcaggaggcgattgaggttatgtgaggtcgtggggtgggcctggctccagcaggactggtgtccttgaaagaagagacactggagaagaagccacgtgaggacacaggaggagacggccgcccgccagcctgcgcagtctcaggagaaaccgaagcccggacctcagacttcagcccccagaactgtgacggagtacatttctgttgtttgagccgctcaggctgtgaggcttgttagggcagccctagggagactagcaggcttcccgccagaggaccacacaggaggccctcctggtccaaaatgtcatgaccgcatgatggagctggggtgtccatggggtttcctgtctttgagacatgatgcgttacaggtttacttttggaaatgtgggtacagccagggtggccccagtcagacccaaacaagtctcttggcctaagggaccctgggcctaccttcctctgagtgacaaggacactcagcgtgcacagccacaccaggtggctcccaagccctggcatctatctccataggggtgggatggcccttaaggaagccattgccgtccacagctgcaaagaaatgaggttgtggaaatggcaagtgagtgataagtgtgtctgcatcccgggcggctcttccctcgccagatctttgcctggcgctgggactcacccttgctgggactcaccgcaggtgtccagcaagcttgtgaggctcaggatggcaggaggtcagctgtgtttctgggttgtcagggagatgttctggatgccaaaagaaggctccagggccagaccaggctggcactgaactgtaccaccatggaggagcaaacatgatttggactttccttggaaaagttggtaaaaatcgatggagtctttgcatttccattcatgctgcctataggatctgtctctctaaaaaggaaaagggatgtgaactcagtaattccacgaggaacacagtgttggctgctttcttagggtgtcacatctgcaaaactccgtaagttggttgcaggtgcctgtgctgccccaggagaggcaggaggaaggggcagcaggtgccccaagaagggagaggttcacagcagaagccttggtgaaaaggagctttgaacatgtttatttgggcagtggctgctgctagtaccacctttccatcagatttgacatgagcattccaaagaaattcagatgcaggcagaaacccctcagcctctaaggttttactttccttcatgatcccatagagttaaaaggagccgtgcagacttcccactctgagtgcactagagacacgcatttgcacacacgtgcattttagacgcagtgtactgaatactaacagcatccacgtaagatgtgtgcctcagcgtgcatgaggacattgctgtgggaaaccacggtgggcccttcctgtctcttctggggagaacccctcgtgggccacgagcaccacctgagccttctccagctgtgcagtgactgaccagaggcctcaccgcagatgcttcctgccctgcacctccccctgcaccccatcttccagctctctaagacaacgtggacagcaaaacgctgcagctaatcttattttgtgcatatcaagtgggctttactagcccctactttttaaactctagccagtgttagattagtgaattccaaaccagcttaggtcttttgcttagtgacctttctctttgcatttttttttaaagaaatcagcgaaagccaatagtaacctttccatattcgccaccataagctgcacccaccttaagagtgaccacgactgggtgcggtggctcacgcctgtaatcccagcactttgggaggctgagttgagcggatcacatgaggtcgggagttcgagaccagcctgaccaacatggagaaaccccatctctactaaaaatacaaaattcgccaagtgtggtggctcacgcctgtaatcccagctactcggcagactgaggcaggagaattgcttgaatccaggaggtggaggttgtggtgagccgagatcacaccattgcactccagcctgggcaacaagagcaagactccgtctcgaaaaaaaaaaaaaaatagtggccacacagctcagaccgcaggtacttcatgggtgccaggccgattttctcaagccggaaatgctgaggcttgtgaggaaagggggaggtgtgtgtttctcccgcttccatcttactgtttatgtatctattagcatttagcatttctacaacacacttcataccctaagaggttttaaaatcagccatcataaacattaccattatcatgagaggaacagaaacaagcattttaaagatgaaatttggcaaagtagaagaagattttctaaaaccattctttaaaaatgaactcagagtcacagaagtgaaatttacatgcatttgcttgaaggagatggtttgtaaaacctctgggaatcaaatactgtcatgaattttttaaaaaatgaaaaatttaggaagagcagagtatagtgggatcaatattttccatataagcacacatagcattatcagatcctgaaaatgaaactgtcaggaaagtgataagatgtgcctctttctgttatctcagagaaatataatgtaaacaagcagcaaacccagtgaaaaaggattgttttgaattactttttttagagtccactaaggtgttatttatagcaaaggaatgcatgcagttctttaaaaatagatgctggttaattttttaatctgctggttttttaaatataaaaaacctaaaactagaaccaccacccagctgtggacacacaggaagcatctgggaggggttaggaataaaattcgggtgccattgagggtagctctgagtcctggggccacacaggaagtgggcggttccctctctcatcctctgggatgggaggaggctaggatggcccctagaccctgcctacttctctcaggcagaaacatcatgtgaagtcttctttttggtgataaaacccattctttactcccaaattgggcactggaagcattaacagagcaatttttgcttttcctatcaccttagagagtcaccaagttttccaaacgaggagccgaaaagcagccatgggggctgctcccatccgagagccggagtcttctggaactcagtgaaatgaaacactggccaggctcccaaggtgctgacacgtttcctatactgctatgacagtagcaaatgatttttcgtagcttgtggaattgtaaatgaagtttgctgattaagtcggcaacagtgatgaaattaatagatgctctcagagtcattagacaagctattctttaaaaaaagcagaggcccgttttaccactggccttggcgtgttgggaggtgccgccaagcccatgtgagaagctcgccaccaccaagaaacctggatcccgccaaccgcagggctggagcccggatggcgtgcttccccacccctgtcagtcagctcgggtggccacggtgaagccccacaggtggggcagacatccatcctctgcagtccccaaggcctgggtctgggacgcctgtgggcagggcttgttcctggggccgcattccctggctcacggtggctgcgtcgtggccacgtcctcaggggctgtccttctgtgtagatgcaggctgtgtgtctcttcctcttcctgaagaacacaggtcctattggattggggccccctcaggacctcatttttttttttttttttttttgagacggagtctcgctgtgtctcccaggttggagtgcagtggcgcgatctcggctcactgcaagctccgcctcccaggttcatgccattctcctgcctcagcctcccaagtagctgggactacaggcgcccgccaacacgcccggctaattttttgtatttttagtagaaacggggtttcaccgtgttagccaagatggtctcgatctcctgacctcgtgatccgcccgtctcggcctcccaaagtgctgggattacaggcgtgagccaccgcgcccggccttacctttacctctttagaggccctgtccccaagtacagtcacatgagggttcagggcttcccctgtggattttgggggacacaggtcagctcatgacagaagccaaacatctcctgccctctcctgtgctctttcctcctcccctggatccaagcggcctgtagcagacccccacttgtgctgccaaaccccggccaggaccagggcactccatctcctgccaggagttccacagatgagatccagcccagccgtgtccacgccagggtggtccaggccagctccccacctcacggggcttgttgaagagccttgtgtggctcctgctccgtggacctgctgagctttgaggcagccgggagttcctccccggcaagtccatttctctcgctgcagctgacctgcccgaaacgtcctcagatctgcttccagggagcaggccccggccccaggattcctggacatttcccaggctccctgacccccgtggtgtccttcacatcctcctcttcacccctcagatgaaccctaagctccagggagggaggggcgcagtgggagcttttgttttctccctcatccacacctgcggcatttggccccgttgttccttcactgcatgctggccaggttgccatccggctcacgaggcgccgtccactgtactggggattcgggcaacaaaagtgactctccccaccagaggttttagtttacaacatttcccctcaccgtgaaactggaagctttttaggggccgaaactctgtggcactaatttttcatatgaccttctcccaaaacacgtccctgcctctctcatcctccgtagaaccaactcttaataaaggggtgagtgagtgaccatccagagcacagcctctgcagggggcgggtctctaaggcagcactcgcctgatgaccacgccgtgtttcccgcgggggctgcttgcctcaagcccccgctttgcacctcagttcccataaaagggcatttggtggtgagatgtggctcccgcctcggtggggggcagagctggtcagtgctggccatgggggccaccccatgtcacccgaggtgactccaagggaagaggcactaagtgccatttctgaatctgaagctggcggccatcgtctccactgaaacaacgtgatcccaggacctggagacagcttggccagcttccggctggaggaggatctccaggagtcccagtgcagcagcgggtgcctccggatgacctcaaatacgatgcaaccccatagtttactgagcacctcctcggtgcctggcacggttccgggtgagggcacaacagccagtcacgcagactcatgttcctggaaggccagcgggcccatgcctgctgtttgtgtataaacagatgaaaagtgtttgctaatctccctgaggcagtgccgggctctcagcacggattgggagttggcatcatgacagggcggtcctgaggctgctgatggttttcggccgttttaccatctactacactgcctgcgtctgtctgcatggtgggagcgcccgtgaggctgaagtgccgccctcccggtcctcaggtccccctgctgtgcacgtccccagccgtggactcaggccctgtggtcctgaggggtcatgggtataggaggtaggtttggaatcagctgtacctgcttccagattctggctctggcttttgctgctgcctgaacttaggcaaattatttaaggctccagcttcccattctttgcacgtgaactctacctctgggttgctgtgagtgtggagtgtggtcccctctgtgacatgcacagccaagagcaggcctgtgggagaaggccctctgctctctacctgtggccgaacctcagccccaccctgtaccccacctacggccagatcccagcccccacccttcaccccgcctgcggcccgaccccagccccacgttgcaccagacctgcggccaaaccccagccccaccttgcaccccacctgcggccaaaccccagcccccaccctgcaccccacctgcggccagacaccagccccaccctgctccccacctgcggtcaaaccccagcccccaccatgcaccccacctgcggccaaaccccaccccccaccctgcaccccacctgtggccagacaccagccccaccctgctccccacctgcggccaaaccccagcccccaccctgcaccccacctgcggccaaaccccagcccccaccctgcaccccacttgcggccagacaccagccccaccctgctccccacctgcggccaaaccccagcccccaccctgcaccccacctgcggccaaaccccagcccccaccctgcaccccacctgcggccagacaccagccccaccctgctccccacctgcggccaaaccccagcccccaccctgcaccccacctgcggccaaaccccagcccccaccctgcaccccacctgcggccggacaccagcccccaccctgctccccacctgcggcccgaccccagccccaccctgctccccacctgcggccggacaccagcccccaccctgcaccccaacttcagtcatgcttcccagtagacctcaaagccgaaatgtcaggcagcttcctgttaagaaataaagaggaggaggaagaaggaaaggtgtgcagggcgttagtggtgaccaggtgctttcatcccggcctctccacggctttcacgtgttgggtgattccagctgagaaccctctggcctgaaaccaagcatggccctggggcttttaaacccttctcttacgggccttggcaattgtttttgaagtgatcactttaaccttttgttttaatcctctggttattcccctgactggggaatgcaacctgagaagcatcctttggcaaaagagaagttttattagtgaggcaagcagttaattaaaaaaataaaaactaggttgggcaaggtgactcatgcctgtaatcccagcacttcgggaggccaaggcgggtggatcatttgaggtcaggagttcaagaccagcctggccaacatggtgaagccccatccctactaaaaatacagaaattagccgggcatggtggcactcacctgtaatcccagcttctcgcgaggctgaggcatcagaatcacttgaacctgggaggtggaggttgcagtgagctgagatcctgccattgcactccagcctgggtgacacagtgagactctgactcaaaaaataataatgaaaaataaaaaaaaaaagtaaaaataaaaaccagaggccaaagttcatcaggtaaacatctgagatcaagtgtggtatgtcggagctgcgaaccccagtctgcaccccacctttgagtggctgagatttaataaagtgcagtgaagtctcagacccacacccccaccttgatgtttccagttacggaactcgttatcaggtgggccagggactcgcggagaacagctgcagacagcacctcttccccctggtctcgtcgtgtggacgagtctcccgatgacaggtttcctggaggcctcatctccggtgggtgccagcaagtccagccagggagcaggtcccagaactcaggttcccaggccaagctttcccctgcctgtgttggtggaaaacgcagggtaagtgggcaagagtgagagaacacaaaagccttcagccgggtctttattgggctgctttatctttgtgtagctccgtggcacgtgaaaacgagagcgtctgaggttggtgagaaattcgggcagcacacggtgctcagtcaccatgaaactaatttcacattgggagctgagttgtgaaaacggttttgctgtttatttaaaggagatgagagtggacaagccgactagaaccccctgatggcttgagcgagggagaaggagggtttgtgttcaggcaactaaatctgccttctcttcttttaggctggaaataaaagccggtcagtgcaggggtgtgaggggctggctgtgggttctctggcatgaggctcacgtttacaggaggtcctcttggtgggcatagtgtaggggccagggcggacccctacggccgctcggaggaacagccaggatcggacccgggaccgccccacactgtcagcactgtaggggtcactgttgctgcagctcacagtcccctggcccccggatgcctcgcaccccgcacaaagatgacttctctacccagaacacaaccctcttacgtggggcatgaaggatggagtccagccaaacgtgcttcaaaatctcagaattacaacttgaagtagagttttttttttttttttttttgagatggagtatctgtcacccaggctagagtgcagtggtgcaatctctgctcactgcaagctccacctcccagattcaagtatttgcctgccacagcatcccgagtagctgggattgcaggtgcctgccaacacacccagctaatttttgtatttttagtagagatggggtttcaccatgttggccaggatggtctcgatctcctgacttcaggtgatccacttgcctcggcctcctaaagtgctgggattacaggtgtgattaaacattacatttactgagcttgaaatgtgaggtagcttattcggtctacatttagactctgtccaacacagcatctacgttggaggctggacacgggctcctctcacggcagagctgctgctcctccgcgtctcacgcaggtggtctgctgtcctcagcggatggatggcgtggtcagagcccaggagcctccgggccagccctgactgctgctcctggctctgagctagtgttttaattctttaattatttcatggctcttttcctattccacagaggagtacaaattaattatttggtaaggcacttaattaaaagtagagctctgaggctgccgggtaaaagctgaagccaggctgcagcccgggccctgggcctctcccttggccctgcagtccttttcccgggccctgcattcctctcccccagccccacactcctctccccctcgccctgtactcctctcccctgcactcctctccccccaccctgcactcctctccccccaccctgcactcctctccccccaccctgcactcctctcctctgcactcctctcccctgcactcctctcccccagccccacactcctctccccacctccctgcactcctctcccctgcactcctctcccccagccccacactcctctccccctgccctgcactactctcccctgcactactctcccccagccctgcactccactcccctgcactcctctcccgtgcactcatctcccctgcactccattcctccggccccacattcctctcctctgtgcaggggctggtctgggggctccacagggtccctatgacccactggtctctgcctgcccctccctgcactcctccccccaggctctgcccctccctggcctcctctttctgtagaaacccggctttctgtcatgcctccccccacgtttatctgcagggacattctggctgctgacgtggctttgcccacccagccaggctaatgtggctcccttctcctccctggtccttccctcttgagtgaggcccacctgtggcccttccagcccttgcagggccagtgtggatggcaggaatgactggctgtgtgggaggaacctgggctccaggcgccagccagggggatttatggaaagagcagccccctgtcctgaagtcaagggtctgtctccgtggccttcccaggacaggcaggaactgctggagggggtcctgccctgtggggcctgccccatccttggagctgaatgacccaggtgctgtgacctcagtgggagcccaggccaggcgggcccaggggcgcagttgctccacagacacagagcaaatggagccgccaggcagccccgcagggcacgtgggcactcaggaggcagctctgtgcagaactggcaggcatgacccaggccccatcagatgtgcccccaaccccgtcctcctggggagggcagacaccccacgtcaggggacctggggccgagccctccctgggcccccgtgccggcctcattgcactgtgggactgctcctcatgcctgttgagcagacagcaggacttagagcttggtgacagatgggcaagcaggcgacagctgctggtttccagagaagctcgtgcctccccacacccgccccgggcctaggatgtgtcagggaggttgggtctcctgagggcctggcgtgggggaagatggctcaggtcatacatggtcccctggggcaagggaaaatggtttgctaggagaagaaaagatccattctttatcactggatttgaaacaaaatgactttttttctttgcaagcacagattattttcaggagcaataaatgccttaaaaaaagaaaagctagagacgaagaaagctagagaagaaagctagaaggtcccctgaccctgttctcagttaagggcttgtccacaccagccagagcaaacccacaccaccctccaacaggcatgggggaccggccctcggggtggtgggagcccccatgtgcacgcaggagctgcccgccttggaaggaagggctctaagccgtgtgagagaccaaagctcccctggcactgactggcaggaaagcaaagatctatctgaccagtaggttctcttagtaatatttgttactgtatgaatgtttggggtccaagtgcggtcttactacgtggatctgttgtgtagtggtgaagtctgggctttgagtgtagccatcactgaataacatagatgggcccgagcggcgaattctcaccctcctctcccttcccagcgtcccgggtctgcagcgtccattgtcccatgtgctacatccatgcacgcatgtaatttggctcccacttaaatgtgtgaatgtgcagtatttgactttctgattctgcattgtttcactcaagataatggctccagttccatccatgttgctgcaaaagacaggatttcatccttttttatggctgaatagtattccattgtgtgcaaaagacaggacttcatccttttttatggctgaatagtattccattgtgtgcaacagacaggacttcatccttttttatggctgaatagtattccattgtgcgcaacagacagaacttcatcctttttcatagctgagtagtattccattgtgtggacacaccacgttttctttatccattcatccactgatggacacttacgtcgatttcatgttttgctatcgttccagtgtgcatttccgaagggtagtctacttttgcttaaacttgagtttgccgtagaagtcagatttccatggatgacccctccttctgcacctccacatgcacacgtggatcctcccctctgacaggaggtgctacgccgcctgctcatgtggacgctgaggcaaagcaggctgcccatgccctttgcggggctggcaagcccttggtccacacccagatgcacgttcaggggctgaaaggccccatcctactctaagactgcaggtttgctgccttccaggaatttacaattcatggcaacaaaccttggggtgtgtttaacaaatgctcattgaattgggcatttttatctcccagatgtggctggactggtgagatctctccctgagtgacaggcaggcctggagagagttggatgaaaataaaaccagatagaaaccgtagagtgtgacacagcgtttgtaagctggggacacagtgttgatttaggaacaaggagctgtaagctggggacgtggcattgatttaggaacaaggagctataagctggggatgcggcgttgattttaggaacaaggagttgtaagctggggatgcagcgttgatttaggaacaaggagttgtaagctgtggacacagcgttgattttagaacaaggagttgtaagctggggacgtggcgttgatttaggaacaaggagttgtaagctggggacgcagcgttgatttaggaacaaggagttgtaagctggggacgtggcattgattttaggaacaaaggagctgtaagctggggacacggcgttgaattttaggaacaaggagctgtaagctggggacacggcgttgattttaggaaccaggagttgtaagctggggacacggcgttgatttaggaacaaggagttgtaagctggggacgcagcgttgatttaggaacaaggagttgtaagctggggacacggcgttgattttaggaacaaggagctgtaagctggggacgcggcgttgattttaggaacaaggagctgtaagctggggacacggcgttgatttaggaacaaggagttgtaagctggggacgcagcgttgatttaggaacaaggagttgtaagctggggacacggcgttgattttaggaacaaggagctgtaagctggggacgcggcgttgattttaggaacaaggagctgtaagctggggacacggcgttgattttaggaaccaggagttgtaagctggggacgcggcattgatttaggaacaaggagttgtaagctggggacgcggtgctgattttaggaacaaggagctgtaagctggggatgcggtgctgattttaggaacaaggagctgtgggccaaagtggaaggcgctcgctctaacgctgcctcagattcatcccaatgactgtgggaaacacaggcatcttcctctcgctccctggtctctgtccttgtctaaattcccttccctaagatgtgttgtttgttttctgctggttattttctgtcagctttaagaggagaaatatgaggaaactttgctgtgctgcttcgtggattaaattaaaaaggaagcagtggcgggttaccattgccacccagtgttaagtggctcagagcgagtcacctgccctgacctgcatcggtattttctcctctagaagcagaccagtattaatggcctgtagtgaagtatcgctgtgtcaataatatttaaagaggaggaaaacaacgtgatacattaggtcttctctgtgggtttcaaagcaacacccaacacactggtcactgacacagggactttgcgataaattattcaagccacagctcagggtgtaaactgcagccgtgcattttgaaattaggcagtaaaataacagcattgtgtatgactccagacacgggcgcagggagacccagtgagctcagtgcatggggggccactgaccccccttgggttttgtcttccgaggccattggcattttagggagagatcgtccagctctgggcctgtctgctcaatcgacgctctccagagaggccttcaacccccgtagggtcaacactcatctcaaatcagagatttgaacttccgacctaggatgggttcttcctgctgtcctggacccgtgctgggttgggggtggctctccaggacctagctctgtggcccaccctgcccctctcttgcatgaaagtggagccagggcggggactcagggacaggacacctcccggctggccgacctctggctctccaggcctggcagatgattccgatcgccacctccccatgtttcctgagccctcatgggagtttctggaagcttcccactgctctttctcttctgtggttcctggccctgggtggacgcgtcatggaaattacatttctgaaaggggaggaaaaaaaagcacatggggtatgtcctggctctgaccaggtacgggatgtccccgtggggtctttttttgcggaggctcagggctgcttaggtggtttttttttttaatttcataaagtcatacaacctaggaaaaaatctattttcctcttttgtccttggtcttaatgtgaacacggacaggtacgcaccgatataggaaacctgctcttcagagaaatccgaatctatttacgttttgatagaaaatcttatgagccgcccataatatgttgtgggaaaatgagttagagctcgtgatcagaaaatggaaagttgcagctcacacctcaatagaggccacccacctgcgatgatcctcctgaagcgtggcctgtgggaggggactgtgacctgggcagaccccgtgggctccgtcataagggaacacctcccagtaagacgggggctccaggctcaggcgcccaaaccacagctccccactgggagtgacccggccgccacgcgtctgtctcctggcgtctgtgtgtccccttcaaggggcctgcgtgggcaaaactgaagatactgtctatgcttcctgagcagaaggagccaaaaggtcttcccatcgcatacttcttcttagatttaggcgtgggcagtgattccagctggactctggaggacagtccacaagctcggctgtcctgtggccacggtgcctgggggctcctggtggagtgtgaccccccacatctgcctctgctccctgctctctgttgggccaccccaacccctccaggggacccccagataaaggcttgtgtgcactggtgttttccagagcagaaaatcctctacagcttttgtgttttattttgttttgttttatttttatttagttctgtgtattctaatgtgttattaaaaccttagcaccataaggcgctgatttcaggagccctcctgttagaatgaggtggtgctgagagacccactcagtacagaccgtgtggccggtcccccaacctgccagctcttcccacaggcagaagctcagaggctgcaagggactccgtggccatggcgattccactcccaactcatcctggagagcgagagactcggggccatgagcagcccctctttccagagaacgtgtcgccatgcagtctttgatcacgtttaaatgaacaaaatttgggtgttttgttttcatggaactcacctttagggtggccttctcacagcaatgattctgcttttcatttacagtagtgatacacaattttccatgtattagatgatataattaaaaagtgaggctttaaaaacatactgagtgcctgacagctcgggtggcacatggggaccaccagtctccctgggcgaatgggctgtgggccgagtcccggcactcaggcgtctgttctcaaatactggctggagcctcctgcatgtctgggctgtgcctgtgctggcctgatggtgatggaggccctgactgtcatgcaggcctgcgaggggcacgggctgtgaccgatgctgggagccttttttgagccccgggagggtctgatctcactcctgctcagcgcttaggtgcccttggcctcgtcctgggtccccagccttgggtgcatcacttctgggagggtctaatctcactcttgcttggtgcttaggtgcccttggccttgtcctgggtccccagccttgggtgtgtcacttgctgggatctgctgagaacagccccgtgcagctctcaccccaacactccctgtagcccatctccacagatcctcactgggtcccaggcaggctgcaagtctgtgctagctccagggtttaacaggaaacaggtccgccctccctcgccctccctcaccctccctcagccagagggaaaccggccctgagtttctgtgccctgcacgggcagcacccggtgccaccagggctctgtgagtttccttcagtgaagaggacgtgtagaggagctgggtggggccaggactccaccaggaagtgcaggccgggcccacggcattgggttcataacaagtggcaagacccatttgtcaaagagaatctgttcctggttaggaaaaggaaacctcagaaatgccggccattgccctttttaaagtgtctctgtggcaggaattgtccgggtactttcttggggatccccttagccaccctccgaggatgggattgcgactcccatcacagggagactgagaaacagcagagcccgtcatgccccagcctgttgccctgtgctgcatcaggctgggtgcctctcagggaagctcggtcgccttggcttgtgacaggctggagcatatccagcagccctggcagtggagatagcagtgcccctgcatccacaccccaaagcctggcagtggagatgagcagtgccctcatgtccacaccccgcacaccttcagagtcagacgtggactctggccagggccagggaagttcgctggactctggggatctggggcacatcttgctggcagggttgacaccagcagctctctctgcctgactggagactcggcccccctccccagtcctcctcggtaagcgctgggactgggctggtcactcctgcctgtccattcactcacccactgtgcgccaagtcctccctcccactgtatcggagggaagctcggtgacattccagtgtcctagtccacgtgctttgtgccccaggcagccccagctcctgagcaccggcccagcaacatgagaggctgtttcctgggacttcactgggaaggggaccagcatgtcctactgtcagcaccgccctgagccctgacccccagcctgccctgctcccccatccaccgatgtctcctcccttgccttgtgtcgctctccccctgcccagaacttgccagaggtgggtgcagggcggggaccgttgggcatggtggcatggagtgtggcccaagccttggggagagggtgggtgggggtgccctgaaggaaggagaacctggatcccagaggacttggagcccctggaggccacccctgtgcgcaggtgccgtgatgcattcctggcccgtgcccaatctctgctgcacctgtccccgtccctcccctctgtgctccaggtcactcgcctgcttgggaagctgtgtcgctacacgaccctggatcctgcttatgatctgttgaactccacgagtgcccggtcttccccggtggcgctcatgaattatttatctgggcccgctctgccctgggctcgcactcacattaactcgtgtccccagctgcagcttcacctgggcttgttttcgtctcggtgtatttggagcgcagaagagcaacttgcatttttcttcatagagggatggagggcaggttttgttgagaaatacaaatttgatttatttccaagaaaacaacttttactgtcaaagaagggacacgaagcagctctgcatttggcagcccccagaagagttttctttgcagctaatgaggaggagggggagaaggcaggtcagcgcagccctgggcagggcggggtgggatgcgggggcagagaccttggccgagtgtggaaggaacacagccagcaggcgggggattgggcagaaggcctgccctgacctctcaatgctgcttcccttgagttacctgagccccggtttcccatctgtgaagtggggtggacatgacaaggatgtgtcattccggcccgtcaggtacccgaaggtgaggtggcacccgcccccgctgcctcccccagaccatggtgtccagcagaatcatggctaagcagccacgaaggcacccacccccctcatccctccaccccttagacgcacttggtcagagcggtgcagaaaggaaagggctacagcagccctcgtccctccgacccagccacagatggtgccccccacaagactccgctttcttctgccctctgagtcttacccccttatgaaaaccgctgtctttctttcttttctttttctcttttcttttcttttttctaaggtgtggtcttgctctgtcacccaggctggagtgcagtagtgcaatctcggctcactgcagcttagacctcctgggctcaggcgatcctcccacctcagcctctcgagtagctgggactgcaggcatgcgccaccacgcctagcttaacttttatatttttagtagagacagagtttcaccatgttgcccaggctggtctcaaactcctgggcttaagtgatctgcctgcctcagcctcccaaagtgctgggattacaggcatgaaccactgtgcctggccaaaaaccacggtctttcgactcagcctgagctgtgccgggatcttcttgcccattcagcctccagcccgggggtatctgcacctttagaatgtcagttccttagcgcagaggaatgtgttatagcggtaggagttcaggatttaggtcttgcctttttcttcatttaactggcatgaaagagacatgtttgcatatgaggacacagagggtgtccctgattttcctcaggtcacactgcccattcctggctttagacacagatgtgagaaggggatgcaccccaagaatgggacacgggtgtggcgatgctgcccagagcagccctgcccagggtgcagcccagcactgacattctgcaccccactgggggccaggaaacaacccctttcttgtaggtggttttttagaaagtgtggacgtgcatgacctgtggaccgggtcatgggcatttctcgcctgtgcatccctcccccggttccctccagcccccctgtgctccctggggcttgcagactgagtcttccaaagggtttgcacccgtctgactcactgttgttacttatagtagcactaagaagggtccctgattcatcactgttctgatgtacacacctgcccgggaatgcgtttggtgtgtttggtctatcagcacgtgaaagacagggaaccctcctgtggggccatgtcaagacgtgcaggcaggacactgtcctctgctctggaggttcagttgctttagctgggcccggccactgcaaaccagcctcaggagagctgggggcacgcctgggagttgcaacatgtggcaatttagggggaaatgagagagagagacagagactgcactgataattctccgtgtgaccaaagcacaaagaagcctgtctttgggagacaagctggaaatggccaggacgccagtgggggctccggggagagacagcatggtgttccctggtgctcccatggtgccacaggacatgcatcactcacagtccacaaacaattcgggaaaggcagggaacgcagcttctcctctccgtctgcatgaggcagctttgaccctggcttggagaagacaaaagggggagtggtgaggactccggtcccctgcatgtccggacagtgttctctggatccctgctgcagtaacgcagggaatggcaggtgtggggagagctgggggcatcagtgatgtccggagacccttctctggatccctgctgcattaacgtggggaatggcaggtgtggggagagctgggggcatcagtgatggaggtgtcagaagtgatggggccaccccactgggatgctgcattgaaaagcagattccctattgccctgaatgtcccactttctgcagaatggatgttcttagtcccccatccgctctgtaactgtggatcccacactgcataataactgccccatctctagagaaagactgatagcatttaggacaggcccgaggaacctgtattccaactgttcacccagtgtgaacaaaaccagcaggccgcttcctccagctattcagcatccagacataaaactcagcagtgggaccaggcagctcctgctgtccaccgggtctgctctgcccctgggaagtctcttatgcaagagataatgactgacaggtcatcacaccctattagtgaccggacactacgcccccattaatgacctgtcatctcaccccgtttagtgaccgatcaccccattagtgaggggtcatattgcccccgttagtgaccggttgtctcacccccactagtgactggtcatcacgccccctttccctttagtgactggtaacctcgccccctttagtgaccggtcatcttgcccccgtttaggttccagtaagctccacacagcaccttaccttaagggaggaagagatttcagaagcagatctggacacttcgtgcttcctaatcccaggaagaaatggaatctctgtgttgccgaccaagcgtgggcggcgtgctggggcagtgcagctgtttcatggctggctgtgaccttcacgggctcattccccactggctggtggagggggatcatcactccctagatgtgtaccggcagctactccagtgcatgaacccgttatatcctaaagcggggttctcctgggacacaggtgaaccccagcgtgtccagcagcctccctctcactgcggctatagctgataccgtgcaaatgaccccaaagtcactgggccccctcgctccagattcactctggagggtcctggaggaggggtggagtgggtcagaaaccggcagctcctgtcagtgggtgggcaccgaccacctgctccaaaatgtctcctctgcccagttacttccagtcctgccaactggatggtccttgggtttcattagttcttccaagggcagaaccccgtggaagagtgaagccttcattatttctaatttagcactattggcttgaatcaagcagtcctaatatcaaaccgtggtaatgctgagtgaatgggaattttgagtgaggacgaaaggaagcgtgatgtctgaatagtgcagatgtcgcagaaaggcaggcaggagggaaaggaccacagagaggagatgccacctgggagaggcaggcatggcctgtgcttggggagatggagacggatgcagccagttctgacctccagccccacctctgccactgaccacggtgaccacacacggggtgccctgcctctctgggcgtcagtttctgcgtgtctacaaggaagcaattggactagctgacctctcaggccattatctgccgccagagtccatggtcctaaagcgaagcctcatccgcttggcagtcttgcctgggtcctagtggtggagccttcacgttgcctcacatccaacagtgactcgtcagaggcagacatacttgctggcagctttgcagcaccctctccatagcttcccccggacatacgagagcggggctgtagatgagggtatctatctcatgctattgcctcactgagcaccagagaagatggtcagaacccctccctcctcccacctccatccatctggaagcaggaagtgtgtttgtgttctggcctttctcttgtcagtagtgagagattcgttacatttcaaccccaagcatttcacatgcggtggcatcttggaggagctttctaagcgaggccgggtctcgtcagccaggtgggctgtctggctggtctccctgctctcgagattcaaccccaagcatttcacacgcggtggcatcttggaggagctttctgagcgaggccgggtctcgtcagccaggtgggctatccggctggtctccctgctctccggatttggatgcatggtttccgtgcacctccctcaggagtttgttcaagagcagcgctggctgtgcagtgagtagaaaacacacttgctgtatctacacagagaagtttaaaagaacagaagaaggacagaggcttcaggaccacagtgatggatctgaggggggcctgaatcttaaaccctatccgtatagtctccaagcagggatcatatatggtataactacattttcatctctaatcactggggcggcatgtcagtatcttctctttctttcccattttgagtgacatagtgtgatatgtctaatgacaactagaacaaattctggtaatgaggtcaccttgggccaggatgactgtctgacggctgttttccatagaaattacttgtgaaggcacaccacacacacagaatggcttcctccaagtgtaggtgtcaacaggcaaatatgctaaactcgcaagatggaagtggcttgcccggtctctctagtttagaccgataaattggtctacattgagagagctgctgcttttttctaaaaaaagagtgattggttgtgattatttagtttcctccaggtgcacgctttttatgtggaatgcactggatggcttaaatgcaagtagggcccaaacatctgatgtcactttgttaaagggagtgttgagtgagcacagtcgacgctcccagaattgtggagaggatggctgcaggagaaagctgtcagtcaaggcccatgaaccaagaggagtgctagagaccaccacctgcaggtgggatttggaaaaggggaaagaagtgtgggcgctcagccaggggagtagcaccgggtggggagcagcacggggtggggaagccaggaggcctctacacagagagcctgggcctgaggccgacagtgaggggcaggaggccagtggctgaggcagggcctagtgcagaagtcaggggcagacgtgagtattgggctcgccacgtcctgtgactagggagcttctgcaggtctttagaagcggttggtgggataagagcccatgtcggggatgagctgcatgtggggagagctggagtcagggagaaaagtgaacagcctcaccgcgtggtcagctcgtggctgctgagcacagcccggtgtcagagagcaggactgagagtcagcttcatggagggcgcggcgggaacagcgccagcccccagcacccagcaaccatcactcaccactcacagggcccctggcattcacaccctggcctaggtttgggaaccttccagccagaaccggtgccgctggcttgggtggagcctggcgtgggatggggtggagcctggcgtggggggggtggagcctggcgtggagcctggcgtgggatggggtggagcctggcgtgggggggtggagcctggcgtggggggtggagcctggcgtgggattgggtggagcctggcgtgggatggggtggagcctggcgtgggatggggtggagcctggcgtgggatggggtggagcctggcgtggggggtggagcctggcgtggggaggtggagcctggcgtggggcggtggtttcaggtgaagaggactcaggcagggacgctggtttacacaaggtcattgttacctggacaactccctgagaatgatgagaaaatatgagccagaataaagaaggctgctgggttcccggctgtctccatggctaatgaaatgccattttccttcttggtgcttggctgtgcaagtgcaccctgtcaggcagattctccatctcacgggccccctgcgagtcaggaagagatgctcgcggcgctgggtgagccggctcctcctcagggattccagggaggctgcagggcttactgtgccgcagtttcagcaacagccccagaacatccgtgtgtccaggcaccaggacactagcgctgttggctcacacagccagacccacagcttttgagctgatgaactgcattacgtccagacaatttccacttaacagttgtccgtaacgctcctccctgggccagcagccacatgagaacaactcagcacagggattccagggactgggtcggcagcacggtctcaagcctacactcacaagctcacgtgtgcacacacacacgctactcctccggggcatgcaggcagcgtccctgagaatccctgcctcagactcactcccagggctggtggacacatgtgggcgggggcgggggaggccacagccctgaaagtcatgggttcaggtttcagctgtgtcagaagcacctggaagctggggtgggatgtgatcagcaccctcttcgtctctgtgactcggggttttgggggagaccccgcactctgcattcccctcctcatctctatgactcggggtttaggggggaacccagtactctgcattcccctcctcatctctatgactcggggtttaggggggaccctgcactgcattctcctcctcgtctctgtgactcggggtttgggggggaccctgcactctgcattcccctcctcgtctctgtgactcggggtttgggggggaccctgcactctgcattcccctcctcgtctctgtgactcggggtttgggggggaccctgcactctgcattcccctcctcgtctctgtgactcggggtttgggggggaccctgcactctgcattcccctcctcgtctctgtgactcggggtttgggggggaccctgcactctgcattcccctcctcgtctctgtgactcggggtttgggggggaccctgcactctgcattcccctcctcgtctctgtgactcggggtttgggggggaccctgcactctgcattcccctcctcgtctctgtgactcggggtttggggggaacctggtactctgcattccctcctcatctctgtgactcggggtttaggggggaacccggtactctgcattcccctcctcatctctgtgactcggggtttaggggggaccctgcactctgcattcccctcctcgtctctgtgactcggggtttgggggggaccctgcactctgcattcccctcctcgtctctgtgactcggggtttaggggggaacccggtactctgcattcccctccatctctgtgactcggggtttggggggactctgcactctgcatccccctcctcgtctctgtgactcggggtttaggggggaccctgcactctgcattcccctactcgtctctatgactcagggtttggggggaccctgcactctgcattcccctcctcgtctctatgactcagggtttggggggaccctgcactctgcattcccctcctcatctctatgactcagggtttggggggaccctgcactctgcattcccctcctcgtctctttgacttggggtttaggggggaccctgcactctgcattcccctcctcgtctctgtgactcagggtttggggggaccctgcactctgcattcccctccttggctctatgactcagggtttggggggaccctgcactctgcattcccctccttggctctatgactcggggtttggggggaccccgcactctgcattcccctcctcatctctgtgactcggggtttaggggggaccctgcactctgcattcccctcctcatctctgtgactcggggtttatgggggacgctgcactctgcattcccctccttgtctctgtgactcggggtttagaggggaccctgcactctgcattcccctcctcatctctatgatttggggtttgggggggaaccccacactctgcattcccctccttgtctctatgactcaggggttctgggcggtaccctgcactctgcattcccctcctcatctttatgactcaggggtttggggggaccccacattctacaaattctaacaacctccaggtggcacctggcgtaagggctgcatttggagaactgctgctttgcaaagcccttgaagaatgggctgatatgatagggaactggtgttatattaactcaaagccttcacatcatagcttgtgcctttccgaagtattgctaattaattaacttggaaacgcccaagggtcattttagatcaaaccttattttatgaaatagatgtaggttatgagccaataaaattttgatacattgaagtcattaaatcatttggtacactgagttattttttaaaataaagtaaactgaattactacaaaaaaaaatggaatcactccctgttaaattaactgaatgaaagggaaaagctccttttaaaacaggaaagaaactattgtttttactattttatcaatgactggagtcaaatttgtgtgtgtgttggtgtgttgaatatattgattggtttagttgaagttgagtttcatctgtcctggaatagcaggagtttgagcagtttcacccgtcccggaatagcaggagtttgagcagtttcacctgtcctggaatagcaggagtttgagcagtttcacctgtcctggaatagcatcaccgactatggaagccttctccatgtctcgtccacacacattattgtctaaatggttctggtgacaccactgtctgcagttcctctgaatttgtataaggaccaagaaatgtgtgggttcttgcaaactctgaggtcactcttagggtaaaaggctgtttatccactcaactttggtatatgaggagcctttctgcaagttactgatctaactgtgtgagtgcctgacaacacagccagagtgcgcagggcatcaccagtgcccgtgtgggaggcggggctccgtgggaactggctacttaccccccacctgtccccagagcccgtgtgggaggcggggtttggtgggaactggctacttatccctcccctgtccccagtgcccgtgtgggaggtggggcttggtgggaactggctgatcatgtcacttctttaagcctgggtttcctcaggcttaaagggaggagcgtctgcctactttccaaggctgtgggcagatgtgatgctaatacaatcacgtagtatcttttatttatttatttttttgagatggagtcttgctctgttgctcaggctggagtgcagtggcatgatctcggctcacttgcaacctccgcccagccaggttcaagtgattctcctgcctcagtctcccaagtagctgggactacaggcacgtgccaccatgcccagctaatttttatagttttagtagagacggggttttgccatgttggccaggctggtctcgaagtcctgacctcaagtgactccccacctcggcctcccaaagtgctgggatgacaggtgtgagccaccgtgcccggccaatcacagggtatctatggctgtatcttatggctgctcagtcctagaagtttcttttccaactccgacaaatagctggagtaatttagtttggctttgaaacacttgactgaatttctaagatatttggagaatgttcttccctgtaagttgacataaaaagagacagtggtttaagaactttcttactcagatgcagagatactgaattaccctctggtgtgcagcctgcctatgaagtttgcatctcagcctgcataaaatgaataccctgatcaacaagttcctgttttgcagagaaacctcagtgatgtaataatatggtcatgatttccatcagtactgaatttttaccaagtcatcaaaatgtgatggtcactgaaacttaatgaaatgaggattacatttcaaagactaaggagtcctcagtgattatctttatgaggcttttgggggatccttgtattgctgaggaaatagactctattagttatctgatgctatacaacacactaccccgaactcaccagcttcgttcctgttgtcacagatcccccagctgcccagtcgggggctctggctctgggactcacatgagggtatggttggcttgctggcctgggctgcgattgagcaggaagctgagggacctcttatgcctgtgcatcacgcactgtattctatgcaacggatgcgagtcataaagtccagcccatacctccaaggaccggcattcagcggcaccccctgcagagagcagaatacataagcaggcgttgtcagccaccgggagcaccagaggtagataaaggaaccggaggcagcgtcgctctggagccgggctgcatggctcttctgtgtagtgaccaagtcatctggaccagctgcctcagtttccctatctgcaaaatgtgggctcccatagtgtctgcattagaggactgtcatgtgttaaatgtgatgtgagaacttagaatcatgaccagtgcatagcggacactcagcaacgtgcagttgccagtgtcaccgtcatcaccaccattgctgctgcagccacagcgacgtgaagtgttttctcagatgtggaatgttcttaactttggtggtttttccagagaaaaccatggattaaaggataatattttctaaactgagagttagcatgtctttctattgggaatttcattccctgataacttaagcaatgtcctctcatctccttcaggtattttgaacatttaaaacatttttctttttttttctatccattcagcagacattcattagccatctgctgtggactgggccctgtagtaggttctggttgtacacagaaagagaaacaatccctcctgccagggccgcgggggcgatgggagatggcaggtaggcaaggccaagcaggtgcagtaggcctgggggagggcggcccttggtgtatgcagctctggatcctggccttgccagtgctctgcagagtcaactccagagagccacccccctctgggccttccgctgggcaggtgtcgtagacaagaacatccagccttgtgagtcgccaggaaggcccaggggatgtctttctcccatcatggcgctatgcttcctggggtctcgtctgtcagccccacgagcagtgaggttggccccaaaaccaggaccgacttcaccacgaatgcaacctcactgtgacagaaaatcaggggaaaaggcttcccttgaggaagggaacagaaagtgtgcagtcccagagggaagtgggggagctgaggactcttgttcagaaagaatcatcactggggacccctgagctggatcagctgctcacctctgagcaaagtctagttctggcttctgctttcatgagtgtttgtgactttgaagggtttgttaaagatgccagcattaagaccttttcattattttcacaaatgctgtagctttaggtgtgaatgaatggacttgccttgccagaaactgtcttgagctcaaaagctttcaaaagagtaaaagactcagagcattgctaaacaatttcccgaatggtccctggctttgcttaggaaggacgtgaagccatagtatcttgctgtgtcttgtctaggaggaagtgtttggctcttgaaaagaaaggccaaaagacatgcggtcagcataagacgtctttgcaaagccactcctgacggcggagatggcggcagcaccacacgggagctgtttgagaagcagatcaggcagagtttcaccgatgtctgagagctagtttcacagccctgtgccagaggagccgtgtcttccacaaaacacacctgagagctggtttcagactttccgggaaactgccctggcccaaggcatctgtaaacctcttttatcctaattagtggtaacaattcaggtccacctgacctgtcattggcctttttagaaaactccttggtatttagtctgtagatgtgcatgcgacgtacagggagttcaggatctgttgtgggcctagttaccaaaggtgcctgagcctgctgcctgcggcggtgagtcctgccggcccacagacacatcgggaagctgacctccttccctcctcctcagccacgactcttgtcccagctgccaccagtcttgtcagggtgatcccccttcctgctcccccagcagcagcaacagggagctcttaggtgtcactagatcttcaagtgtccctgctgcagcctctcgagatggtaccagatcctacctctcacttcctcccgcccccacctcccctgctcacaggtactggacagagcagcattctctctgctccctgaacatgctcaattcatcccacctggggccttgtacactactccatgaacacactcacgtcatcccacctggggccttctcacgtcatcccacctggggccttgtacactactccatgaacacactcacgtcatcccacctggggccttgcacgctctgggccctccacctgccaggcacaatcccacatttgcccaggtggctcttggcattcaggcatcagcttgagtatcccctcaggagacctttcctggctcccagatctctgataaacccctcccacccctgtcactccagagcacattaacccctcccacttgacgcagagctcagagccctgatcagaaatcaccttgttcattgaatttggatcagtgccaccacagatggtgagttccatgcaagcttcatggggcacagccaccctacctgtgggtcacaccagggagtccccggtgctggaacggcacctgtacgcaataggctctctacaggtgtgcttaatgaatatgcatttcgttaatcagttaactaattattagattcatggactattagctgtggttcctacccttgcatctgttttattttccatacctactcatagtttttcatggaaactactgtgtttatggcttttcataattacatatacctctgaaatttgacgaaatctataacgattcctggcatgacagctatctttgttaataaacttcgatttgattcaacttctcttccactatgcctggctttgacgatttgggagcttaagcagaagtgtttatatcctctgtgacttagtaaaatgctaccacacctctatacccccacagtttaatatcaacaagacaacatgggcttaggtacatttaaaaacaaaatattacttagttttgtgatgaattacagtttgaagagtgtaccttagttatctgctctaggattatttaccccaatctgcggcacaagtccacggctacgtgcaagcatggtcggcagacgctggaggcagggagagggatggaccagtttgcgatcttggaggccccagggtctggtagggcagccgcacaggcacatgcgtgactatcccaggaggcagcacgggaggcctcatggtggaggctccagtaaggtgctgggcagagtgggcgagaacctgggaactctgtagaatgaaggggtaattggtggggggggcttgcatctggattttaacccatggaactgaggaagaagcctcataactgaacaataaagagaacagaggccacagaggagagtgccagccggtgctaggagcaggagaatgcccaacacaggaacagccagaggagccgctgggtctcaactctgctggaactcggctgccaggctgagcaactcatcagcgcctcctgggaatcgccgagcacctcacatcagagaagaaagatcagagcttgattctgggaagattcgtttgctgataacgcgatgggaaccagccctaagctgccatggccctggctgaggcccctttcccggcgtttcaccaggacatctgagctggggtggcttttgcttccagctcaccttgtgctacaaggacttggatggtgagcactcaggtgagggagggccctgtgctgggctgctgcccagctctgctctgccatcctcgacagaagttccctctctccacatcgcatggggtacaacaccccacctcggccacactgctttgtccaaagcctatctctagtttgtggctgtccttggaccaggctcagagcagctggacctccaccctgggaactcctgcagacaggcattgtggttgggaccctctgcatccccagtgcccagggcacacagtaggtacctggtggttatttaaaggacatgcaatggaaaaaaaaaaaggtaaattcacatggaaaagacagtgaggttttagactcctttgaacatgaataccagacacggagggcaggcaggggctggtggggctgatttatgccaagcctggcaccaagggctggcctcatccttgaatctgacacccatgtgacatctgtgacactcactgaaaagcacagttcgggtctagggagctcgcccaagtttgtgtagaatgaagcacgtctcctcgtggggccgtgggaatatgaatagctgacagctgaggaatgatttgcctgcattcagggactcctaggtgcctgacccaggagagcaagaggacacaatggtgacctgagccgacatcacagggacgaggagattggggtgtctggagatggagaggctctcagacatgaggagacaggggctggcatccagtccttatccgaaagtacaggattgaaacttgaaggaaatctgggttagagaaacggatacagggtgcagatgctcggatccagtggttggaatcatggggtggacaagagagtggacagcagtgttggcaggaactggagggccccagcgtggacagcagtgttggcaggaactggggggccccagaaaggcctaggggaagccaagatcgaggtcccaggaggaggagaatgtgctgggcctgggctgcaccctgctgatggaggcagggtccgggccaggcctttagtgtgagttcttatccagaaacaccctctgctctccccagcccctcactagccctgcccagaggtcacaggcgtcaggaggcatttctgactagggcttgttccataccctggtcctctgctcactcccagacatgtgcgccatgatggtgaacatgcctgaggggctggggatggacgtgggcacctcttctcagtgcccgcccgcacagctcttcacccacagacactgcgcccacttctgccctgtgtctacacttgccagaccccccaccgccctggaaatttgcaaatccaccatgcccagcaacacctccccagcacctgacccgctacctgtgtcttcccatggagccctgcccaccccagcccctgccctctgtgtcttaccacagagccctgcccgcccctgcccaggctcccactgccatcacccgctgaggtctgaggtcccacccacccctgccggctgagaccagagatgtccacgacaaggcatggacgagcccccagtcacatcgtcccatggcaggaccgacggttcccactgccagtgaacactgttcttgaggcttcactctgtctctgtcttctcgaagtggacccactaactccacagtagggcagccccatgctcccaaggtgccacagggaatcaagggcaggtggaagggccctgtttgaaattaaaggggatttccccgtgagctggggaggagccccgtggaagaccttgtgggcagggtggcccggctggagtggcaccattgacaccgtgctggagatgagaaaatgctagtgggaggcaaacagacttgactgcagggtcactctgcacatcaaccagggtgctgtccattctttccacaatgatcatcgccggatccgcagggccggcgctcatgacctgtgcagcgtcaacaccgccaacccaccgtccagcagtgcaagtcaggcagctcagcctgtgctccatgttatggccacacctgctaccccgccaacgtcaacagcagtggtcagagagatctaatataaatgtatcatttggcattcactctggaaggaagctcaccaatggcttgtaacaccactgacaatgaatggagaaatgtgtttccagtccccccaacagaaggaggacagcgcgagaggccacttttcataccctgtggttccagtccaccctaacggaagaaagacagcgctagagactgctttccatgccgcgtggtcttctaaaagcatgctatttattttatctttgttgctatgctttcatctttttaaattttacattgccattacaaaaaatagtacagattttaaaaatcttacaacagtgctttacatcttatatcttggccattacctgaaaattagggctttgattcaaggagagccatctaatccagtgaggccatcctctgctgtgcagaaggatattctttacagggtaagccccacccggctgtggctgtgtctcatgtagacagcttgtttggctctatgcacatctttctctaagacctctgattatttagcaaaattatttaaatggtgtatataaatattggaaattcatttccctcccatcaggaaaatgacataagaagtctgtggatgtctggaacttttaaatattgaagagcctaccccctgttatttccccccaccctttccccattcctccccacagcatgctatttgttattttacatctgcaggttttatgtggttctatttggcctttaaatcctgtgtctgtcctatcagcccatgaactaaaggcaggccaagtagggctgtcttccccaaaactgccagcaaagctgcttcatccctcgaaggcccctgcacaacctcctcccacccactgctgctccagggcatctcatggggcctctcctgcaggccagtgaggccgctgcagcccagagtgcaggcttatgtcacccctggcttcagtggggccctgctatcacagtgtggaattcctgaggtctctgaagcctgttcttgtggtgtggagttcctgcagtctctgaagtcctgttctcgtggtgtgaattcctacggtctctgaagcctgctctcgtggtgtggagttcctgtggtctctgaagccctgttctcacggtgtggagttactctggtctctgaagccctgttctcgtggtgtggagtttctgcggtctctgaagccctgttctcgtggtgtggagtttctgcggtctctgaagccctgttctcatggtgtggagttcccatggtctctgaagccctgctctcgtggtgtggagtgcccgtggtctctgaagccctgctctcgtggtgtggagtgcccgtggtctctgaagccctgctctcgtggtgtggagttcccgtggtctctgaagccctgctctcgtggtgtggagttcccgtggtctctgaagccctgctctcgtggtgtggagttcccgtggtctctgaagccctgctctcgtggtgtggagttcccgtggtctctgaagccctgctctcgtggtgtggagttcccgtggtctctgaagccctgctctcgtggtgtggagttcctgtggtctctcccacagggcctggacccccttctcttgggtgacataggcattctctcgtcctgagctgctgtcagtcagcaggttaatgcccatgtgctctggtttcatcctttaagacccgaggtcccatttgcctcattccaggtgcctctgcatgtgtctgtcatccttagaatgatgtgcatttgaaccagtggagaaaaaacacagaatgactgacgtgagttttgacacgattttcgttaggaccttggcatgctgggtgccagagaacctgttctagtgaacgccttttacacttccaagctgtgcaatcttgtgatatgctccattttcttctgccttgatagccaaatgccaatcattggggagaaaaattctgctgctgaatgaggcagcgcacgatttgccctctggaaattgaacatttaccttaagtggtaaaaggtgttttccataccttgatataagtttgcataggactctctgctttcatagttctcacttgggtatgcagaactgacatctttgtgaattattctcttttctttcactggagtgtttaatatgcattttaaaattgcttctgtacatatgcagtggataaattaaggtacagaagaaggtttctcagtctacaccatccctggggagttctttttgcttcacttcaagtagtagctattgtcgcctctggcagtgaagtctctgttactttaccaatgctctcattactgcattctaaaacggtgggttttttttctttctttctttcccacttttttttttattggcttgggatttgtgtcttaatcaaagtgtgcaagaaatgcacttaatcgtaaaacagggtggcagttttacaagatgcttcagttaattagcacggaattgctggggaacgttccaggggggttcctggtctccattacatcaaatgagtttgctgtgattaatgttatcataggaaataccaaagaaattaataacgattaagccattacttccaagtggcgctcattacagcaagagctttaagaaaccccaccaacttcaatttctctgtcctgaggtgtgtctatgctgcactggggtggaatatccccagactcacctggatattctgaattttctgattcatttttcttccagaaatcttcaaatacggattcgtgatggataagaaaaaaataaccttttttattgaaggtctgatgcttcaaaaatgcatttattcattccaaaaaatattcagtacaagtacaaatatttagtatgtacaaagctctgagttggatactcaggggtaagaacaaagatgaacagaatccagctcttttcttgaagaactcatggagaaaacacccacataagcaagatgaattacaagggtgtgttattaaatctgtgatagaggcacaggcagaggaagaggtggtgaactttctctaggattatttcagctgactttactgggtaaatgggatttcagctgcttccaaaaatggtgcagatttgccaggcagatggaagtcatgtgatggagtggtgcctcgtgcgtgcagggacaagccagctttggtcactgggcagagagggggaccagggagtgtcaggggcactgtgagctctgaagaatgagcttagaattagggtaggaaacacgagaatgagccccagagagggcatgctgggcacagaagccactccactggctgcacagctacccctgctgggctgtccatgtgtgttgtgctgggcacaggtcccaccaaggctcaccaggatctaggtcttgccctggggtgggcaacctgtgggggggggggtccgctctgagcgtgacaatgaagcacactgctgccagttacagtgagaggaggaaacatgcccctgccatctgcgcagctgcatctggccacccacccgcaccaatggtgaggacgccatcagcgtggctctggcacagcttcactccctgctctgctctattttcatgacttcagacccttgtgctggaatagagactttccccttctttcttcccctgggattgtcacctccctgctagttgggatgctgtctctgtcccccggttctgctgagcagagcacctgggacagtgtgtgggtctaatgagcattgcttccacgatgctttctatttgcctgcagatgaccttgggtacttgtgtgctggtgtttctcaatgtgtgtcctgagctcttggggagttcatagggcaaaggtggcaagtatattgtgcagttatccctaaattattatttccaacagtgtggccccagtgtctaatacaaaactgagctggtagagccctggccctgtgggaaacaaatgtcttttacctttccctgtgtgttcctggaactgagcctctgcaacttccttgccagggccaccaatttccccaggccagcccagtgatgtttttcctggactcatcctctcacctgcattttcttggtggctgtgttaagtccctgcaccttcagggatcccgttggcctcaggagtctggcagtgtttgtttttgctactcacttatttcttggggaatttcccccaagaccctccgttcatttcttcctctcctctctcccttaggagatcaggagagtcaacatccaggtctgtgactccagcctttctcctgtgcaagctccaggcctgttcaggagcttttctgcttgggcctttctccaccatgcacagcccaatctgtctaagccaaactcccaggtgcccaaggtttctgctcccaccaggactcaactccagcttcaggctcagccacccccattcagaccctgtccacagcttccttccaagcatctcgcctcctccacaactcccaactccatggctacccctggcccccacctcaggaggttctgatgaaacccaggcagcacccagcctgccaccacctcccagctccccactcatgcccttctcatgatgatttcacttgagaaatcagaggtgggcaagtggccactgacaagtgcaggatgtgtgcaaagaggaaatactggcagccaggcacagtggctcatgcctgtaatcccagcacattgggaggctgaggtgggtggatcacttgagcttaggagtttgagaccagcctgggcaacatggtgagatcccgtctctacaaagaatacagaaataagctgggcatggtggtatgcacctgtggtcccagctacctgggaggttgaggcaggcagatcgctttagcctgggaagtggtggctgcagtgagctatggttgtaccattgcactccagcctgagtgacagagcaagatgaaaaaaaaaaggaaacattgatgccatggatattgcaagatgttaacccttcatgtgcagcatctgacatgtgcagtacagactctcataatttatcctggattaaaaatttcaacgagtatacatttcaaaaggaaattcctttgtggctacctggacaaggaggtctcttgctgtttcttcggcaccttccactgagccgacagaggtcacttccatcgcccatgggaaatgtgcctactgctcgttttaactcatgcatggatataaaattagttcccatatatcccatctaccaggatcaacgggatttttttctctcactcttttttttcagcatcttcttcactctacacacagcaataaaataagtaaaatgatagcaggaatttacttggaaaaaacaaaacacaaacccttctaggctgtatgatgggtcaggagacacccaggctggattcttcatctgcaaggatgaccctggagatgtgccaaatagagaagtcagtgtttcaggtctgaggagcccagccccagccggcacctgctgagtggtcgcagacatgcggctccagcgttcgagccttgttagatcccctggaaaaacagaaggaggctggttcacatccattcacacaaccccgagacccagaaactcttgaaaaccgaaagttttcacaactcactttgcagcaaatcatgccctgaacagattgatggaaggctctgtgccctcctcacttactgcagacgatgccagtcagcacaggcatcacaggtgctgcccaaggccacagaggctgaaatgcagtgagtggaatggacaccattctgaaagctctgcattcctaggaaaggtaacctcaaggtttggagagaaggcctggtcctgtatccccacttctcacagttaccgcttgttacatggtgtcagatgttcaaggctgccttgtaaaccataaaacaccatgtgaatttttttaatattgagtcaggtgccacccccacaaatgatcctggagtagtgggtcctcccctgccctccgctgtagtaatttactagtgctaggtggtactgggtaaacatccagctcccagaaagccaagtctataaagggaagatactgaagaatgaagccagtgtccaaaggtatgttactaacaaatgatccaactaatattgtatttacactggtcacactggtgttcatcacaaaaagagaaccgtgcatgagatgagctcattggacctccatggacttgtgtcccatagctttgtggctgcccagaccccttctccctggattcagcctttatttttcctgatcattcatcccaaggtaaatacatcttcactcacagagggtcagccagatacttttcaatgtccaccctcctgtttgttgagtttttctctttttaggtatgactgactctcagtaaactgcacatacataacttgtgcgagttgatgacttgtggaatgggtcagcatcgttctccttttccccatgtcatggagtatttgtctgcctctgagtgaggacggggacacacagccctctcagcccacagtcagatttcacccactcctccattgctttacggtccaacaaacagaagaaactcatggcatttacaactcccagccacgtaaatgagatagaacctgccacacagagtctctacctgcaccttccatcccatttaccgtcatccgcattcagaaaggagtgcagctcagccgacaccttgacttcagcccagtgagacccgggctggacttctaacctgcagaacaataagtttgtctgtttgttctgaagagatagggtctcactctgtcgcccaggctggagtgcagtggcacaatcacagtgcactgcagcctcgacctcctaggcttaaggggtcctcccaagtagctgggactgtaagtgtgagccaccacatctggctaatttttaaaaaaaatttaatagagataggatctcaatatgttgcccaggtggttctcaaactcctggtctcaagcaatcctcctgtctcagcctcacaaagtgttgggattatgggcatgagccactgcacccagccagcctgtgggttttttaagccactaagtttgtggtgatttgttacaacagcagccaaagaaaacaaatatactttcaaacacagaactttttagaatgcaatcctttttaaaaatgatgatgagagtggtgatgaagatgatggtgatgatgatggtgatgacagtgatggtgctgatgatagtgaccattgtgatgatggtgataatggtgatggtgataatgaagatgatggtggtgatgaagatgatggtgatgatagtgatcattgtgatggtgataatggtaatggtgataatgaagacgatggtggtgatgaagatgatggtggtgatgaagatgatggggattgtgatgataaagatgatgatggtgatgaagatgttgatggtgataatgaagataatggtgatcataaagatgatgatggtgatggtgatagtagtgatggtaatgatgaagatgatggtgatgatgatagtgataattgtgatggtgataatgaagatgatggtggtgatgaagatgatggtgatgatggtgataatggggattgtgatgataaagatgatgatggtgatgaagatgttgatggtgataataaagataaaggtgatgataaagatggcgatgatggtgatagtgatgaagatgatggtaatgatggtgatgaagatgttgataatgaaaatgatggtggtggtgaagatgatggtggtaatgaagatgatggtggtgatggtgatgacatgaaggagaaagaggagtctcaggaaacaaaacaggaagccttttctttcacaggaaggcagttaaaccaggacagcagtgttgcttcataaataataaaacaccagcctagaacatgttttcaaagcaatttccaaagagtttataggccaccgagataacttttcttagtgagaagaagttcaatgtggctgagtactcctgttggaattagactttacagggataaaactgcagttctcctggcacctgcctgtgaatcaagctttctgtgtctctgtgtctgtgaaactgggattccagtgccccatgcatgctttgggaagctgattccacggtgctggtcaaagtgctgggcacagaggcgttcagtggctctcgagggcttcctggatttcccacacttatttggaggcattttgggaagtgcacttttgggttaagtttttggtaatgagggggctcttatttttgaagcagcacaattcttcagaaagtcataaaataagactctgaaatgctatctgagcatctaaatgttgagttgggtgtggggcagagagtgagcagtgatttaggagaggggaaagagaagaaagaagatgataagaaaagaacaccttgatctgagagctggaacctgctggggctctgaccctcctgaggtcccagttctcatggcactgggccaggcctgaggggtgactggggagagccaccctgtggtgatgtttgagtgggacccaaatgggtgtgtagggttggaaacctagaaatttttattagtgctgactttgatttgaaccttgcttcaccccctcagctgtgtaagctgggaatgccaaatggtgttgggaaggctcagtctctcgatggtgagatgcttgcggtgctgtcgtctgtccagtccaagccaggaaccctggtgaggggcaccgtctctttatgtgctatcaggaaagggctatgctccagctaaactctcttgccagtgttcataagaggcatcttgacttcagaggggttacactgtgaaaaagggttcgtcttgaaattgatgaaatatggtaatcttcatacatatggagtcaaaaactaagtatttagcacaaagtgggtactcaaagagtgctagctccctttccaactctctcccacaaatctacctccatatcctgttttcaggtccctgtctggagatccctttcttggtgttctggaatttcctattgaatgaaagcatgtcacctactgatgaaggggccggtgtccctgtttgcctgggacagccctgccttgtgcctcagatccctgtgttccgctacggcactgacactcactcccaaaggtctctgttgaacataaattataccatggcccaactgacagagtgcagggcactcacaaaccaaagccctggcgagtctgtgcggtggagaaattggggcaagaggaggatcgtcgaaagaacaggccatggggatcagccagggttgagtggggtggggtttcacaccaaccttcaagtgggaagcttgaggaagggaatcagagcacccagtgccaagctctgaggtgagtcggtcaagtccatgatgctgcctcaggttggccctggtggtcacagctccacacgccaagtaaggccatcacagggtgttaatggcgtgagacagactcaagggccctgctgcacctgctcctgtgttgtggcctgcacggggttgtggatgaactgttttgaccaaattagattggcaaacatttaacctcaaatggatgaattcccctcattcccaaatcaccctcaagtttaactgtcttgactcattcaggtgatttttttttttttggtagcacaaaactggaatgttagggtcaaatgtcatcctaatatgctaataaccatccagcccagcagttgccaacatcttgctgatgaattagcctggggggtggggtccagcttccacatctctacatcgcccccagtgatcctctgtgcgtgtggggcggaccccagtctggcctagtgtttctgtagacgtgggtgtgtggagcatctgggagctccagcccaggtcggtgggaccaggaccagaactcaacactaccccacccagctgtccccatggtgtgccagtgggaacgggggtcccacacagagggaggtcactgcgaggtggtcgtgccctcaacagcctcttacagatgaagactaagatctattgggaataatctttattaaaaaaaatactgcttgaacttgaacagggcaaataacatgtaattaggacttaatgactgggtgcagtggctcatacctataaatcccagcactttgggaggccaaggccaggagtttgagaccagcctgagcaacatagggagaactcgtctgtccaaaaataaaacaaaacaaaaggatttaatgatagaaattaagtttgagaaatgtagcaaccccggccattggactggaaagatgaacgagttagccctgttctggcatctcccgggtggactagcaccgaggtgctgtgacaggaagccaaggggacctcactgagaagcggcatcgtctgccctggggatggggtgagggcatgaccacagatctcccccctgcagacttctctcccaggcccgaactgtggcctgtttccactcaaggctgcctggccattatggaaattctttatgtgtggaacacattctcagagaacgtgtgaagtaattacatccaagctgatgggctggttagcaactgaactgatgtgtgtaacacgtatctatgtgattacttttaagaactgggtcttaacctcagacatggtgcttaacaagaaataataaaaccaaaccaattcttagttattttagtcctgggactcagggctgctttcaataaattgtagattgctccaaaaccttgtttctgccattagttccagtattgtccaccttattttttccaggcaacaaagttgtcagttttctgcttctggtcttaaacacccccagcccgctattctacagcgtgcacacaggaaggaaaggatgccgcagaagggagggactgtctctgactgcaggtccacctgaggccaggagactgcccggctcagcctgcaggcttgcatctgacttgcaccgtggctgtcagagctgagagtgtgcgtctgctgagcacgtctgtgctgggcgctgcgctggctgagtgtctgccgtgtggacttgcttctctgcatgctgccttgcgaggtggcctcatcaccccatttaaagacaggaaaaccccgttcatagataggacagtatcaatgacctgccagcatcccatggctaagggcatgttcctcaccatttcagggctcaaagactaccttgctcaaggttatccaaatagtggggaatggaaccaagaatgccacagtctgtgggttgatatgaccctctagtccatgccatatatggtcctcatttgtaaattccttctggggtgaggctgagattattcctgactggttcactttgaacctccccatgtctgtaataggaacaggtgtcacgaacccttcctatgcttgtcactgaaaacccttcccaccggactcttccagcttgtccacaggtgttcctcaagtacctgccatgtgcaggctgcacctgaccccgggtgtgtaggtaccaataaaaggcctggggtctgacttcaggaagctgtagtcttaacattgatgaaaataatctgtgtattaaatagtgtaaaaactaagcacccttggtctgctgtcctggatcagggtgtcctctaataatgagagacctgctggtgaccgagtttgacaattctattcctctgtgtatctgaacatatgcattaaagtcaacaccaaggaacaggaaacgggaaggggaataacgctcccgctgggggaataacgctcccgctggtggaataacactcctgctgaagtgtggccattcacattcggatctcatcctgctggcagcggcgtgttttcatcgaccaggaaacacacaaatatttgtaatcgtttatgctaatacgcaaacattttaaaagcactttgcttctccttaaatttcaaagaaaaatagaagactctggatttttcaaattagaaaatgacccactttcttcttcactgaaactgtttcataaaatactttcacatcctgtgtttcccgccagagtagggactgcgccgcttgtgtgcacccgccgggcactgaggcctcttcagcaggagggaaagtgagagggtgggacacagagtggctcttccagagcctcccacacaccccgggtccaggtgtggccgccgggtctccacacaccccgggtcccggtgcggccgccgccgggtctcctgggctcactgtgactcaggaagcctctttcccactggaactcatcctccataaacctgacagaggctcatgttcgggctcccataagtagacacatgtgtttagtgccttagaatatgagtgccgaatttactaagtgccttcgagtgtgagtgctgaaaggcagtcacctgaaaatttcattttacaaatcaggaaactgaagaatagagaaactaaataacaaagccaagattacaccgttattaaatggatgctttaatgctgagacaggtctcttgggcactagaccactttcctgccctctttttaaaattgttgttgttttaatcgactttttataattttttttttttttgagacagagtctgtctctgtcatccaggctggagtgcagtggcacaatctcaactcactgcaacctccacctcccgggttcaagcaattctcctgcctcagccttccatgtagctgggattacaggtgtgtaccaccatgcccagctaatttttttgattttcagtagagatgggtcttcaccctgttggccaggctggtctcgaactcctggcctcaagtgatccacctgccacagcctcccgacgtgctgggattacaggcatgagctaccacgcctgaccttataataattcttaatatctatattgtgtgccattgtgaaatttttggaaaaaatcaaaagaggaaagaaaaatatttcttcataatctctctaataaactataactactgtgaatattttggcatatttccttcaagagtgttacagatacatattttaatataattgagaatttcacttccatggttttggtttttgcttgttttttgttttgttttggttttgttttgtttttgtttttgagacggagtctcgctctgtcacccaggctggagtgcagtggcatgttcttggctcactgcaacctccccgtcctgtgttcaagtgattctcctgcctcagcctccagagtagctgggattacaggcgcccatcaccatgcctggctgatttttgtatttttagtagagacggggttttgctgtgttggccaggctggtctcgaacttctgacctcaggtgatccacccgcctcagcctcccagagtgctgggattacaggcgtaagccaccatgcctgaccatgtttttttgtttttgtttttgtttttcatttatcattgtatcataaaaatatcttggtcttttcaacatttgtaatatcattttaacggatgaataatttttcatccatgaaaatatatttacttagctatttccctattcttagagcttttatttctatatctaatgtttactgcacattttttaaatggaaagaattaaagatgtatttttaaaattgaaattagatggttaaaatgtatctatattttatctgttcttgacatgtgccacccaactcctttttcagaaaggttttattgatttacagtttaaaacagcacctgattatgattcttcccatgcttcttttgcaatgatgtttttgttatggtaaaatatacataaagtaaaatttaccattttaactattttcacctgtacaattcagtggcattaagtacattcacagtgtcatgcaaccatctccaccatccatctccaaaacttgttcattttctcaaactgaaactctgtattcactaaacaagaactcctcaacccctcccccggcccctggtacccaccgttccactttctgtctttatggatctgatgaccctagggacctcagagaagtgggatcataatatttgtcctcttatatatacaactcatttcccttaacataatatcctcaaggtttacccgtgttgtagcttggatgaatgtccttcacttttagggctgaataataccccgccgtgtatagaccacatgttttttatctgttcttcccctgatgggcactcagcttgcttccaccttctggctgttgggaatagtgctgctatacatgtcagtgtagaaatatccattcaagttcctgcttttgcattacttgagtgtttacctcacgtggaattgtggggtcaaatggtaattctatgtttaattttttgaggaattctcaagctatttcccagtgtggctgaaccattttacattcccactaggagtacacacgagtttcagtctctttacaccctcatgagcccttgttttctggttttctgaggatggccgtcctgaggagtgtgaagtggcatctcatggctcctgtttgcttttgcctaatggctggtgatgttgaacagctcaccatgggctcactctccatctgcacgtcgtctttggagaaatgtctattccaatccttgcttctttgttgttgggtgtaggagtcttacatatgttctagatactcctaatcagatatgtaattttcaaatgttttctctcattctttgggttactttttaactgtttagataatgttttttaatacacagaaggttttaattttgataaagtgcaataaagtgcaatttgtttatttttctttgttgcctgtgcctttagtgtcatactgagaaatcagtgccaaatccagtgtcatgaagcttccccctaagtcttcctagagctttatagtttcatcttgtaaattcagatatttgatcagttttaagttttgtatatgatgtaagttacaggtccagctttattcttttgcaagttgtctgagaaccatttgttgaaaagcctattcttttcctcattgaatggtcttggcacaattgtcaaaaagcatttgtacacaaaagggtttacttctgggctccgttttatagtccattggtctatatgtctgcctttctgccaggaccatgctgttttgattactatagctttgttgtaagtttaaatcagcaagtcttccagttttctttaagactgctttggttgtttgggttcccatgagattccatataaatttttggatgggttgttctatctctgaaaaaatatcaatatttttggtagagattatgttgaatctgtagatcactttgggtagtattaaaagctaacaataatgagccttataatacgtgaagatgggatgtctttccacttatttgtgtcttctttcatttaacaacactttgtagttttcagtgtacatgtccttcacctccttagttaagcctaccctaaatattttattctttcgatgctattgtacatggaattgctttttaaatgtccttttggcattgtttattttagtgtatagaagtacaaatgatttctgtatattgattttataccctgcaactttactaaatttgttaataaattctattaagttctaacagatctcttgtgtaaaatctttatgattttctacctataggatcatatcataagtgaacagaaacaattttatgtcttcttttctcatttagatgccttttacttatttttcttgcctaattcctgtggctggcacctccaatactgtcttgaataacagtggtgaaagcaggcctcctcatattgttcctagtcttaaaggaaaagtcttccatcttttaccctggagtgttacattagctgcagatttttcatatatggcctttattatgttgaggtgattttctgttactcctagtttgttgagcgtttttatcatgaaagagggttgaattttgtcagatgctttttctggatcagttgagatgatgatatgggtcctttccttcattctgttagtggggtgtattgcgtttattattttttatgtgttgaaccattcttgcattctaggaatacatcccacttggtcatggtacagcaatcgttttaatatgcttctgaacttccgaattttgtctactagtattttgtcgaagattttttgcatcagtatttataagggatactggttcttagttttgtttgcttgtagtgtctgtctggctttcgtgtcagagtaatgctggactcacaggattagttagaaattgtttcctcttcaatattttggaaaagtttgaggaggagtggtgctaatccttctttaaatgtttggtaaaatttatccatcaaaccagtgactgcaggattttctttgggaggtttttgactacggtttcagtctccttactcactcctggtggggtcggttttctagttcttcatgactcagtctcagtaggttgcgtatttctaggaattttcccatttcttgtgttatcctgtttgtaggtgtgcaaatgctcatcacactcacttataatccttttcactttgtaccatcaaataataattattaatagtaatagataaataaaaagaatacaataatactatttaaaagtattaattgatgatttattttgaatcttgtatctgttgtgtgtaccatcagtgtttttcttagggattatttggccataatgctctgatcgcattttgattccatggatatgcttctctttaaacatctcatcctcttactgtacccctccttaatttatggaattcacccccccagggattaatacttaagtcctagatgccaaaaatacgtgtctcctaagctcacagttaggatgcactgttgctgtggagaggggatgggggttggtacagggtgctgcagattctgggaagtgcacatcagatgaatttgtggggacttatagtcaccttgggtgactcttgtcccctgctctagagtaacagtgggctctcaggtgcaagtgcttgagctgtttattaacccttctgaacctctctgagccatggaggtcaaatgtatttccatttcccaagtggccattcgctcatgtggttctgatgttgggtaggacctttccttcccttttccttcttactctctaggtgtccaccattcaaaacagaatgggctcagatgcaggttttcatagtggcatgagccaggcattctagcaaggttgcagatttaaatgaaccctttacttggtggcaattgaaacaacttctttttgtaaattccaaacatgaattagtcacacaaatgaattccaactcacaggctaagaaaccaaaagcagtcaggccttctgtgtaacagtttatcctctgggaaagtgaggttcccaccatgacccctgaaacttgattcctctgtgggcccttgattctggtggccatgcatggattggacattccctagggaggagggcagccctgtcttggcatcactctgtcagtccttcccctggggagcactggcagctctgaaccagctgcttttgttcactgtgtgcaggctgatgcccacgcaagaaatagcaactggtagacccaaagagggctagggatagccagtcaattgttgagtgcacattgagtcgaacagattcatttgtgtctgaggatttttcagcatttcttcagccagggacccagcctcttctggtagagtcacagactgggactggctcgcagccttgtttagtctaacttaggtaaaaccctctcggtagacacctgtgtccacacaccaaatgaacccagatgtggaccggagcgatcacggctacagcagcagcccagcctccccctccagatgtgctccacgtctcttgctgtctccaacacgtcagggagccaaccctgtgtcttctgctccctcacagccctgggcatgcagataacacactgtgaatgttcttaccttaaaccagccgtccctaggcttttctcatcaaacagccataaacaacagtgtactaaatgccagcacgtaggaagaataaaatctcatccaaacacaagagaaacacatcctagtttcagcagcacacgaatggcctggggcagtgtcccagcagctgacatcctgatgagaaaacgcacctgtcagaatgtgcgggtttctcccttggtctcctgggttccttccaacctctgactctctttagaaatatgcaaaggctacgtattattggaaatcgcaccaatttgggggttttctcagatgcactatttgagactctcctgacctccacgtatgaagacccagagctgggtgcaaactgttccacacccctgggctaatgaagggatgggaatgcagagcccaggcaaaccccgcagggtgtccgccctagcaccctgcggggctgagctgcggtgccgccttgccctccttgtctttctcttctgagctgtgccctgccacttaaaaccacaatggttgggagttgtctgaagaagagagttgatcctggagagcatttcttcaaatgcttggataaccctcctgctgtgtgctgtctggaagcagacgcaggtgcagaattgaggagttgcttctctcaggggatctgtgatgggcctgcggtgctttcccaggttttgccttcagagaagttgaaatggcttaaaaattactggtaagccctcccctggctgctgatgagacctagaaatagctcccacccagggggatgtgagcccggctcagcattctagataggtctcccagctgcaaggaattccatgcatcacaaacatgatggtaccctcccctgtgttccttggaattgcttttctccaccaaattacctgtgatccagcacaaatatagagtatgtttggcaaaaagaggtagcttaatcagcagtgaagagatgtgcctggatagaaaattcgcagctacaccaagctgctttttagtgtgaggcacaaatccagcattcgtgtgtgctgctcctggtacctgggatggccggtggatccgtctttctggactgcatctccagggggctccttggggacggtgagaggcacactggcccagcaccctccaccccacccgcttcactcccacactacccagaaacaaactaggaagtggcattttgtaaaaacaaaaagattgccagcaatttctaaatttttaaattttaagtctagtatttcggtttattattcttttaatttatcttaaaaaataattttgcaggagtaaatagaaatgatgaccaaaaaacatatgagatacttaaacacctcacctgatttggttctaaagataccagaaagaacttctgtgctttccctcccaggacactcaactgcatgggagaggccacccccacttccacccctgaaaagggggtttctggggctcggcagggaggcggggcctcgctctggggtctggagctgtactgcaggccttaatatcaccccggctgagaccactcctctcacacaggcaccacaacccacaccacacacacacaccacacacagtacacaggcaccacccacatagacacacatgcagagactacacacaccacacagcacacgtgcaccacacacacacaccacacacagtacacaggcaccacccacatagacacacatgcagagactacacacaccacacagcacacgtgcaccacacacacaccacacagcacacacagtacacaggcaccacccacatagacacacatgcagagactacacacaccacacagcacacgtgcaccacacacaccacacagcacacacacagtacacgggtaccacccacatagacacacatgcagagattacacacaccacacagcacacacagtacacaggcaccacccacatggacacacatgcagagactacacacaccacacagcacacatgtaccacacacaccacacagcacacacagtacacaggcaccacccacatggacacacatacagagactacacacaccacacagcacacgtgcaccacacacaccacagatctaggaatgcttctggaactttcactttttagtcaggaaactggaagtggctctgcctgttgcagcctcagatacgaacctgaacacctgaagctcttggaacggcctttccagagagttctgtggaagagactctaacacacatgcatcttcaagcgtttgtgcattccatggtgagggaaaggagagaatatttaaaccagcgatttctgcttcgaaatgcggatttgcttacatttctccagcaccgctcttatgccctcattcctttctcggtcgccctcaccctcaggagggatcctttggccatgtattccactcttaaccccagcttccaccagctgccccgggtctgagtcctcagacttggccctcctgtcccccaactgctctgatgatgcagctctgaaaaaatgagatgtctgtgaggggtgaggtgtctcctgtccagagagtgtccaagcagggcagtgtcaggatgtcatagaagtctttagggacaccggacctccagccatgtggatccaggttgcagggcagcacagacagcagccggcagcaaaggcacccgtgccagcagcctcatggtgtgaagaaggtgggcaggtggtgacgggcactccgctgtatcctgggaggacactctccatgccacccaggccgttccctctgtgcccggggagtgccgccagcccctgctcctgagttcccactgtgctcggggagtgctgccagcccctgctcccacgtctccatccatctgcctcgtgcactccagagacacaggccctaggaaggaggcttctcacacccggctctcctgtccttcccgaaagctcatcacatattgaacacggagccctccccagagctgctggggactctgtgcaagctgcacacgggtacagtcaacatggtgcatgcacaggacccccagatgtcgctgaggacttctcgagccagagggctcaccccgtgggtccggtggttcctggcactggacggctcaccctgtggtcaggtggttcctggcactggacagctcaccctgtggtcaggtggctcctggaactggatagctcaccctgtgggccaatggaggccgtccccttcactgtgtgcatggctttctcccacctgccgtgctgacgtctcggtgatggacatcttcacgtcctggagagggaagtctctgtgatatgaagtctgctgtacccagggacactgtgaatgtttccacctgaaagcaagcaagtgtgttcagagcattcggtggtctgggtttgagcatcacctttatttcccctggggttcctgtcccctggcaggcaggcctgtgcacacctacccccaagtctgagggaaccaagaggcctgagaaagaggctgacagacccagtttctcagaaggaaacatttactagagatacaggaacagaagccacacctgtgtctccatggcgtgagatgagatgatggctccctcacccctagacccacagctctgcaccacaggggaggggctgctcagggagccagcctatcacctacccacgttccaccacggagtcagcgtctccctccccaccctcgcctgtctccctgtgtcccccaccccgtctcaggcatgcacactacccaccctcgcctgtctccccccgtgtcccccaccccgtctcagggatgcacactacccacccttgcctgtcccaccctcgcctgtctcccttcgtgtcccccaccctgtctcaggcgtgcacactaccccaggttcctcccacccatccctgcaccgggcactcttccactcttcactcctcctaagttgtcctgcggggttcggccccatcgcccgcgtctggcgaggctagctgcacattctgtggggggctctggggggctcccagggcctggactccctgcccagcccgagaggcttcatggtgcagccttgactcttttcttgggtgagcctggcctccccgcagggtgtgcagaaacagacacagaacaaggagagcaggcacctggagctagactgtgagcttgggaggaagatgggcagcgaacgcagtgcggggcgcaggctggagacgtgagggggcatcagagcagcaggatcagccggcagttgtggcaggtgcagcaggagtgagtgggcgcccaggccagacaggcggggccaatgaagagaggggggcagccagccagtccctgccaaccatggctgactcactggcatccactgccggactcaggccccacctgatcagaggacaaacaaatcagatggagcagggccatggtcagggaagatggtgggaggtggatcctgagacggtgttgcagtccggcaggagggacgcacagcagctaatgtcactggcagtgcctgaggcctgaagactgcggaagcggagggacgttagcccgtgattctgatcacgggaacatcgtttagtaaggcgtttcccttttcacccggtgttgagatgttgatgcagtgcacctgtccactttgctgcagtggaaggggggtcccagagaccgtgatggagccccatgggaccctcctgttgacagactgtgaaggccttagtcccttcctatgagcatcagcagcgcctccggggactgaaggtgccaatagggaagatggaaaggggtgtgtgcaccgggcgctgttcccaggacacagcctgtccagttctcttcgctgttcttacacatccccagtcatatgttaattgttgtgagtgtcctttttttttaaccaaataatctttgcaaggagtaaaattcaaattttctgaaggttttgattaaaagagcttttgcagtaaaagtttcagataacagatcatccttctctgaaccgtattagagtggatattcatatgcgtttcatccttgtctctgagagtgaggctggttggtcaggggacggcacctggggcatgggagggtttcctgggttggggtcctgccaggagtacgtgctctcaagagtagggtgtgggcagcaggtaagataaagctgtgttggatgaaatcaaactaaaacaaatgaaggtcaaccagctgggaatattgctagtgaagaactagcaaactcaatggaaaccttctttaatttttattttgttaataatagaggagccactctcttatagggaatggccacccgccatcaccatagctcatctgcccaacacatctgcacctgacttccgcgtctgcacctcactttcctggttcagtacacagtacttcatgcaaagagccgtttgccaacatcacagcttccagcatccgatatggaaagaaggcgctttcactccacgcagaccttgcttgtcttttctgtagaatagttgtagaggataagcctgctccatgggtgaggcggctgcacagcaatggcagattttgttgtcaccaccagaagcagaaatcacaaataacaaaggaatctagagacgtcagagaaatgggaggtcatagagcaaaaataccacccaaataccgacaaaaataacccattacatatctgaacattttagagcaggacaagaccagcagtgagcatttgacccacccaaataccaacaaaaataacccattacatatctgaacattttagagcaggacaggaccagcagtgagcattcgacccacccaaataccaacaaaaataacccattatgcatctgaacattttagagcaggacgggaccagcagtgagcatttgacctggcacaacctccgttcactcagaaacgcctgcgggtttgtatttcccaccaggcgtttgctaggtttggaattttcaaggtgagacaattggaccctttcccttacagagctttatgatctcacaggaagattaacatgcacacagatactgaacacacaagaacagtgtttccattgagatatacacaccatgtggcattaaatgtttaatctgtcataacacaaactttaaagttttattttaaatttttttaccaagatattttttacaagttggtgatgcacaagctaaataaaaagcatctcaacccaagatctcaggactgtgattcaagtacaacctttataactttcctgccaacttcaacttaatgagtcagatagttgcaagctggaggcttaaagaagcctgaattgtttgaggagaccctgaggagcctcggaacttgcccggccccaggaagtgaatcatcagtgcctgggaaacatctggaaatggaaccctgttcggccctctccagtcacagtgcttaatcattcatttattgatttcaaataaatttactgtttgtggagctatagagcaggagacttttatcaagtaggagagtcccgtctagatagtaaacaattaccacttgttcctaagggtcttggaatatgggcctgtattagtccattcgtatactgctatgaagaaatacctgagactgagatggcctgggcaggctgtcctgcagcaagcatggcattgactcagccgccagtgtctgagcccctcaatgatgttcaactccatgcttagtgatgccttcagtaaatatttattattccaggcactgtgctgggtagcacaaagaggaataaactcctgtccatgttctcaacaattttataatctagagaggcaaataaatagggaatagatgaatgaaacaaaactaaattgagggagtctttttaaaaaattgagataaaattaacatagcataaaattaaccacttaaaaatgaacaattcagtggcacttggtacattcacaacattgtgcaactgccacctgtatgtaacattttcaccatcccaaaatgcatcattttactttcaactttggatcctacgtgagtccctaaccgacagcatatatcccttatcttacatacaaagtataccttatcttaaatgcttgggacagaggtatttcagattttggatcttttcaaattttggaacatttgtggtcatctcatatatgcagatgattggttctaagacacccgccccctgcaatgtgtaccaaaattcacgcatactcaagtctcaaagttggccctgcagaacccacatttataaaagtcagctctccgtatacatgggttttgaatcccacgagtactatattttcaattcacatttggttgaaaaaaatctgcatataagtggacctgcatgattcaaacacatcttgttttaaggccaaccggactcaccagttgagcttccataatccaaaaatatgaaatccaaaatacttcaatgggcatttattttgaacatcatgtaggcactcaaaaattttcagattttggagcattttagattttggacttttggattagggatattcaacccgtagttggtcatacttttaaaaatgtattctgtcagtctctcttttaattggtgagtttgatcccttttcatttacagtaatttctgttaaggaaggatttacttctgccactttgctgctggtttctgtatgtcttacaccttttttcctcctcagttcctcaaatattgcctttttttgtttctttgatttaatttttagtgtactgttttgattcccttctcattttcttttcctgcacatttctttttgttattttcttagtggttaccatgggaattacaattaacaccccacatttatcacaatgtagtttgaatttataccaacttagcttcaaaagcacacaaaaactgcttctgaatagcttccttcccagctttatgttgttattgtcacaaattatctcttcctacattgtatgctgttaacatagatttataattattgttttatgcatttgtcttttaaatcatatagaagacaaaaggaggagatacaaaccaaagctacaatactgggttttatatttacctatgtagttaattttactgaagttctttattttcttgtatggcttctggttactgtttagaatttcagcctcaatgacctgcatttcagcctgtcacctttagcatttcttacagagcttgtctactagtgacaaactccctcagcttttgcttctaaggggatgtcttaattttggcttcattttcaaaggatagttttgcctgatacagaattattggttgacagttatttttctttcagcacattaaatacatcatcccactgccttcaggcctccatggtttctggtgaaaaactgctgttgatcttattgacgatctcaagtacaagatgaattgcctctctcttgctgctttcaaatttctgtctttggcttttgatggtttgatgataatatgtcagcatggatctctttgaatcaattctacttggagttagttgagcttcttggatatgtatattcatgtctttcatcaaatttgggatagtattggtcagtataactctatacatgatttcgtcagcttcctcctggaaagccagtctcgcccaaaggtgctaaaacagggttcctctttgcactggtttctcaaggaaccaccagacagctcaaaacacacagccacagttttttgaaaacaagatccatactgccccctggtaccaccacatctcaccaggaacttaggccaccaatcctgtagctgctgttgaactggggaatggggaataataggtgggcaagcaaaaaccacagaatgtcttttaaccaaaatttagcattctctttctcaatttagcaccccctggttactgctgatttttaaaattagactacagaatcccagaacagtcacttctgtccatttttgtcagcttacttgttacttcagtggagggacagatccttggagccacctgctctgtgatttccatgtcactactcgacctgatggagtctttggcccacttggaagaagtacccctttgacagaccttttcgcatcctgcccacatcccagttgcccaccctgtgcctcccttcagctctgcagggcagctcccatctatgctgatggctccagccttaagcacctgccttggtctgtctgagctaagcagcacactagcccacacccagggcaggccagggctgctcaggagttcacctcttcagagagcaagggatgggagtcaatggatagagacccctgattctttgaccctcagacgattcaaggcacatcccacatgcctctcagagggtctccggcagtgtcgggccccggccgtccacactggtggtttgtgcatgtacttcatggcttccgcccttctcaggcttactgtcccgttctctcacttggcttctgggatcatcctccaaataaattacttgtacccacatccttactgcaggatgtgattttgtggacaaaagtaacctctgccttaattcttcaaagtgttgaatcccacagtggtgacaccatccctgtggctgctggcctaactgatgtaaatggctcagtccacagggcccttacacagatggcccaggcagccggtggaggatcatcctgttcctgcaagcttacgtgccctcaggagctgctgtgggccttcacatctgggctgcatgctgataacaaagcctctcacttgtttccagatgcatcaacatggtgacatgcagagtctttattttgggacaaaaataggcatccatgaaatggtgtgaacaaataactattcttggcctcagtgatttcattcagtgcataaacagtatttttcctgctgaatttccaggattgaggaaactcttgtctctcaggaccagctggattttacttttttttttttagtgtcttctcaaacgcagaaagagctacaaaactcccatgaggcatgggccagctgaagaggcttcagacagttgctttggttgtttcacaagactagaaaagtgtggttgcttcttgcctccagaccgtattatcctgcctcaccatcagctgtttctgccacctcaagacaagaggcaaagtgggaaagagaagtttgaaaccaggagcttctaagtttgcctgagtcttcaagggccagattaggaatctttagccaccaggctcacactgtcggaactgagaggtgggacagctgaacagaaaggcagaatcttccagaacctggactgggcccagcaagcagggtagggatgtccaggaagggggaaggcacccagcttggctcctgagaatgccccagctgttggtgacccgtcgtctgatgggacaactgaagccaggaagtggtgtggctggacttgctctttaggaagcagactttgtggaggtgggaaggcggcattgtccaagctggaggcggcattgtccaagctggaggtggcattgtccaagctggaggtggcatcatccaagttggaggtgacatcgtccaagctggaggcggcatcgtccaagctggaggcggcatcgtctgacttggaggcggcatcgtccaagctggaggcgccattgtctgaggtggaggcgacattgtccaagttggaggtggcattgttcgagttggaggcgccattgtccgagttggagacggctttgtctgagttgggaacggcaggttcaggggccaggtcactgagcgggagaagagtgaatgggttggagaaacatccacggggaaagatacattgatttgtcagacgccaggatggaggagcagtaggatggaagggccttcagaggcaggcggggggtcttcgggacacacggggtcagtgtgcccatgggggttggccgggagcagctagcaggcggaggctgtgagtctggaaggagaacccagtgcaggtggggatgtggctgctgcgaatgggtggggttgaaaccatgagggctcatgaggtcactctggcaggaggtgcctggggagggaggagtcagccctgaacacccagcactggggcctccgcatccctgcacggatccctgctctgtctctgacctctcaccgtgttcctcccacactaaacacatctccatctcacacaggggctggtccgaggcctgactcggtgagagcaggaaaatgggtagagaggcagagtgctccagctggagcagatgagcgatcatggtggggtcacagcactgggagctgcacaggctccattcggcacggtgtttatttcagagtctctgtttactgtataaatactaggcaggattcaggagttgtggactgtggactgtgtagtctgtgttgtagacaatgcctgccccccaagaagcatgctgcttcccagctgatgagcaagggcagagctggccaggtgcggctgcctgtcccaacagccccttggcttagagaagagaggggcacagctctcatccatgcacgtggacctgctggacagtggtcactggcctggtgactaaaaacaactcccttctcaggacttttgcctctattttggtgttccagcctctgtggacatagtttgaccctcttaagactatttctaatcaacatgtctagggatgcttctgatttaaatgttatgctttcaaacaattattatatttgcagcagtgcggatgcttgcaggaagctttttccatgaaacttttttaaaaagaagaattttccaatagatccttttctcacaaacttaggtttctctcgataaacacatatttgtgccacttaacacattaattcaaatgaattgctctaccctgcattgtattgattccaaggttcagtcagtggtgggagtggtaccgcccccgcttgggtggtgggctccactgaccgagactgctgggccgtgtgttggttaagctggacatgaccgtgggggcaggctggcgttcgcgacgaaccatgctcaatctttgtcaaatgccgttagaatccttttctgtggcaaggaaagagagttccgccttccttccctgtgaaggtgtttgctgcatgaaggccgggcatctggagcctgtcctgggctcggagtgtctgtaattgaagtgatagcagcttttgatacttactggaaatgtcaaatgaagcccagtgctcccttagaaacattggtttaaaacccttacaacgtggagaaaagtggcagaggaagaacaagattgtctgaatggatttagttaaaaacacataaaaagatgaactaccagaaaaataatagggagtcaaaacagatacaaaaacactaaaaggggatggtgtagtgatcaacttgacccttagacacctgcggcctctgtgaacttccatcttcctgaaaggagacaggagcttgacccagggaggctgagccgggccttccatggaatggcacttcctcagcagaggaggcgggggcttcggtgtcctagaggggccttggcgtcagggtagggagcgcttggcctctgggagctttggcatctggggaggacttcagtatcctgggggtggggggcttccttggcatcttgggagggggtttcagcatttgtggaggactcagtctggggatcctccatgttgagggagtctgggcatctggggtgggtgtcttggtgtccagggcctcctcggaaccaacaggtccaggagcagggatggggcggaggtgggggctgaagctggtgctgtgctgagccagcagatgcttcctgtggagacattgttggatttcaagggcaggaagtgattctgttggctgtcactgaatttaaagggtgtagcctttgtctaagtcggccattcagaaaggaccgtctggggcatgggagggggcatgggaagtccctgagaccctctgggggtccgcagagtaagacattttcctagcaaagccccaaagttctttgcctgtttatcctctggtgagattctgcatcgcttccccaggctgtgagatgtgcgaggatgcggcttcgaggctagtggaatgtgtgttgtgtgttcttgggtctcgagaactcctcctttgaattttggagcagtgaatagtggtagctacagttatgaatgcaaaggcttcctggggccaaatttttaagcctgaagatgctgggagcaccaggcccggccctcctgctgtgcacacctgctgcccatcacagagctcggctcttgcagatcctcgtcaagtgagggcatggaaatgccagggatgggagacggtgtgtttgactttgggagtgaagcatggagacccagggcccagttaggccacagtgattcaggctacgcagatgaaggtggctggggtggcaccagtgggaatgaaaaggaaggacaaggttgagcccctgccactgcctgtcatcagagatggcaggaggatgactgataaccaagccctccttcctagaaaaggtgggggcagttctccgtgagcacagggttgtgggggtgtgatctggggaaagacagtgagggactgggaggggatacacatcatttttagacacttgcgatgtacaggtgaacgcggagaagttggggtctggagctggtggagtcatattccaccagctcccagtctcaatgagaggattctctgatcatcgctcctgcttgacatctgaaaaagaactcatttgcatacttcccaagagtattaccccagcagcattttgtgtctgtaaagatataaacattctgtgggagcattttcaggacattcgctgaggctgcctgactccccacaccaacacctgctgtgcagtcagaagtcacagtgaggtgacacgcagccctcagatgcgggagcaaaactagggtgaaggctgaggaccccaccgtgggctctgagctgggagcggccaggggccaggtgctgcttttgtggtgcctcaagatcacctcctctggaaaggcgtgccgaggactcccgtgtgtggagggtgggccgaggacccctgtgtgtggagggtgggccgaggacccctgtgtgtggagggtgggccgaggacccctgtgcgtgtggaaggcatgctgaggaccctcgtgtgtggagggtaggccaaggactcccatgagtgaaggtgcactgcagacccccatgtgtggagggtgggccgaggacccccgtgtgcgaaggtgtgctaaggacccccatatttgaaggtgtgctggggacccccgtgtgtggagggtgtgccgtggacccctgtgtgttgctgcaggggaccaaccacttagcaaaagtcctgcagagagcgctgtgtcctgtgaggagatgggcactcagcctggccacacagtgaggcttgagcatggagattaggtggtgaaggtgggcagaggcctctgggagggctattgggagggagaccttggcagcagctggccacatgctgaccccactccatgcagagcccagcatagggagtgtggctggctctgggagacctgcactttcaggatggtcctagccctgataaaaattacagagatcttttatacacatgcatggacgtatgtccctgcacagatggccaggagcccctctctgctaactcttacacagtggcttgctgtggctgctctggtttcaagtacccagagacctgggtctactgaagaatcgcttgcagtgtcatgggggagggagttagatttgcagtgtcacggaggggggagggggttatatttgcagtgtcatggtggggaggatgttagatttgcagtgtcatgggggagggtgttagatttgcagtgtcatgattgagagggtgttagatttgcagtgtcacaggggagggtgtcagatttgcagtgtcgtggtggggagggtgttagatttgcagtgtcacaggggagagtgttagatttgcagtgtcgtggtggggagggtgttagatttgcagtgtcatggtggggagggtgttagatttgcagtgtcatgggggagagtgttagatttgcagtgtcgtggtggggagggtgttagatttgcagtgtcgtggtggggagggtgttagatttgcagtgtcacgggggagggtgttagatttgcagtgtcacgggggagggtgttagatttgcagtgtcacgggggagagtgttagatttgcagtgtcgtggtggggagggtgttagatttgcagtgtcacgggggagagtgttagatttgcagtgtcacgggggagagtgttagatttgcagtgtcgtggtggggagggtgttagatttgcagtgtcacgggggggtgttagatttgcagtgtcatgggggggcgttagatttgcagtgttgtgggggagagtgttagatttgcagtgtcactgtggggagggcattagatttgcagtgtcatgggggagggtgtttgatttgcagtgtcatggtggggagggtgtcagatttgcagtgtcatggggcagggcgttagatttgcagtgtcacgggggggcgttagatttgcagtgtcttcggggagagtgttagatttgcagtgtcacggtggggagggtgttagatttgcagtgtcacaggtgagggtgatagatttgcagtgtcactggggagggtgttagatttgcagtgtcacaggggagggcgttagatttgcagtgtcacaggggagggtatgagatttgcagtgtcaagggggagggtgttagatttgcagtgtcacaggagagggcattagatttgcagtgtcacaggggagggcattagatttctgtaacagtgagaatttctaggcttcttcatttcttaatttcagtatttcaatgtcacagagtcaactgtttataactttgcctcttgatggcacaaaaaagagtttgctttgaaagtaaggagcacagaccttataaaatttaataataacactaggaaggggagagaaaagaatctgcactgaggcttcagaaaggagccggggctgagttataaccaagttctgaacaccaccatcgctgacagaccactagatgggaactctgaggatgatgcccagaaggaaatgtgcagagaacatgtccctcaggacctggactggaactcttgacaggggctcatggtcataccaacgggggcctctctgctctcaactgcccatgcagcgacgccttcctccactcaggtcctccctgctctctgctgcccatgcggcgacaccttccaggacctgggtactccctgctcttccccgcctgtgcagtgataccttcctggacctgcttagttcattcaggaagcattgcctccactctgctctgtgctgaggtctcacaggccagagacctgtggcatttgtagacacatacgtagcaaccttctccttctcgggtgcccagtacccagccaaatgcacctatccaagggcctagcaaaaccaactgctaggcaaacacatcttaaaagccctggtattaacacaggttgtaagatatgccagagggaagctggactgaggagttctgaggccaactctgtctgtctggtgctgagtttcagtagacactggacgatggggttgaggcctcagggcctcacctttgctaacccaacattatgggttttggcaaattaggttcatatgcagatgatggccccactggggatgtggctgtgtccacagggtgaatcctggcacttggtgagctccacccacaacacacagcactgagagtgacctggtctgcagatggctgtccagctctcctctcctgcagccagaggcctggtctctagagcagctctgttctagcactttctgtggcaacagaatggcccacatgtgtgctgtcctgcaggacagccaccagcccctgtggccgctcagtgatggaaaccttgctagtgagacaggagacctgcgtgctttattttatcttattgtaattcagaatttggatactggaaacctcgctattgaggtggggacctgcgtgctttacttaactttatctgactgtaattcagaatttgcgtgctggaaaccttgctattgaggtggggacctgcgtgctttgctttactgtatctgactgtaattcggaatttgggtgctggaaaccttgctgttgaggtggggacctgcatgctttactttactttatctgactgtaattcggaatttgggtgtgagttgatgtggctgccaccatgcacaaggcactgcaggggctcgtagcccgtgtggatcatggacaagaagtttgctctgatgctcccaaagagccccactccttacttcagcactgatatgagcatcttgacaccggcaggttgttttctgtgggccactccggtagatttaaaaccctcccttttactgccagggttggatcatcctacataagcaccaacaccccaaagggtggttctttttactcaaaaacaatcatgcttagtgtactacaaggacaatgtatctttgatattaaagagaatttttggaaaagagcttcctcaaatctcatcagtttaatgcaacttaaacacgtcacatttaatttgtctatgtggtaagactaatagtaaaaattgaggtcttcagtgcaaagcagatctgggttcacatcttgcctttgggtgttgttgtgtgaccctgagcagacaggcagcctccctgggcctctccttcccatctgcagagggtgggcagtggtctgcacgtggcatggctgggcctgcaggtctgcttatagtgtctacccctcacatccggccctctcctgtgtccctgctgagcagcagctcaagaacctttcagcaggatccccagggcagaagcaggtgcctctgagagctggcagggatgacactgcaggcatgtgcagctgtcccatggctgacgctcctgtgcgatgtctcccctgcatctccactgcagttcagatgtaatttccaaccagtgggtgctgcagtttttctgagacagccaactattcaaagcaaaggaaacctttcataaagtgtaatctgtgcgtgcatttggcagcaccatgcggggggcccacttcgaggtgacctcctctcaccagagcactgtgccctgcagtgggtggctcttagctttgaacagccggggttcacattgtgcagaaaaacatacttagatggccccaccatgcactctgcttcagatctgagtggctccgcatgccacattgcttctaatttccagcttgacattgtcaaaggaaaataaaacaacagagagagagatggggaacatgtcacatagtcacgaagattcccatcacaggggttgcaaatggtgctactgaacagactgtcctggggctcacgtcactaggcacaaggggatgggtgacgagcagattgcagatacgcaggactgttcagacagactctgtggtgtctttgtaaatatgaatccattcatccttttctagctctttaggccaacaggcagttggcctttccaggccccggctcaagccaaaactcagagaggccgcacccgctctcagcagctggtgagagtccggggcagaacctttgcactgaagagcccctgcctggctttttaagcggcttctcctgggtgggaaaggtggagcggccgcactcgggagcgctattgtgagagacatgaagccacaccgcacacggctttattctctcatccgatgctgagtgtcttctctgtgcctgacaacagcggcttagtagtagctgatgcgatctgctccagacatcaagggcttgcctattcccgcacctttcatttcttcagtgaattgctccagtccccacgtgctcagttagacggaaattctgtatccaccttcaaaaccttcctcttcctttccccagcacagcttactttgggtaaataagcaaaagctgtttttctaggtggtccagccccgtgtggacctttactcacctatgtgtgccagctgcaagttcacgtggtcactcgggctaaggacccaccacagccatgctcacggcaagttccaggtgcccagatgcagaaggagcataaagatattgtcagacccacggtgttcaggggtccggagggcttcccagagaaggtggcccaggccaagtctgggagatgaagagaaattgccccagtgaagggggttgacatgcgggtgagaggggcaggcagaaagacattctacaagagaaaaaatactttttacagaatattgcagaaagaatactttttacagatgagaaagaggctatgtttaggaaaattcccatgactggccatggcggaaagacaggggagaggtgggaaaatggcatgaatgaccgaaaggatggcctcatacactccctgcgaacttgaaaattctccagagggcatgaggagcctctgaagagctttgcacagggctgcacatgtgttcagacctgcactgtagaaccccaccctggcttccgagtggaggagacacgggaggtgtcagacctgcactgtagacccccaccctggcttccgagtggaagagacacgggaggtgtcagacctgcactgtagaaccccaccctggcttccgagtggaggagacacgggaggtgtccgacctgcactgtagacccccaccctggcttccgagtggaggagacactagaagtgagattgagtggtgctcgggagaacagggagaggtggtgggaatccaggagacagaggtgcctccgtggaagagaaacaggtggggtggccagagagctacagggaggatgctcgcggggcctggtggagtgagggacacaggcagaggggaggaatgagcccagtagagtctggtttgggatgtcgtgtgaacgtgacaggggcacagagcccataatcgatagcatctcgtcacctcaagaaagcagagagcttcggctcagtcagtctcagtcttctctaactagttgaggcaaaatcaattcagacctccagtggcagcagtgaagctcagtgagaaaaaattcaagcatcttgtactagagaaccatggcagggagggaaagtggggagaatgtgtctgcatttgctgtagtcatacacctacgatcggttcactttcggattgcgaagcacacaggacagaatggcgttgctgcaccatgaggatggctagacccccctgagggagcgacacagatgctgaagatgtctaaaccccccctgagggagcgacacagatgctgaggatggctagacacccctgagggagcgacacagatgctgaggatggctagacccccctgagggagcgacacagatgctgaggatggctagacccccctgagggagcgacacagatgctgaggatggctagacccccctgagggagtgacacagatgctgaggatggctagacccccctgagggagtgacacagatgccgatgcctcccagggagctccaattttaaaagcaaggagtggactgtcaccaggttcctgtgatgtacccgccaatgttcatcttgcagtccaaaattgctaaacatgttaagaaacaggacattaggacccataaagaagagaaaagaaagtcccaatgatacagacactgaaatcaaccagacaaggacttaacaacaattccagatctgttcaagaacgtaaagggaaagacggagaagaggggacacgtgggaacctcagcagaaagatggaggccgtgcagaagaaccacgtgtagattttagaaaggagagcttgtaagatgggaaattcactgcatgggctttacagcggatcagagactgcagaagaatgaattggcaaacttggaacagatgcacagaaatgatcgcatctgaaggacagagaaaaatgccagaaacaaaaaagagcccaggtggcctctaggacaaagtcaagtggtctgacccacgtgacagttccagaagatgagccaagaaaggtgggacacaaaaaaagaagaattaatattcaaaaccagcaaccctacccaccctccacctggtgaaaaagaagaagctcagagaaccccaagcaagttaagtgcaaagaaaattaacataagcacatttgtagtcaaattgctaaaataccaaagatagaaaatcttaacagctgggaggagagacgttacattcccaggagcaatgatatgcatgaggactgacttcattcttcactagaaacagcagaaaccaggagacaatttgacaactctttaaggttctgcaagggagaaaacaaaagcccagagttctatctccagcaaaaacatgtttcagcataagggtgaaagaaacctgctttcgtgccagcccatcccgagagaatctgccatgttagacctgcactgtacaaaatgctgcggacctcttctgactgatgggaaatcacagcagttggagacccaggtccacaggaaggatgaagaacccaagaaatggcagcagactgagagcttctggaggaagtgagacagccctgcaggctctgggaagcaggaggtccaaggccggatgctttgctcatcatcgccaagtgaagagtccctgtggcagagcaaagatcaggtcagagtggaaattaaacaaatgtgattcttttaaacaagtaaaaattgaagtggagtgttctatactatagtgggaaaaaattctacaagccagaggcttccagtcaaatgtgcaaatgctatcgaggtgagccgatgtgccagttgactcatactggttcagattttctttccctctctctgctcccatggctttgttgaaggcgcataaaagataagttgcccacacttggcatctgtagccatgaatactgaaatcttctcacattggaaattctttatgttaaagtcaaatcaattcttagtactacttgattcagataagaatcattgatgctaaaatgagcggccgatattctggagaaccacagaatagctctcaccacaagataggatcagaagaaaacagcattcacggtgcagaaaccaggcaggcagcgcttaacaagtgataccagtgaacgtcaccagcggcaagatggatccgcacacgtgcccttgagctgatgcacaaagaacacaaaagatgatgtccctggtgttctcgacaaagagcaaaacccagtctattcctgaggcagccacggtataccagccaaggagcatggtgcaaagtgactcacccctactttaaaaatgcaaatcagtgactcacccctgctctaaaaatgtcatttagagtgactcacccctcctctaaaactgtcaatcagggtgactcatccctccactaaaactgtcaatcagagtgactcatccttcctctaaaactgtcaatcagagtgactcacccttcctctaaagctgtcaatcagagtgactcacccctcctctaaaactgtcaatcagagtgactcacccctcctctaaaactgtcaatcagggtgactcatccctccactaaaactgtcaatcagagtgactcacccctcctctaaaagtgtcaatcagagtgactcacccctcctctaaaactgtcaatcagggtgactcatccctccactaaaactgtcaatcagagtgactcacccctcctctaaaactgtcagtcagagtgactcacccttcctctaaaactgtcagagtgactcacccttcctctaaagctgtcaatcagagtgactcacccctcctctaaaactgtcaatcagagtgactcacccctcctctaaaactgtcaatcagagtgactcacccttcctctaaaactgtcagtcagagtgactcacccttcctctaaagctgtcaatcagagtgactcacccctcctctaaaactgtcaatcagaatgactcacccttcctctaaaactgtcaatcagagtgactcacccctcctctaaaactgtcaatgagtgactcacccctcctctaaaactgtcaatcagagtgactcacccttcctctaaaactgtcaatcagagtgactcacccttcctctaaaactgtcaatcagagtgactcacccctcctctaaaactgtcaatgagtgactcacccctcctctaaaactgtcagtcagagtgactcatccctcctctaaaaatgccagtcagactgactcaccccgccactaaaactgtcaatcaggatgactcacccctcctctaaaactgtcagtcagagtgactcacccctcctctaaaactgtcaatgagtgactcacccctcctctaaaactgtcaatcagagcgactcaccccttctctaaaactgtcaatcggagtgattcacccctcctctaaaactgtcaatcagaatgactcacccttactctataaatgtcagtcaaagtgagtcacttctctaaagctgtccatcggagtgactcatccctcttctaaaactgtgagtgactcacccctcctctaaaactgtccgagtgactcacccctcctcttaaactgtcaatcagaatgacactcctcctctaaagatgtcaatcagagtgactcaccccactctcaaactgtcagaatgacccaaccctactgtaaaactgtcagagtgactcaccctactctaaaaatgtccaagtgactcacccctactctaaaactgtcaatcagactgactcacccctcctctaaaactgtcaattcaagtgagtcacccctactctaaaaatgtcaaagtaagtcacctctaatctgaaactgtcaatcaaagtgactcaccccattctaaagttgtcactatcacaaagaccaagaaagactgaactgaaggattttctaaattgaaggaggctagagagacatgacgtcggtatgcagggcctcatgtgggcatttattttgttctagaaatgttcttgggagaagtagacaaatcgtgtaagttctgttgattagatattagtaccatatcagtgtgaatttttggttttcataactgtactctcattatgtaggagaatgcctttgtttttaggaaataagcactgaagtatttagaactaagggaaaatcatgtccataagtttctctcaaatagttcagaataataaagcacaaatatcagtgtaaatataaatatagagagagattttgcaggtgagagtaaagcctaaaatgttaccatttggagaatcgggtgacgagtgtctgagattcttgtatgatagtcttacaacttttctataaatctgacgtatgttaaaataacatatttttaaaggggggaggggaagcaacttagagtaacaatagaaagccatgaccaacctaaaataatttctcctggcggtggtagaatcccaattttgtgcacatgctcatgctcaggagaagctctgccatgttgccccgccctgcacggcagccgtaattcctactgaagcccagaccgcagtctatgctaagctctagtcatttattcaatttagcttaccaaagctacacctctaactgtctcggtaactcactgaaaatgtcccctcgtcatgtaagagccagagcttacctgcatttttctgatgcatttgtgactcactgagatgcctctgaagcccccagaggcttgtgaaacagttttagagttaatgctctagccccacacgaaggcatgtgcctcctgagaacagggttagattaagaattgagctcacatttcagtcacttttctttcagtgcctactcagcgtgtgatcggaagtagactgggttccgtgcctctgttgtgctgacggctctgctcaggcctgattgggcctgccctttcccgggccaaacgcctcctcactggacctgcctggaagcagcagtgcccactggggccctcacccctaccccaagaatcctgcatgagtcacaattaattcttattagcaagcgacagaaacctggcctaggcagcaaatgtgcttatgaaaatgtattagttaactcgtggaattgctgggacagccagggaaccagctcagagcagcctgggagatgccagccaccctatccgtgcgtgggtgcccttctgcacaatgccaggcaccgcagctcatgctgcagtgctggagccatggcttctagaaacctcgtctggctgcagctcctgcagcggcagaaggagttcttgactcagagtctgtgggagcctctgatccacaggaggcctgtgcactggaggtgagacaggggagagggctgcccttcagtgcagcctcttagctgctacagcgggaagctggttctgcctcttgcgaaaaacaaaaaaaaacgaaaaaaaattatcaaaatgtagggaaggcaatatacataatttaggcagccaaaaataatttttaacatttccataaaaatatacatttcatccccaagcagcagtgcctgtgagcagcctgggaagtgtggcacgcccactcccatgttggctcacctgtggggctggtgccccaggaagctgcccgcttacctgccccagacccagctttgcccaaggaggctctcaggaacagggatggtattggcagggatttcaggcaccacctcagggccaggggcagcaggagaagcaaagaaaagaaagccccccttggcaccctccggtgctccaggcagggctgatggtgctcacgacggtcacgtgtgtgtgcttacaaccccctgagcttcacacaggaaatggaaaacacttcagctggtgccagtgcagaaacctgactccagcatcctgggaaatgattgcaccccacaaaggagctaaaagcagcagctgagagaccctgaacagagaccccctctcaggaggctgcgaatcacgaggggcaccaggaatgttttattatgcaacgtttgtgataaaataagagtgaaccagactttcattgccatcacttaacacgctgtatgctattaatattttagaattgtggtcaagtgaacctgggggaggagaagcgtgggacttctagtttatagctcccaccctggaacctgccaggtgccccaagacacccctctgtgggcctcgtgctatctctgcaggaaggttccggaaaacatcttgaggcaaactataaattgcatttgtgatgtgattcaacaggctccgaaaaacagtgtgcacgatggcatgattattacagtctgcgtcacccaggctgagcgacgggtgatggcccagagctgagcgtctgagctgggacgggtgtctaggtccaggcttggacccgctgatgtggactgaattcgcttcatgcctggccccaaggcagccagcgcgttggtgggggctgccttcagattcattacaataagcgtgccgacctccagtgcctggtgtcccgggaacaccaccagtgggcactgggaaaggttctgcattacagggcacttggaaagactcccttctggcaccattcatctcaacagcagcacagagctcctcacccctgtgaggatgccgcccccacccgagggacagggaagtcttacagtagagacagaggaggctggtgaatggagatcagaggattgggaataaatttgatttaatgagggggaagactgcctggaccctgaaaggaagatgggaccagaggtggcaaatgtggtaaaaggaggggaattccagggcaaaaactatgaccagcctctgttgggctgccaggctgcggcggaggctgtgctgggtgggcgtctgagcttaagcatgggaaacgatccggtggcttcctcctaaaaggaacaaaccgaggactgaagccctcaggagtcgcgccagggtctcccggtgctgcaggaacccacagaggagttgacatttgtgtctcctgaatgcctgtccagcatccccaccgtaaggcagggttgctgaaggtagtcagaggagcagagagcggatggcaggctgccacggcgtactggggaagaggggctgtgggttatggggagggggtcatgccagggacgaccctgccttcagcatttgctaacgcagcatgtgttgaccagctggctgacacatatgccagggaaacacaagggtggaaggaatggtctcaccgtttcactgatccttatttcacaaccttcagcaagacacctggcaccccgggaccccactctcctgcctctaaagtgggcatgtgaggttaaaccatctccatgtcccctcctgccctgacgttctggacgtggggtggctgcattctgagcatcatctgcagcctgtcctgccttgtgtgctgccttctgtcccagccctctgcctggccttctgtgctgccctccctcctgccccctgtcccacccccccatcctatcctctgcactgccctctctcccaccctctgccctgccctttctcctgccctctatccctgtgccctgccatctgccccgctctctctcccatccctatctcccaccctctcatcttccaccctctgcccccctccccaccccacccctatcccgccctctgtgctgccctctcttcatagtcggaacttgcactcccagccctggtgcttcaaactcaggtggtctcagattgatcagcttgtgagagcctggtagtgacgctgagacacggggagtgtcctgggtggcttcgcaatctcttttaccaaatgtgttcaggcagccagttcctttgggtacagtggacctgggggagccagttgaggctttcctgaatagcaggtccatcccaccatcacaagaagagtgttcagggcctaccatttttctctttggccccagccccctaaacccagggaaaggaaccagaccagttctatctttctcagggaggctgggtgcatcctgctggctgtgggatctccaggcgaccaagagcagagaggcctgatgccgcccgctctactaaggaccacccaagccaggcagttagtcccgggggcagcatggctgagtgtgggctctgggtcgggtcctgtatctgcctatggccctgccctggttttacggtcttgggtgggcctcagagtcctcatctgcaccttccttctggattgtggtgagagttaaacgtgtgaattcacataaagtgctgcaacagtgcatgttcccagtaagtgctctataaatgccacctgtcatgttcccagtaagtgctctataaatgccacctgtcacgtgtccattgcccacagagctccacagtccctctaagcgtcgggcagctctcctgaccccagccctagtttgcaaaatggaggtagtgatgtgcacctctcttcttcatgaattgcccacaagcgtgaattgtagaccctcagctgtgaagggtgtgcgtaagaactcgtaaacatcccagtctgctcagcctgacctggtcacaaaccccagagggttcacagcagaactccatggaaaatgctgactcctgcttggaggtaaagcacctgtgctttaataaaacctcgcttccctcctgcttcccacacaccacacatgcccgtgtgcactgagtgatcccagcagacatgaggcctctgctctcagacgggtccctggggcttcctgtcttcggggtcccagcagacatgaggtctctgctctcagacgggtccctggggcttcctgtcttggggtcccagaagacgtgaggcctctgctgtcagacgggtccctggggcttcctgtcttcggggtcccagcagatgtgaggtctctgttctcagaagggtccctggggcttcctgtcttggggtcccagaagatgtgaggcctctgctctcagacgggtccctggggcttcctgtcttcagggtcccagcacacgtgaggtctctgctctcagacgggtccctggggcttcctgtcttggggtcccagaagacatgaggtctctgctctcagacgggtccctggggcttcctatctttggggtcccagaagacgcgaggcctctgctctcagacgggtccctggggcttcctgtctttggggtcccagaagacgcgaggcctctgctctcagacgggtccctggggcttcctgtcttcggggtcccagaagatgcgaggcctctgttctcagacgggtccctggggcttcctgtcttcggggtcccagaagatgcgaggcctctgctctcagacgggtccctggggcttcctgtctttggggtcccagaagacgcgaggcctctgctctcagacgggtccctggggcttcctgtgttcagggccccagcagacgtgaggtctctgctctcagacgggtccctggggcttcctgtcttcagggctttgcttgcagacagtgagccggtgtcaggatccctgcagccacacgtccagatgcagggggaggcgactcttacccaacagcagtgggggccatggagtgtccagcaagatcagggtgaaggatctccagggctgcagggagagaggctacttctcaggtctaagcaggaagcaaaggagcagcattttacagggtctgtgggtgtttgtgagtgaatgcagctacagagtgtttagaggaaggggcactggagggtgcgtaggaggcctgggatgcagggagtcccgcccagttactcaggaacacacagctgtgggcaaggccctccctgcctccacttctcatttaggtaatattaaaataaattagatgatctccagaatcccttcttgctctttaaattgtttttaatttggcaattattatctcacatggactcagaatttgatgagatgcatttgaaacttctaatacagaactggcacatagtagatgctctgagaaaggggattttcatcctcagcttcctgtggctgtggtttagtggtggacagacagagggacgtgacgcatggaccctcagtgtactgtggctgtggtttagtggtggatagatggaaggatgtaatgcgtggaccctcagcatactgtggctctggtttagtggtagatagatagagggaggtaatgcatggaccctcagcttcctgtggctgtggtttatcagtggacagatagagggaggtaacgcgtggaccctcagcttcctgtggctgtggtttagtggtagatagacagagggaggtaatgcatggataaaaattaaattcatccattcgcctcacatgtagactcaaaagcttaataaagtctaaactaattttccataattacagtgcaaatactgaaaatgataacaaaaccataaaatatattttgcagggaactagtttccttatctctgggagaagggttttagaacgacacagaagaagaggtgtctgtggaagtgttttctgaggcaccgcgctttgaagagtggcccgtgttttcctctgtttaccatcacgtcactggttcctgattgtctcggtggctggtgattcagcgtcgtttctctgtgacgcgtctctaggactgaccctgacccacagctctgggttcacctgcaagctggcttgaacagctggaccttctgcatcagggtctgcattttaacagggtccccagcggctcctgggtgtgctgcccatctgaggcccatcactctgtggccccatgcggtttccacgtggcctgaccgagtccactgctgaccacctcagaacaggcagtgtttgcctgcagccaaaggaagctggagggagaggggccaggccaggttgggacccgggaccacgaggaaggtgaacccatgaagggctattgtgacagccgtgatttggacgtagcaaatgtgggcatttagattttggggattctggaagattctggaggggatttaacctactaaagcaacgtgctaaatgcaggtgcctgcatcctgactacatatcaataactgcatttgcctgacgtgctaaacgcaggtgcctgcatcctgactacatttcaataactgcatttgcctgacgtgctaaatgcaggtgcctgcatcctgactacatttcaataactgcatttgcctgacgtgctaaatgcaggtgcctgcatcctgactacatttcaataactgcatttgcctgacgtgctaaatgcaggtgcatcctgactacacttcaataactgcatttgcttgacgtgctaaatgcaggtgcctgcatcctgactacatttcaataactgcatttgcctgacgtgctaaatgcaggtgcctgcatcctgactacatttcaataactgcatttgcctgatgtgctaaatgcaggtgcctgcatcctgactacatttcaataactgcatttgcctgacgtgctaaatgcaggtgcctgcatcctgactacatttcaataactgcatttgcctgacgtgctaaatgcaggtgcctgcatcctgactacatttcaataactgcatttgcctgtttgagcttcagtggaggtgttttcatcacctaaagctggtgagaactgtgcatctcagtcatgggagttgggtgagcagagggtaccgtgccaagtggcataggcagtggcctcctggctgactcggcaagtctttaatccacctgcagcggacttcttaccctgtgtacctgaaataaagcgaggtgtcctccccgtgcatcctgtagattccacatgacctgttttccagctcaagaatgggaattgctatccctggcagaggtcaggaaccagctctgactctgggtggcacctgggccagtggtgagcagggccctgtggatggggcctttggaggcgtccagggtagggagattccatgactcagaaccagtgtcgggaggagcagctgagctctggcaacagggctggtggcctcggttctcctccaggggctgtgcacctcgccagctgcaggtcagagggggcgtcctcagctttgagcccagggccgccctttctgatgttccaatggacagtgtttccttacaggtggaggagaaaaggagaacgagtgtggcttcaatggagccagccccaggaagccacatagacctcctctgccacccctctacctgcctgtggccgcgccccctcatcctgtccaagtgaagaggccatggatgtgatggccccaccctgccttctgaaacactcaggaccgggccccctcctccagctccccagcgtgacacacaaccttgccatcccccattgtcccatccctgccgtctgctatgggtgcccatggggtctcccaaacagcggtatccagaatggaacacagtgctgagatacggtccaacccaaacagcacaccaaagccagcctcctctaattcaggacaggttgcttttttaaattctgctcaggaacaggtagatatgttagcaaccattttgcaaattcaactaaaatctccctgagtttagcaaaagaaccatctcgggtgtgaccgctaacatcctacactaacactgtcgattcctgaaaacacatttcttatctaaaggcagagatttctctttatctcaggaaaatttcctcttgttggtttctgggatcagagtttcttcctggaccatttgcagcagtgacagcctctctgagtttctggggttttatccgtcagttgagggaatgggatggaagccatcaatggtctgacatttggacgtttgcccccaaataatttgagcaaagtcttccaaaggaggtctcgggcctgtctttgaaggaactgacacaggtggaaagacggggatgatgttctttggatttttccaactcaatgtgatgtagtgacatgtgctctgcctcgcgaggggaaagagctcccctccacaggccagcgcgcaggtggcgtttcccgaggctcaggcaggtggagcatggttggatggtcccagggggctggctgccttcttgccctgccagaacacacccacctgttgttttctcagtcacaagcatcataacttatggctagctgctcccacctcacctgcactgactggctcataggaaaagcttctggtgacttaagtgatttttataggtcagggttaagaataaaaaggcccagtggaacggcgtctctaaaagcatgcagtgtagggtgttgggataaagataaaaaacccagagtgatgttttatttatagacctttattgacacacacagcctaggctaaattttacattaaacactggttacaaataaatgtgttcacctgagtaaacagcctctggggtctttattaaaatggctttaaggagaaggagggatgtttttagctgccagtggtaggagacagtggaaggatggctggtcccagagcaggcttgccactggtggcatcatttgtaatatatattttcattttgctctgaagcacagcaaataggtttttgtaagcgagtgacctcaggattagctgtgttatttgtgacttagaaagcagtcagttgaaatattgaaagtattttcccaactcaggctggtttcagcggtgccgcagcgtgccgtgacatcgagcttgctaatgaataataaagacgattgccgctggtgatgtggaaggaaaagaaccaaccttactgcagatgccctttttccttcccagcaaaaggagcttatattgagaaacccatgggaacaaagtcattcttgctagtttgtgtccaactaaagagaacatttatcttgtttaaatcagcacttagcagtggtaagtttgctcttgttttccatccataattttcaatgcaattccaattctgcataattttcaattcaattccaatttcagtgcaattccagctttgccgcaggtgtggtctcacccactgtaggactgcaggactgcaggactgagacccagacccccatttccctttccacgcactctgttccaagtcaggatgcagtgctggccccatcgcccaggaaagacttccttctgcaagtcaccactccttggccccgtcacccagtatttaaaaaccaaaaatcccgtatgaagatgttgaacagaatcctggtcagtagagtcagaaaataatcatctctcttcaaaattctcctgaaagtttcactgcagtaataatctttgtacacatggagaatgccctttacctacagtttttaaggtatttgaacatctaaccagggacatctgcacttcaaataaaaacaagcaacttttaacctttgtttgtgacttgtgtttagtagattttatgtttagtgcagttttacatttacagaaaaatagagcagacagtccagagggttcccacgtgccctgccttccactccacgccccgtctctccattgctcccatctgtattaggatggtctgtttgtcacagttgatgagcccacattcattccatggtttacatcagggttcactcctgctgttctcttaggtggatttttgttgctataataaaattcctgagacagggtagtttataagaaaagaagtttatttagctcacagttgtggaggctgggaagtccgagggcatggcagcagctctgacaagggctttcttactgcgccatgccctggaagaagggccaatgagcatgtataatgagacgacaagcatgaggggctgggctcgccttacagcagccctccctgcctgcggcagcccactcccacaagaattatcacactcctgcaagaaaccatcagtccctcttaatgacctaatcacctcttaaaggccccacctccaacactgccacaatggtaatcaaatttcagcatgagtttcagatggtataaaccatatttgagccacagcaggatggtacattctgtgggtttgggcaagtgtatgatgacacgtatccatcatcatagcatcaaacagagtggtttccctgtcatgaaagcctctgtgctctgctggtacctctctcttcccccaactcctcattacctccaccacaacttacactgtctccatcctttgttcttttccagaacgtcttagcgttggaatcatgcagtgtgtagcctttccaggatggcttctttcacttagcaagaggcatttaaggttcctgcaagccctgtgtcatggtttgacggctcattccgttttagccctgaatgatatcctattatatggatacaccacggttgatccattcatctactgaaggacatcatggttgcttccaagtttgggcaattatgaactaagctgcaataaacatccatgtgcatatttttgtatggacataagttttcaactctatttagcaaataccaaagggcatgactgctgggtcatatactaataatatattcagtttttaattttcatgaagtcctgcctatcagttgtttttttcatgaactgtgcttttggtgttgtatctctaaaaagtcatcaccaaacccaaggtcacctagattttctttgtatcttctagaagttgtatagtttggcattttacatctaactttgcattaatttctgtggagggtatagggttgatgtctggattcactttttgcatgtgagtatcccattggtccagcaccatctgctgaaaagctggtcccttccccattgagttcccttgctgctttgccaaggattgggcagctctgtttgtgcggctgactcttaacttttggcttataaaatgtattgataaaacacaagtggtttgggaagtctcaaacatctcagcatttgtcctcgctggctagaacttcatgttcaaaagaagaagcaggcaggacgttcagacaacatggggggccttggtgtaggctcagagcctttgctgtatcctcagacccaccaatggattgccaagcgtgtccttgtaaactgtgaactgcgcttggtgctggcgctcctgggaggtgctgacttgagaatcttttattcctcaaagttttgagagaactttccagtcacacttagggccttgtgcttttctggaaggaagtttctttgaaaaacgttttgtattttcatattcatctattaatatttctttcttcattcttagccaggttagtaatttttattttctttgttcatagttcaatttcttggagttccaaattcttagacagcgatgcgttgcttaatgacgaggctgccttcagataaatgtttcatctggcaatttcgtcgttgtgcgagcatcacagggtgcacttacaaaacctgtagatgctacagcctcctacacacccaggttgtatgggacagcgctgctaggctacaaacctgcacaacatgttactatactaatactgtaggcaggtgtaacacagcggtaggcatttgtgtatcatttgcacatagaaaaggtaatgctttgcactgtggctttacgatggctgtgacgtcgcaaggtgacaggaatttgtcagctccgtcatactcttatgggaccaccacttgtgggtgtatgtggttcatcactgaccaaaacgttagtacgtggtgcatgactataaatagatatataaatggtcttaagggcttataagtcttaaatttccactgcatctgtgattatgtgtcctcctaattattaatttttgataattttagaatttgaggtgttttacttttcttgattacctctaagagtttatgattttttcccctaaaatcaagctcttgggtttattcaccaatcctgtattcccttttatagtttaatttatatttttattacttaatttcttccctcaagttttttgttacctatttactttgacgtcataaatggagtgcctactttgtttactgtccttctctcttatcatcatggaagctctcagtattcgaaacccacctccggggaatcatttcggtatctcccacagcctttattattctctaactattttgtaatttagtttccatttccttcttaacctaagaattattgaaaataatatttttaatacccaaatgatgagagagttttgttttctgtgtttattaatttctaatttattagattttgcttagagaatgcaacatttatgatttttatgatttaaaaaacatgaagtccttttttgaggcttaatatctgatcggttccattctggtttctagaccatagagcttgatcagtcgctattgaattctctttgtcatgttctcgggcccgctgtaggacccttgtgggagctagggagacttgtttctaataaggctctgtgttttactagccctgtgactttaggtaagttgcttaaccccctggaaaactcagtcctctttatcaataagatgggggcatttaaagtccgcacctcaggtggctgttgtgggggttagtgccgggtgcagttaaagtgccaagcgcagccccggaacgtggctggtggaggatggccgccgtcaggcccttccgtccctcaggctgcgagtggcatctctttgtactgtgatcacttcttccttattaatttcgatgtttatttcttggcacacaccagttcattaaccctatatcgttgtctggaattttataatctaatctaacattagtctatttattccactttaatcaataacttttaaacaaattgcacattttcttggtgtcgacgccatgacgccttctctccttccattcgtatgtctgatagattttcccggccgcgtcagtttgtaatctttctggacggcgttgttttcgatatgttgcttgtagataatgagtagtttgatgcgagtgaaggcacctgtcctaggaagatgacttcccctgctcccacgcgtcgtcctcactgtgtgtgtttctcgttaatcacaccggcccacgccttccagctcctcagcttccctcctgttccttcgatggtttacctgttgccatgtggatgatgttatagtttggttttatgttgttcccaggtaatttgttttaagttcttcacacttttcaaaagcagtaaggatcttcagatttctcattatcaacttcaagaacaatactaatttccttgtcttagaagaacacttcaggatacctcatttctcccacattttataaacggggaggtgaaggcctggttcagctttacatttaccatttcagaaggcacgtctttaccagcatccgtgctaatgtctgaagaaaaggacaaactaagaaaacgcagaacctaaggctatttgtggcagtgcgtccaggaagaatcttttaggggtaggtttgagggctgtgactgaaaattctcagaaaatgtgtagatgggggaatgtggccatttattcagatgccttttaatacaaaaaaatcttagtcaaatttcactgaaatttgcgttgggaaagccaattacatcgtgaaatgggtggaaaatcttattatcccagccccagccccagctcggcctgctgactctgatgtctagagatgaacaataaggagacaatttccatttttcctcgtcgccacgcaggacctggggccgtcccttccttgtcacttttattgaacatagcagtttgtccaggaccacgcgttgaaaattgctgaagataaacattgtattttaaattactccaggcaaccaggcagactgaaaaaaaatcatttgaacaattgaaaactgaaatgttgatatcagatattaaattaatgtaagtgagattgaaacaatatctaattaaaataatttgaaaaatgacttggaaattggagctgacattagcttttcccagcctgccgctattattactgcgcagccatgctccctttccaccgaagccccgccccccggcagaatccacaggagacccgcagatgagagtctcatttatttaccctgttatggctggaaaacaagggctgaagaacctttcttggaaccctgaggagtggagtttgacaaattgacctttcagtttccaaggagaaaatgcctttcaaatgctccacgccaatgtgcacttctgcgttgcaggctggagtgtgttcagtgccttcgcttcatacaggacattttaaaatgagagagagcggtttgcaacagcaaagaaggggaaccagaagctccccagctgcggcagcctgtcctggagtggccggggtgcgtggccagcccctgccgtggtggggaccttcagccagggaggaggacgtgtgttggacgtgtcctggagtggccggggtgcatggccagcccctgccatggtggggaccttcagctggggagggggacgtgtattggacgtgtcccggagtggccggggtgcgtggccagcccctgccatggtggggaccttcagctggggagggggacgtgtgttggacgtgtcccggagtggccggggtgcgtggccagcccctgccatggtggggaccttcagctggggagggagatgtgtgttggacgtgtcctggagtggccggggtgcgtggccagcccctgccatggtggggaccttcagctggggagggggacgtgtgttggacgtgtcccggagtggccggggtgcgtggccagcccctgccatggtggggaccttcagccggggaggggacgtgcactggcctgggggctcctaagcatctcctcgaggccacgcttatgacatcagaagcagtgcttgtggtgcaggtggctggagcaaggagctgcgtgctctgcagtgaagcaccaggcacctcttagaccacacacaggacaggcaaatgatgcgtcttggtgcttctcgaactcacctgctcccagaactgtcctcacactgtcttatggattacaggtaattagaggagagcagtttgttgtgttaaaacatgcaccccttcacagtccatgaggagccacctcaagctcgagagacctggctctccttcccagagcccccattttgaactgagtagccctgggccaacacctcccagaggctccagccgcccatctgggaccataaccaccaggccctgcacaggagcctgggaccatttggggtgagaccctctgacccagcactgctgccaggagggttagagatgaagaacctggggaaagcgtggactggggccgaggagagaccagcgtccacacgcagcaccacacaaagaaaaggtgtcgttgccatttctagttcacagtcccagcaagagtcacggcagattccataaaacactgaataattagcaattttatatacacatctgtgtttagttatatttagcataatataaaatcattagattatttcatatttagcctcccctgaggttttgcccaaacctgaattaaaatgagttttacttcataagcacaaagcagctggggcggggcagagatttcttaggagatgtgggagttcccatttctgctggtacgctggaagaaacaaatattgggactcaccctcattccaaaaacaaaactacgagaatatgaggacatagagataattttaacacatcagacatctggcaataattaaattattggagatcccaagccaagtgagagcaggaacccggggacatcagtggatgactgatgttggcctttattctgagaatcttctccacaccgggtaaacctgaacttcagcattcatgatcttgtggtctatagagggcaggaggcactaggaaatcctgatatggtaaggctaatagaagacatgccacatggagctgggacccccaagaaccatgactgcagggtaatggtgaccgatgatagagtgtcttctcagctctccattgggctggaggatggtaaactgcttgcgttcagcgctgttcctggatgtgtgtgtgtgtggcggggaaggcgggggtgggggggtggcattttcccttaggacattaaccacagccaagcttcacagggatgtacaatcccactgcatgctgcctggacagccacaacatctcaagcagggaattcagcttcaaacgctcccaggtgcacgggcctccagatgcctggcagagggaaaggcagatcctctctggaggaatcctttctttccccttctactcataaagaatacctgcaagtaaaattccaagaaatttgagtccacaataaaaaattttaaaacataccaggtaacaggacaaaagttaattgaaagaatggacaacaaaagaaagcctcagatattgtaactattggacatagatcataaatttaaatattttaatatgattaaaggaacataggaggaagctaaatataacctacagatcaatagtcttaaaagagaccacaatttttgaagaaatatattttaatgaaagatataataatagaaattctaaactaagggtatgagtttaatagcagattagatatagttgaagagagaattagagaagtaaagtatagaactaagaaattttctaaaacgcagcccacagagacaaataaattgaaaatatgaaagtaagggtaggagccatagagggcagagtaggagaatcttacctacaatgcataagtcttgcagtagagtaggaggatcttaaatgcagttcataagcattttagcagattaggcaactcttacacacgattcataagtgttccagcagagtagaagactcttacacacggttcataagcattccagaagcctatggagttcctaaggaaatactaatttaaaaaaaaaaaaggtagctacattgagagccaactttattgggaaagccattgccggggaagaggcacactctatcaccatcgaggatcatcttacacatcttacacatgatccatgagtgttccagcagagttagaatattacctacgattcataagtattctggcagagttggaatcttacatatggttcataagcattccagcagagcactccagaagtaatatttgaagatacagtggcagaaaaatttccaccactgatgtaagacaccagtactcagattccagaagcctatggagtgaaaaaggctctacacctcgattcctgacagtgaagttggagaatctcaaagacagagaatctctctgtttgtttaaaaagcaaaattttttgtctttttaaaaaaagcttacaaaattgagaaacctcctttgtcataagtgattttaaaaaagagaggagggaatcataaacaatattgagaattaaaattggaatgctaatatagatgctttggcatataaaagaataacaaggggtcatcatgaacaatttatggccatatatttgaaatgttagataacatgaccaaaataccagaatgaaaaactccaatagccctgtagccaaggaagaacttgagttaatagttaaaagtcttcccacaaagaaaatatcaggcccacatattttataagcaagttattccatacatccaaacacatgcactcatacacaaaacatcccagactacacagctcatgaggttagcataaacttgataccaaaactcagtaattacagtacagggaatgacaattagagagaaatttcctcaaaaacataggtgtaaaagccaaataatagcaaattaaaatccagcaatttatttttaaaaaatgtcatgagcaattaaagctgtaattaatgtagtctatcacattaatgaaaagagaaaaaaattattatctcaatagatacaggtaaaaacatttgctaaatattaacattcattcataataaaaatgttgaataaagtaagactagtttgttcttattttgattttttaaagaccctacagaaacatcatgcttcccagcaaaacactggaaatattctcttgaacaccagaaataagacagggatgtgggctctcacccttacaagcatttgtaggaggatccgttcagcaggcagtgaagcaggaaggagagataaagggtgcacttaggagagaaggagcaagcctgtcattattcacagacggcctcattatttactcagaagagacagaagaagatccaggtaaactaatggaattagatagtttaggaagggtgctgtatatgaaatcatgcaaaagtcagctgtatttgtatatttaggaaaaaaagttagaaaatgctgtttaaaaatgatactcatttaaaatagcatcaaaatttaaagtcccgggaatatatacatatgttaaatatataagacttttatggggaaaaatataaaacttaaaagatgttgaagacaataaatggagagatttacatgttcacagattgggaataatgatgctattaataacaatcaaacttctagattcaataaaattttaacaaaaatccaaaaactattcatttacaaacgtgacaagctgattccaaaatgtataagtacaaagagccaacacctgccttcgtgtgtagacagcataaactacttacactaaagtaagaaagatcacatggatctgtgcacggagagacacctgggccaggaacagagggaacccaggagtagacccttaaatagaactgattgataacagggttgacattacagatcagtgggaaggatggcctttacaagaaactttgatggggaaatggggtattcaatgagaaaaaaatgaaatgacctctaccttgaatcacatacaaaaatcagttcttcaatatcagacttacatgtgaaggacaaaaatcttttaggaaaaaaacagagttgtatctttatatagatatctttatatagatatctttagatcttgagctaaaggagaattttttaaacaagatgccagaaatgcaaaccttaaagaaaatgataaattagactgtattaaaaccaggaactttaagaagccaagccacaaactgagatatgatagttgcagcccacataactgacaaagttttggtatccagaatgtttgaagaacttctacaaagcagtaagaaaaagacaaataacccagtagaaaaatgggcaaaacaaaaatttcatgtaagaggaagcatgaatgatgaataaacatacacgaagatgcacaaactgatgaattatcaaagacatgcacattggaagcccaaggagatacaacgtaaatctaccaaatcggcaaagtgtttaaagcttaaaccaatgagcacacggagcactaggaactctgtgtgttggtgacaggagtgtaaattgatagaatccctttgggacatctatgtcttagtgattgtactggagaaaattctctacatgggcctggagacacgtgtgagaaggttcatggctatactgtttcagatatggagggaaaaataagaacccagtttcccaccggactgggtaagtgattggaaaaataaagcgtgatgctccatgtgtatagaatgcagtcacacagcaatgaaaatgcatgagccaccatgacatgcaaaaccgaatctgagtctcagaacacagggttagcagaagacggaaggcacatcacagaacgtgtatgttattatgtcatcttatgcagtattttgtttagggatacacacataggtgaaaaaaaaagtctacatacagaaactatgcacccagaattcatgaaagttattagctttgataggaccgagaagagctcacagagagtatcaaagataattttaatgttttatctcttttcagagtgtcaggtatcctggatgtttgctgtcttattattctttggaaccaacacatattttataatattctttggtatcttcctaatatttaatggaatataaatataaaatattaatatttttgaattacaaattaaccccaaaacttctaactttcaagagaaagtcatctgagttggtgagaggaatcatttccaggagcccgtgatatatacatgtttaataaaacactgaacgttatacacatgtcagtaggtgcacatctagtttatctccctaaacgtctttgctatttctatactaagcaggatgggaccctggctgttcaggtagaaatgagcgtctttgcatcgtggtaaatctctaagggggcatcttttcatcctggagatcaccgcattgcaagcccagtcaccatgcagacgtttctccatggggtgggtcttgtgggcacagcatcttgcctcctctcttccttcgggtggtcaggcatcagcccccgttcacgatagcacggagaccgatcttcatggatagcctcttcttggcttgctgtgccacagtgcctttggcctcaccgccaaagaagaaaagagagatgatgaacagcccacttccagcacaggcacaggcaagggcaccccccttctcttctccctctctgggaattaagctttaaatggcatctctggttttagtaaataattgtcaggaaagcagttatgttccagggttattttaattccttctgacagttagcaaaattaaacatccaaacattggggcaacatgctactttcagatgacttgatgtaaaatgattaacatcaaaacattttcttgtgttttgtgttgttgccgcgcagtggatcacaacacgttacaggaacgtgctctgtctgctgggctgatcgcaggggcgcacgcgcgctcgcacacacacacacacacacgtgccctgccgcatggcatctttctggctgtgttttgacacagtcagctgtgcatgggtttgctttgcatacaaacgatcaggttacaccacaccatgtgggaaagaggaagcgtccgccagctgtgcagaacggtgtacgtgtgtgattctgcgcccgttcctacggcgtacgtgcgtgatcctggacccgttcccacggcgtacatgcgtgatcctggacccgtccccacggcgtacgtgcgtgatccggcgtacgtgcctgatcctggacccgttcccacggcgtacgtgcgtgatcctggacccgtccccacggcgtacgtgcgtgatccggcgtacgtgcctgatcctggacccgttcccacggcgtacgtgcgtgatcctggacccgtccccacggcgtacgtgcgtgatccggcgtacgtgcgtggtcctgcacccgttcccacggtgtacgtgcgtgatcctgcgcccgttcccacggtgtacgtgcgtgatcctgcacgcattcccacggcgtacatgcgtgatcctgcacccgtgctcatggctggcagccggtattggaagagaatcatgagactgcaaatcaggaatcctcagatatccttttatcgttggctctttagttcaaaactagaactgtgggtgtggaaggtataggaaactccctccctgcaccactagtgagtgccaccactggtcttagtaatagaggtaacagtggtggcatgatcatcctagagatagtaatgctttaacgctgccactagggagttaatttgctcatgcttcctataagtcacttattcattccctcaacagataatcgttgaggtcctctaatgtgctggacagtgttctaagcactagggcaaatcctcgctttgtggaactgatattctagagaaaaaatagataataaccaagcatgcatcatgtcagagggtgataaatgttttgggaaagaatgaagctggatgagggcacagacaggtgatgggatgagggcccgatgttgggtgagaacaggaggaccatgcagatggctgcaggcaggcatttgagggtcaggaacaaacagcaggtacaaaggccctgaggcaggagctggccggggcgtcccgcgctgaaggggctgagcaggggcgagggggctgttggaggtgatgtcagggcagcagccaagggccaggttctgaagggccttgtgtctgtggcctggactgtagacctcactgtgggtgagatgcgccagcgcagggctttgaggagaggcttgagtgtgtgttgagtggccagcatcctcccccccccagtgtatagagtcagcccctgtccagctgtcgaggggcccaaggccagagggcaagtggcattccatgctgggcttctggacatttaaaagtctatgtgaagctcattagccgctaaaaaaatgcttcatactttgaaaaatatatgttcatagtgaaaaaaattattcaaatgtgcataaagctattgtttttatttctgaaaattaatccaatgaaaaagacagtggattggattataatcctgtgagtagtgatgttctctcgatgggctggtaaggtttggctgagtaataaattaatgacatacataattttgtaaattattgtatatttatttgtaaatgcattttattccccttgtttcatgaagtcactaattagattgtttaatgacgatcttcataaagttggggtgttttagacagaaatgattcaactgtaattgcacacagggtacaagatgtagaagtattttcattaaaaataaaaatgcacttaaaattgtaaactaaaactatgcttcaaaagctatttttcttcaaaaagatttaatgtgaattattaaaattctaaagccaaatataattcacaaaatatcaaaattttcaatcaaaagtatttaaatagagctgtattttaaattgtattttgtgacaatttaatcaaattgtagtccatatttttgtaagaataagacatttgcaattctggctctgagatccctgcagttgctgatgtcatgagctggttgcgtgagtcatgcatgtcctgtctcgacagacgtggaaaagtgaaagggattgtggggtgctgcggggcgcctccacatttgtccgtgagtacttctagagctgtgagccgacgtgcaaagaaacgcaagagtgggcacctggcactgccaggaacggatacttctttatgcagaaatcattggcttttctgtaacctgaacagcaggatttgacacgttcattaatttgtcttttctcctgcctaagtgcttctgctcttcaaacctccctctcccaggcatgaaaggcctcacgcaacacgtggcttccacagaatgcaggctgcaggggtggaggccctttcaaggctcgcatggcagaagtgctgggcgcaggggacatcatgctgcggctcggcctgtgcagcccctcccaggccgggcccggcaccatggatggaagagccaggcagcgcagttggggtctctgcaagatccagagcagagaatgagatgctggacgcacctggccacgcggagacgccggccggtcccatgtgcaccctgaggccagaacctgcagcctcaccaggcgcgctgtgctgtgtccgaggagaataaaggcggctctgcggctgtgggcctgagctcctggcaggctggggtcacgggggacagacaggcttggggaagtcggtgaggtcaggaatttgggtggagacaccattggacgtcctagtggaagtggcaagaagacaggtgggatatcagatccacagaaaggatggggctggaggaaagaaaatggctctgatcagtgaacagatgccagtcagggcctgaggactgaacacagcacatgggggcagaagagggtggaaaagagaagcctgaggcccagcccgggacaccccacacgcagcggacagggagatactgccacccaggacaccccacacgcaagggacagggagatactgccacccccaggacaccccacacgcaggggacagggagatactgccacccccaggacaccccacatgcaggggacagggagatactgccacccgggacacctcacacacaggagacagggagatactgccacccaggacaccccacacgcaagggacagggagatactgccacccaggacaccccacacgcaggggacagggagatactgccacccgggacaccccacacgcagaggacaaggagatactgccacccgggacaccccacatgcaggggacagggagatactgccacccgggacaccccacacgcaggggacagggagacaccaccgcccgggacaccccacacacgggacaaggagatactgccacgcaggacacaccacacacaggggtaaatgttcccgtggtgcccagctggccagtggccgcacagagctgtggcctggtcctctccgagcccacgttctcaccctcgggccacactgctcggtcacggggtaccccagatgccaccacacccaccttgaaggtggttttatgcttcatcttcccgcccccttggctgtccaaagtgtgacatcagcacagatctgagcataaaacactggtgacagcttccatggctgcttccaaacctttccaacaggtgtcagggtgtcaggatctcgggatctcaggatttgctgagtgagagtctttggttctgaaatgaagactgaagtgtcactgcacgtgtttgatgttaagacatgttagaggtcccagaaccaaagaagcttagagcagggccttctccaggaagcttcagaccctggcgagcccccagtctagaggggctcaggacacgtgggtccttcctaccctgcccctccctaaggtctccctcagcccctagcccatcctccacaccgcccgtggtcctgggagaacagcgtgtgccccagcgcccagagggtgagtgaaaggctcacagtgcacagtagtgagtgagaagctttaagaaggtttgcaatgtttaaacctttttttttttaggagttttaggtttggcctgagtgactggcaggctatttcttaaccttgtatgaataaagaccccattttttcatagaatacctattaccactgggagagcccagtccgggattgtccactccgagggaaggtggggcccctcatgggcctcacgtatggccctgctagagttcttttcagaaaacgacatggggaaagagaatgggctgaaataggaaagtatggacattgctaatttttaaaagattcctttacaggaattgtgatcagccctgcgaccaggtgggcctcatgttagtcggcgacacggcagctcgcctgggcccaggaggcctctgcactcccagtggctctgtggccaccctgggatgcccaaaaaggaaaggaggtgccggttgggaccagagctccaatcactgaatcaacttccttcaaagctctttccccttcctcttcccaggaatgacttccgctttaaggaaagccctcggctgggcaccttgctgacatgcacggggaatcctgaccagtggcttccagtttcaggaaggctgacctcagggcaggggcagagtccacagaggtccccaaattacccggagatgctgaccccctgcacgggggccctgggtggaaagtggcagcgttgaggcagcttgtttacggtggctgtgaggcacaggatgcaggtcttaccctaggggacgtcgtttcagctcggccagaaaccaggctccaccccataagggaggaggatccttcctaaggaagccagtggtgccgtccagaaagctggccaggctccaggtgacagcttcaccccgggcctgggtgctctccctcccctcccaccttctaatggagcaaagccattaagtgatccccattgtaatttagattacagaagagacttctgcacattctttcaggttaaaataacgaggataaagagagtaggcaaaattattccactgtagctgcctgcttaattatatggaatgctgcataaattgtcaagtgcaaagaattagtctgataaattaaaatactaattaaataggctattgcagaattttgagaacattatagggttccgcttcttcaggtaatttgcatatccttcatctagtgaatttaattttaaaggacttcttttttgtgtttggaaaccctttttgtctcccatgaagataaaaacgggctttctctgttattctgtgcctttattaaggcagcttctccaactgtctccacgccctggcctgacagacttgggaggcccagagcttggctcaaaacataactcagacctggcatttgatggacatctggctgaagcaggctttttcttcttttcctccttcaacatgttcagcagagacttaaaaattggcagtattgtcatggagttcataaaaaggaacaaaaggacactgagaatcagcaggtatttactttagacttaaaaggagtaggtgtgagtcctcagttacacaggtgtgggcaaaagtcccgcgagaggacggcgggctccccagtgcagacgtgtcaggatcagagctcagcacctgtcacaattccaccaacagtgtggaaaagggaatccacgcggccatttagagaaatccggcggagcatcaagggtgcaggaataatgtcgggaggtgtcgggggtgccctgagacccacaggatgccggggaccacgaggcattgtttttccttttaggcatatttgaggttaaaaaaaaatctgaagcaacaaaccgcagggctgtgctgcggaggctgcccttgtgccctggaggctgcccttgtgcagcgttcgcgatgcaggaggagggaggtgcgggcctctctgtgtttcgattctctctgccagtgagaaatctcaaagccagaaagtgaactagcaaggacaggcatcgctgaaagcggccggaacacagggccgcgtgaagtcagctgacgccccacagacactggctcgttccacagcgccaagggaacgcgtagacgcccccgaaaagcactcagcaatctccaaagagatttccctggcaagaagctggactctggggactccgggacccggattctgtgctttgtgagactccccggcacctgctcagggcactgtcgggctttccagaggatggtggagtttcttgacgtgagctggcaggttggatgtcagtgcccagcacagtgctggagggcatcactcagcagaccctgtgcagggccacgggaggggagcagtgacaccgggagcatatgggctctgagaagcggcctgcggagcccctgactcctcctgtgaaggaaccggcctgtgggggaaggaagagaccctatcttgggaaacaagaaatcaggagaatcctggtgacctttatcctattgctgtgggtgctgttagtggggcacacagcaattccactgtgggaggaagaccttgatagctgagtcacccagagcaaagtcgttgagcgatgcttcagctgatgtttgatgttcaaaacacaagcagaagcactgatcggcgagttaatagcataagagaccagagcacactggagtctcagacacgcagcagatacagcactttctccttaggaagtgacagtggcccggccatgagacatgcagcaaaacagccgctgtcacgagggcacatggattagtcgcttgctgtgtgctgagacctgggccatgctggctcagaggctcccacgtggtcctcacagctgcttgtgaagcgtgcatggaaatccacagcctggatggggagacggattgaagtgtgggaagcgcttgcgccggcacttggtgtgtggcaggaatgtagccactgccagcttcattacttttcaattattttactctgtgacttcgattttgacttacactgcagtctcagattagctcgagaatgaaactgtcccttgtactctcttaaaaccttttagtataaaaaaaaaaaaggaaaaagaaaaaaccaaacactaattcaggttgtttgcttcaatcgctgatttaaaccgactgaactacattttaaaaggtccagtcagtttcgagaggcagcaccgtggggcatgtgggagggttgtcggtggcacatctgttcacttatccgtatttttaattttcagcttttattttagaatctgggagtacatgtgcaggcttgtgacctgggtatactggtggtgctgaggtttggggtacacttgtgacctgggcatactggtgatgctgaggtttggggtaccgtcttgcttgctcccgtcttgcaggtagtgagcacgtcccccagagggagtttcagcccttttctcccacctccctctcacattccctctcacattccctcttacgtgtctgttgttcccatctctatggctgtaagtacccgatgtctggtccccacttccatgtgagcgcatgtggttctctgatgagtgtagttcccacttccgtgcgagagtgtgtggcagcgtgtggctctctgatgatgtctggttcctgcttccgtgtgagagtgtgtggcagcgtgtggctttctgcttttgcgttaatttgcttaggatggtggccccaaattgtgtcctttgcagcaacgtggatgtatttgttgaagaaagaacacaggcccctaagcatcaaagtgcagtcatagaccctgaagaaccttgcctgtcctggagaggctcacaatcagcttgggaggcagctctgctaggagctcaccacgatgcctgtttcactgacttggaagccatttctcagctcaggtccactgaagagcagagacggtgccgttgaaccacagcacgtgctttggaatcacctcagatgatcttgtatttattgaacaaactctctcagactcgtttatcagcctcactctcgcatcggcatctaaaaggagttttagtgatcaatgggttaaagaatcctgacgcgcgtcacactcggaacccctccactgagtgcctccacagcacaatgctggtccccacgtgctcttgaggccacggtgaggttgatttccacgtactctccagaccaccgcggggctggtccccacgtgctctccaggccaccacggggctggtccccacgtgctcttgaggccacggtgaggttgatttccacgtactctccaggccaccgcggggctggtccccacgtgctctccaggccaccgcggggctggtccccacgtgctcttgaggccacggtgaggttgatttccacgtactctccaggccaccgcggggctggtccccacgtgctctccaggccactgcagggttggcggcaccacacttctcatgagtgttccactgcagccaacaagatcatcctctgagtcactattggccgcagctgacgccctttccggaagttctgctgcagcgcgttcctggcctcacaggaggcccagtggaaagtgcttaagtacaaacaaggactcattccctccccaaggcctccaaggatgcaccttgctgcactgccaattcagggtggcgggagttgcctagtcactaccgtgctggcccgtgctgcgaccccacttcagctgggggaagtgtgcactccagaaccaaggaaacacggacaggaaggtcccacttcagaaccaaggaaacacggacgggaaggccccgcctcaggacccaggaaacacggacgggaaggccccgcctcaggacccaggaaacacggacgggaaggccccgcctcaggacccaggaaacacggacgggaaggtcccacttcagaaccaaggaaacacggacggggaggccccgcctcaggacccaggaaacacggacgggaaggccccgcctcaggacccaggaaacacggacgggaaggccccacctcaggacccaggaaacacggacgggaaggccccacttcgggtgtaaacaaagcactgtgccagcacaggggacagtttgcatccactcagtagaactaattttactttctcaggaattttgtgagcccattattcagtacagccattgtgaaacattgaatgataaaaacatgcacttaaataaactatgttaagagcagaggcgatccatactaaagctcaccattttataactggttttctacattttactgtcatcggcacccttgagattatttctgtcctccacgtctgcatggtgggaactcttccccgcacgcctgcaactctgtatctggttggttcggccccgccatgcctcatgttgaaattcggtccccatgtgtgactctgcatctggttggttcggccccgccatgcctcatgttgaaatttggtccccatgttggaggtgcagcctggtgggagggctttggatgtgggggagggacagatggggcggggcagatccctcgtgaatggattcatgccctcccagggtggaggtgagcgacttctcgctctcttaactcctgtgagagctgattgttaacaagagcctggccctccctccgccctctcctgcttcctctctccccatgtgagctctgcacactgcatggctcccttcaccttccactgcaagtggaagcagcctggggcatcctcagatgcagacacctgtgccatgcttcttgtgcagcctgcaggactgtgagccaaataaacctcttttccttgtaaattgcccagctttgggtgttcctttacagcaacacaaatggactaagacagtatctctccccattccctttagtagtgtcacatgagcactaaagtcaactgtgatgggagcatttacacagagcagaaattacccagtgccataatttacaattctgttatgcaggggacaggcagcctgcacaccatgaactgtgagacacagagggccgtgctgaggatgttgagggagggggtgcccctgagcacatgtagggcctgagcttcctgggaggaggactgcgttttcgtcagactgaggagctcagagcatcctggcaggggacggagaatgcctgaaatgtgctgaaaagcccaatatctgggcaaggagtgccacctggacctcagggccagcaaggcaagttctccatgcctgcaggggacaccattgaaaggctttgaagggccaccgaagtgtctggatttggagccagaggtctggatgttgaggtcaaggatggacagacacccttagactcactgctcgtgacaccctgggcacagtgtggagaatggactagagccagacaacctcttggcaaccacagtctgcaggtcaagtcaggcccactgtctgctgttgtaaataaaggtttgttggaacacagccatgaccatccacttaggcgtggtctgcagctacctccacgctgcaaggcagggctgagtagctgcgacagagccgtgggcctgccgagcctgacccagttgttacctgcccttcacaggaaaagggcgctccccggcagattggatttttctcattactatgggctggggctgccgttttcattcctgaccctgacgtcggtgaccgttctgcagcagtgaccagggtggttctaaggttgcatttgtactcactttctgttcctcagcctgcttaaaagagtccactattaccctcctgagagaagcttgccaatctgtcagatgtctcctctgtttgcgggaggacagcagcaccgatggccttatagctctcttgccacccaaggcttacatttgtgtcctcccctcccctggggctctaccccatcataaagtattaaaggagttttgctttagcccagactgttttctgtctgtcttgttctttcagcgcagtaggtaattagttatatgtagaaaatagtatgcatttgctcaaagggaaaaactttccataagacaatggagaggccccaacagcagggagggcaggctgtaacaagatctcatcgcgtccctctccgaaaggaataatttcattaccccagattaacacaggggcgttacaataaggggtgagagtaattgatattttcctgctatctcatcctgtattaatcacaattgcaaggcactcttcattcatagggtttgcagtgaaattccatttttttctggttttcatctccaaagtgacaagggctttatgcaaacgcatatttccacagagtcgtaagccaaggtcaattgccttgtgacacccgtcctctctgtgaagtggggcaggtgggtttgctgtgttggtgctaggattactggggtttcatttccatctgctaattgtttccagagctcatttcccttggtttgccatcgagtgcaattcattctctgaaagtcttcctcattctacatcaggagaaaaccagggtgaggcttttattggagcgaaattattataggatgttcctgtcagggcatgaacaagaggctgcaaaatagctggcggtgctgatggcagaaatacacacattcagctttgccttctacggagtcttttatcaacacctaatgctggttaatgaaacatatttcccagtaattatacagctagaaacgattacgtaattttaaaataagacgttgcagtttgcagaatgtctctacatatttctcatcagtgattcatagcagtcctggggacccgggtgggacacccctttctagatgaaaccaaaagcgcacagttgtgccggcccgaggtggacgcacactgggtcagtgggaaaatggggcctcgtgcaggttctaattctgtgcctgttcatgacccttccattaaggtaggcgggtcaagcagtcatgtaattgaaattttcaatggaggaaaatactcagaggtgcccggagactgaggacctctccaacctgactcttgtgctttctgatttttcctaacagttgacaacaaagacaaactggaggaaacctctggactgaaaattcttcaaaccggagtcgggtcggtgagtaacagaaggggtgccgtctgctctgcgatctgcagtgctgtctgggtgctggcgaacaccgtgagaacagaggctggacctgcaggttaattcagccaaggtcctgttttcctgggaggaccagtgggctgcagcaggagcatcctctgcgggtgggaaacggtggcgaaacgtgcctggcgagttcaatgatgtcttagggcctttgaagtcctgatttagtatccccacaagaaaaagcattcatggctaagaagaacggagaagccttcagaaaataggtgcttccttccttcttcagctgttttgtagttgccaagtgtgtgaaaatgaatatgggctagagggattactctttcctcctgggactcagtgggacatacttgtatcttcaatatcgaaggacgcacatttgggagaggcaatataaaacaggaaatgcttccataatatcactgaaaatctatcaagcccctgtgtgtgcaaaccttaccatgctggtatcagagaggcaatgcttccataatatcgctgaaaatctgtcaagcccctgtgtgtccaaaccttaccatgctggtatcagagaggcgctcggccagcctcctccagcagctggagccgcaggcgcctccccgcaccgcgccgatggccgctgtcccctgacatgacaacttaatgaactgcacacagagcgcggacgcgcctcctctgaggaatggcgtgtggccactcgtcagtcagtgtggaccgaagccaatctgcgctcccgcgttcgagatttcgggtttcacagcgctcgccattagagataattaactgtgaaggagcgcttatttatgagtgtgctcgctgcacagcagagccgccctctgcggagccacttaaagacaagctgcttctgtggggaaatctcgtcctcaccaggccccagactcgggctcttgaaataagaagctgcttaattggccgctcttcccaaacagaggttcttgcgcttcccatgcagagcctgcttaagaatagcctgaagggctttgaaaatggctgcgtctgggttaaatgacgggcagggtgtgggagaggagagcagccggcgactgatggaaactggcgtgcacgtcccggacaggtgctcctgttcttggtgtttctcgatgccttcctggctcgtgccggatgaatgaggtgttgggcagctggtgatgccctggtctttcccgggagcttgctgtctctttagcacccagtgaagggtgagaaagaagccaagagtcttgggggctgccgagagccacctgcatcccacggaaggtgcagtgaccgatgcggaggggccaagtagttgcaaggtggagtcagccgggggtggctgtgaccgggccgtgagtctcctgcatgtggaagatgtgatgtcggaggtgcgtctcctgcgtgtacaaggagctgtggtgtcctcctgtctttcctctcccttccgagctcatcacgtggggtggtggttggtgctaagtcattcctagagggataatggtgtccaggaatttgggacaaatctagatggactcaggttagagccatctctgtaacctggtcagagaacgcgtcgaggctgggaccctctgctgtactgtggaatatttaggccccgtgagaagcggctgtggtgggtggggaggtgggtcctgtggacatgagggaggctctgccctgagagggctggaggggcaagggtgggggacggggaatgggagactctggggttcatctgggaggtgacaagtgtggtgcctggtgtccagacacaccttcctcattgaaacctggactccggccactccagaaaagaggcaggacatggtgacaggtggagccactgactgggcagctccagcccaagtggcttctgccatgtgccttgccacaggttgcctcttaagcatggaaggtcagatgctgttgtctacgcacacgtgagcctgggggacagcacctccccggctgcccactcacaacggagctccttcccacgcacacgtgagcctgggggacagcacctccccggctgcccactcacaacggagctccttcccacgcacacgtgagcatgggggacagcacctccccggctgcccactcacaacggagctccttcccacgcgcacctgagcctggaggacagcacctccctggctccccactcacaacggagctccttcccacacgcacctgagcctggaggacagcacctccatggccaccctttcaggacagagctgctcttcccacgctggaggagccacagggcctggtcgctgtggcttcagcctcccagctcctcctgtcctctgctgggcacttgtaatgtccaggcactccctgcttggatcaggggatctgggtttcatcttcccagctcctcctgtcctctgctgggcacctgtgatgtccaggcactccctgcttggattgggggatctgggtttcatcttcccagctcctcctgtcctccgctgggcacctgtgatgtccaggcactccctgcttggattgggggatctgggtttcatcttcccagctcctcccgtcctcccctgggcacctgtgatgtccaggcactccctgcttggatcggggggtctgggttttgtgctatacttggtgctccctttcactcaggccccttcttgactctgcagagctacccctcgccatctctttcacgcgggcctcctgcagtctctgtgctcaccctgtgactctgcttcctgtgttgtcaaatgggggtcatcccaggacccgcaccactgggtcgtgtgcaggtttctggggtggcagagtgcggatgagtgggcacgcgtaaacattcactctcattcccatcacggtcctgacgcctccacagcatttgattaggcagggttggaccttcttgttccatccaccctgtctcagcaccctctgtcgcgccttcacctctccctccctcgatgctacacgacagattatttcctgaaattgtctcccacgttccttcctcctctgtctaatctgctgtaaaactcaaatgctgggtacttttctcttggttactgtatttttcacttagaaaaaaatttttatttagtaatttatcaaatctgttattttgccttctactttgattatgtgtttgatatcttcttttatcttttcaatcattttaaacctacttattttatggtctcgtccagatcctctggcttattttatggtctcgtccagatcctctggcttattttatggtctcgttcagaccctctggcttattttattgactcgttcagaccctctggcttattttatggtctcgtccagatcctctggcttattttatggtctcgtccagatcctctggcttattttatggtctcgtccagaccctctggcttattttatggtttcgtccagatcctctggcttattttatggtctcgtccagatcctctggcttattttatggtcttgttcagaccctctggcttattttatggtctcgttcagaccctctggccgtttcctagtcttcgctttctacagctcctgctcatcacatctgctgaccccctcctgtgggggaggggtcctcttttgtggttgatgaagtctttttttagaattgtgagcttaccctcagcagggattggtgatactgaagtgtgaatttctatgtgagagtttctggataagaagttctgccctcagtgtcccagccgatccactttcctgtcaattgcccacctgggagtttctgcttcattcaataaagtgtggaccgtgctctggcacatgcacagatctggggttcagccccctccccacttccccagctggtaggtggtctgttcctgggcttcaatcttgagggaggcaggtcctcaaggtcctgggcttcatgtggagtccccatctccatccaccccaaggccacatgggctgtcctcgtgtgactataggaactcacaccccagctctcagcttccacaggaactcacaccccagctctcagcttccacaggaactcacaccccagctctcagcttccacaggaactcacaccccagctctcagcttccacaggaactcacaccccagctctcagcttccacaggaactcacaccccagctctcagcgtccacaggaactcacaccccagctctcagcgtccacaggaactcacaccccagctctcagcttccacaggaactcacaccccagctctcagcttccacaggaactcacaccccagctctcagcttccacaggaactcacaccccagctctcagcttccacacacttggatccacagaaagatgccaaacgtccaggagccacttcagcagcagctcccagtcacgcccggttttgattgctcctctcagttttggagtctggagatccactttcttcctgtgctctcggctttgtgcccctcagagttgatgccatgcgtcatgcgggatttcgatgtgcgtgtgcgagggtccctgctcagcctcagtttagtgagctgttcgttcattcattcctaggtatttatatgcgtcaggcaggttttaagaactgaaactacagcagtgactaaaacagacaaacccttccatcacgagctcccattccaggtgaagctggaggtgtatcgaggaataaggcccattgtttcctctgaaggcagaacccagccgtcccctgcattgctttctgctctcactgggcgcgacggccatctctgttcccttcaagtcgaccagctcctcctccgtgagttctacagattggactctccagggcctggctccctcctcctttctgccggtgctgtctcctgtggggaactcacctgggccctggctttttatgttatctgttcgatgatgatcccaagcctacgtctccagccctgacccattcaccgagcaacaggtgtgtatggccacaggtgtcctccttttctctcctgggagatctgtagaggagcctcacacttaaagtgggccacgcagggctcttgatcttcctgccgcagcctgtttctcccgtcaggttttcttatctcttaatggaaatggcatcactgctccttgtgaagctctgtctaggaagtagattgattcaatgcatggaaatctgaattgctgctcagattatctgtgaagtggactatttaactctggaaagaattggcctctgcccactcctgatgcccacccatctcatatgtgggaaggaaggttctccctagactgcgggggaccgtgggggctgagggcagaggcaggagctcacctgcacagcaccacacctctgcttccatccacatccaacctgtgtcctctctggcccctgagcgagcagaggatggaccttgccattcccaggggcagaggctccgtcatccctgggacagaaaattaccaaacgctagagtgtttatttcacccactggttacgatctggccacaaggagctcattcaccctgacctgcctgtcttcctggccttctccagacatttctttgttctcgttccaccaaatgctggagaccagctcctggagcattatccttctccacgtggccattttacatttcaaaagatggttcttctcgagctcttgaccccacggacatcgtgcccagagggccctcaagcccagcatctgtgtctcctgttgccccaagtgagtgcagaaagcaatgcaggtgacggctgggttctgccttcagaggaaacaatgggccttattcctggatgcatctccagcttcacctggaatgggagctctgtgatggaagggtttgtctgttttattcactgctgtagtttcgggaggtttatatatttggagtagatttgcagtggtgaaaatgggagaaaggggtacaagttgataaattatttaacagctaatgatttttttttctaattttaattgccttattcagtattaagcctgaatttgacgattctgatttttaatgtatttaaaattcttctaatccctgactctggaatataaagcagagtttgattacagaaatctaatagcatttactaaatctctcccctgcgcttgcgtttaatgcaagtgatgacagatagtggaattaaaaccttttaagccaaatggaaatatctcaaaacaaaatttaaaggaaatgaacagattacagtgcagatacacacccctcatagatgggtggcattttgatgtatttcaaaatctaatttctgatatcttgaaaagtatttgcattttattcaaattaataaagccatgtttttttccaaaggaaagtgataatcaccaaaaagcaaaactcaaaagtttggaagaaaaataatttggataaaggcagatccatggctccaaccttctcagttgtgtccagagttaggggtgcgttctagcttcttagcatcatgatagagcagagaggtcccctgcccagcgttctagcttctaagcatcgtgatagacacagaggtcccctgcccagcgttctagcttctaagcgtcgtgatagacacagaggtcccctgcccagcgttctagcttctaagcgtcgtgatagacacagaggtgccctgcccagcatgtcagtgagaagtggccgaccctgagtctcagcagagcccctgcaggctcaggagcgtgaacaagaggaatctgagaagaagctgaggggaagagctgctcagactgggggctgtctgggtggcaaagagccccccatctctgctgagggagccttctctctgtccagtgtgggatgaggtcagaggtcttcagatggttattcaaggagccctgggggctccaaggcagttgggtgtgaatccctgctcagctcacgctaccctcacactccggctcagcaaggtccaggcttctgttgcctgctgctcactgggcttctgggtgagactttgttccaagaaaggattctgtagccaagaatatgtggatcccaaaagtcccttaaaagtctatgaacctatggtcatgcatccaccccatgaaaaatgtgaatttgccatgatatgtgttacctgggatggggggtgggggtgtgagaatccaccccatgaataatgtgaatttgccgtgtgatgtgtgtgttacctgggatggggggtggggggctgtgggaatccgccccatgaataatgtgaatttgctgtgtgatgtttgttacctggggtggggggcggggggtgtggggatgctcagcacttgtcacagggagcaagcagtgggcagaactgagatgggtgacggatgtgttcgaaaccagcttcatttccccctgacttccaccctgtcatttcctgtctgtgcaaagaggtttgctactgtacacagctcctacccggttgcttggggattaccaagaggagcctggacattgaatgcagactttggccaaatcaatagcaggaacatatcagctgtgatggctcgacatggccatgcaccttctccctggggtcttgtcaagatgcagatttcctgcccgcctcaccagatgcctggttctgcacacccaggtgtgacccaggagaggacgggacagaggggggcctttgcccacaggtgaagagagccggagtaaggaggtggggaggtggggaggtggggaggagctgcccctgcttgtcagggtgacagctgttgttgctctgcggtgcccagcagcaggaccgtgcctttgtcaggcacattaaatgtttcaggtggatccaggtggatggatgaggctcttggctggaagaaatgctatttgggaaatgccaacaggtgaggtggagagctggcaagcagaccacttgcaaagggctctccagccaaaatgatttgtgtgagaccggaggccctgtggtgctgggggcaggtgaaatgtcagagctacagtggggtgagaaatccgtagatgttccaatcacatcctaagtctaaagtcctattattttgttgttgttgtttgagacacagtctcgctctgtcgcccaggctggagtgcagtggcgcaatctcagctcactgcaagctctgcctcccaggttcacgccattctcctgcctcagcctcccgagtagctgggactacaggcctctgccaccatgttcagctaatttttctgtatttttagtagagacggggtttcaccgtgttagccaggatggttttgatgtcctgacctcatgatccgcctgccttggcctcccaaagtgctgggattacaagcctgagccaccgtgcccagcctgaagtcttatttttaagattagtactgaaggttgcttgagaacaacagttttggttttataaataaagaccaaatgtgataaaactcatatacgtacactccatggtaggcagggtgaatgagtctaactctttagaaggcaggacagcagtggtcatctgcaaaccaacaaacaaaaactcttcccctttggctcagtaatcaaactccgagaaatgtatcctaagaagacactccatcgagcaaggaaatcagaaaaacaaaaccttcaccaaaaaaaaaaaactgacttaaaatataaaactatagcaaggtaactcatcattaacaatcaaataaatcaaattctgtgatttcatttaaaattttgagaactctaaacttaaaggcagctgtgtaaacatgtgtgtgcacagagatgttagaagcccatgtacgtaacaggtgaataagagagcagctcttatggggttgatggtggcagcagaagaatgacgaggctcgtaattgggaaaggagagctttattccttataaagagctgcatcctgcaggacagccaacctgaccagctgggaagcgtagcctccggccagaagccagaaacaggcacttctagtgagaggcaaagggaacaggaatttatgctgagtgggtggctaagtatacatattcagcaggttatgggaggagccgtgaatatttgtgaaggggagacacgggcatgcatggtcagctaatgtttgcaaaatgcatcccatgttcactggggcatggagacttaacatgtaaacagattacagttaggcattctgcatcaaaaggtgaagctgaggacatgaaggccctccctgtgcagcctccacagactagccagaggcactccgtgaatggggtctcttatgaggagggaatgctgattggttgttgggtcgaaaccataaaaggaagagcagtttcaggcacttggtggatatcaggaatggagtcttttaaaagggctggtttctgttcagccctcagagaaggaagcctggtggtgattagttgagaggggggcggtaaccaggcgggtctgaacccagggaaggaagcctggtgatgattaatgatgggggcgggtaaccaggcgggtctgaccttcatcctgtcacggtcccaactcagttttaaggtttctctggggtcctcttggtcaagagtaggtcattccgtcagttggggctttggactttatttttctcagtggaattgcaagtgagttttttcctttgtccaaaagtttttatattatttctgacttcttattttgaaaccattatagattcacagggaattgcaaagttataacaaagaagtctcatgtatcccttacccagtgaggttttcccctggtggttacgtctgggtaattataaaagccaattatggcaaaaccaggagattgatattggaacaatgtgtgtgtctagttctatctcattttacctttagtaccattttttacaacctaaataaagagaaaatatgtaaccaaaggaaaggcgtttacacacacattagcaaatgtggggacctgaggggagcagccaccatctgggacatggcggcccccgtcacccattgaccgtggttgctgtgggaaacgctcacagtaacgaaagtcatcagacatccgtgaagattctgcgtggcatggtgctgcgcgtaggccagtacatgacaaaggtttaaaatcactgctggcctttagatgagggcctgtgtttggggattcaagagaaggggcattggatgttggggggtgggggggcgcaggatgggctggtggggcagagagcacggccacacgttcctgacggggcccctggagcaggagcttggaggagcagctcccaggaggaagagaagctcacgtggtcagaggtaggtttgtcagaatggagcgaaagcggtgggttcagcagtatctgaaggaagagatcacagctcctgaggctctggacagtggatctaaaaagcctgaggtgtcagagttcacggggttccttgggtaaggtgactgagctgagcttgcgaaggtaacagtgcgtttgatggtaatgctgggtcacaccaaggatagaagcctggggggaccactgaaccctacatctcatgctacggcttgtccctagtgccggctcagcctaaagaaccaggctgcagtgactggggtgtaacactccagcaatctcagaccgtccgtgagcccaagaaaaaccagggtctgtctctccagaaacattcactcacaccccccaagacagcgtgcgtttcagggagcctgtggcatctcaccccagaagcccaagagcacatgggaagctctgccaagggtgggaggcagggggcggtggtgcctgtgtgggctcttgcccactcagtgcatgtggtgggctctggcagtactggggggagtgggtatggtggagagcaggtactggggggagcaaatactgggtggagcaggtattggggaagcgggtactgggtgaagcgggtactgggggagtgggtacttggggaagcgagtactgggggagcaggtactgggggagcaggcactgggggagtgggtatggtggggagtgggtactggggggagtaggtaatggagcagttactgggggagcgggtactgggggaagtgggtactgggggagtgggtactggggagtgggtatgggggttgggtactgggggaagcatgtactgggagagtgggtaatggagtgggcactgggggaccatgtactgggagcaggtactgggggagcgggtactgggggaagcgggtactggggggagtgggtactgacgagtgggtactggcagcagcaggtaatggggggagcgggtactggaggaagtgggtactgggggagtgggtactgggggaagtgggtactggggggagtgggcatcttttgtcatttcctgcactgtcactctattttattctaatatgcattagttgacagatggttttctcctaaatgcaaaagtgcctcagtcctaagaaaagcctgtttactggtaaatattcctaatttgcgtctgaaagggaaatctgcatgaaattgcattaaaatatttgcatcagcccagcccaggcagctctgcattcagcccatctgaggaccccagataagcctttggttggtgggaggtcagaggtcaggagcagccccttctctggtttggctctgtggtgaggacctcaaatgccccaggacaggcctgtcatgggtgggctcagctgatgaggacttcgatggccccaggacaggcccgctgtgggcttggctgtgtgacaaggacctcgaaggccccaggacaggcccgtcatgggtgggctcagctgacgaggacctcgatggccccaggactggcccactgtgggtttggatctgtgacaaggacctcgatggcccagacagccccaccgtggtgggcttggctctgtgacgaagacctcgatggccccaggatagacccgctgtgggtttgtctctgtgacaaggacttcagtggccctggggcagccccactgtggtgggctcagctgcaccccatcagcctgcttgctgcttactgctcttctcactctttttctatttctcaaaagtgaagaaaaacacaaaaatgtattttcgatataattaactgcacttgacgtattgacaaataggagttcatcatgaaacaacatcttttcctcctggaattgtgaatggcacacaggtttccacgttgcgctggctcacggatgccttctcaatactttcctgtgacttaaaggcaggagaggtgctgtgtgatgtggctgttgctatagcaacacattcaatttttattcaatatcagagtaaatagtcacataagatgaaataagtcatgtctgcctgtggcaacggcagtccctgcttctcgacatgcttccctccctccctgtgcccttttctaacattttcagctgcatttttataaaaatatgcataatatagatttcagtcgcagggacacggcttattgtctgaggtggggacttggtgatgtctcccgctgaagaaacggaggcccgccttgtgcctgggtcttagtggaaggcaagattgtccctgcaggttccctagggagcctggctcacgtggcaccaaagttcatttttatttaaacaactgaactctagggatgttcataaggtccctcagtgtgtaataatccagaaacccctttcagtgggtcaacccatcagacttggagttgcttaaagagatgaagaaaattaacaggatcctgcaccctgaaagctcctgctgcagctttttcagaacggcagcagcacagtggcagcaacagttgtgatgctcgccccctcccggggtgtgttccacacttcacatgcatgtcatctcccttgtccccaggaggcaacatttcacagaggggagactgaggcaggagaagtgacatggcagaaccggcagccggtgccagcaccaggcagcctgactcaggccaggtcgcactccctacactgagccccacatcaaattaagttccttttctcatggagattcctgaaagctgaaatgtccttagctacatctatagcacattcgcacctggtatactccatgaatatgaaacttttacctggcagagttcatgagatacaggtgggaaaccctaattttcaaccctggaattgtccagctagggacatggacgctgatgagcagagcccagaggtgtgtctgtcaggggaaactctcctgttggggccagcaggaggaacttggcttgtttccagcgtcaggcgggtgcatctgcatccccttcagggaccctccttctgaaagccccatgcccttctgctcaggtgcctttctctgcccaggtgggcatcaggtgccctggagaggctaggcctgggtggctgccaggatgcattgtgtccaatgcccccagcccaggcccacctgggcactgtggagtggaggaacgtgctgcaggtgtaagggcagccttgctcccgagacagtgaacatggagccaagcccaccctggtgggggctgtcgttccagccttgagaccgccctggcatcacattttccataatcacttatcagggcagccactgagcatccaggccaactcaggtaccccttttgcttgagccagtggcctcaagctactactctgtgtggggaagaaaaagtagtgtctctgttcttctgagttcctacgaggggtggactcctgtaacaaaaaaccgattcacaagagataaacaagccgaagtggattcacatgtgcacctcctgcatccatgagccatacccagagaaacgggtcaatcacaaagaggtgtgtagactcaggcttcagcaccatcatctgctgagacagagcaggaggagcaatgaggaggtgatagggtttggctgtgtccccacccaaatctcatcttgaattgtcactcccacaattgccacatgtcgtgagagggaactggtgggaggtcattgaatcatgggggctggtctttcccatgctgttctcgtgacagtcaatgagtctcatgagatctgatggtttataaagggcagtttccctgcacatgctctctcttgtctgccaccctgtgagatgtgcctctgaccttgtgaggccttgtgattgtgaggcctccccaaaaccacgtggaactgtgagtccattaaacctctttctttcataaattgcccagtctcccgtatgtatttatcagcagcatgagaacagattaacacaggaggggaccagagaagccggtcagcaagggcaaggcctgtcatgcaccctcagtcgagccctctgcattgatggggtttccagtgacgagagccgtcctcttccaggtgcagagaggagccacccttacaaatggaggactcctttataaacatagatctctcttatagaagagaatcaacttgttttcagagcttctcctatatcttcagtttctcaaaataatccttatgccaaaaaggcatacatttattaggatggtgtgttctggtctctgacagtcattttggggtgctatgttctggtctctgacagtcatttttggatggtatgttctggtctctgacagtcattttggggtggtatgttctgttctctgacagtcattttggggtggcatgttctggtctctgacaggcattttggggtggtatgttctggtctctgacaggcattttggggtggtatgttctggttttcgacagtcattttggggtagtgtgttctgatctccaacagtcatttttggggtgatgtgttctggtttctgacagtcattttggggtggcgtgttctggtctccaacagtcactttggggtggtgttttctgatctccaacagtcattttggggtggtgtgttctagtttctgacagtcgtttttggggtgatgtgttctgatctctgacagtcatttttggggtggtgtgttctagtctctgacagtcattttttgggtggtgcgttccgatctctgacagtcatttttggggtggtgtgttccaatctccgacagtcttttctggggtggtgtgttctggtctctgacagtcatttttggggtgttgtgttctggtttctgacagtcattttggggtggcatgttctggtctccaacagtcattttggggtggtgtgttctggtctccaacagtcattttggggtggtgtgttctgttctctgacagtcggttttagggtgacgtgttctgatctccaacagtcatttttggggtggtgtgttctggtctctgacagtcatttttggggtggtgcattccgatctccaacagtcatttttggggtggtgtgttctgatctccgacaatcattttttgggtggtgtgttctcttctccaacagtcatttttggggtgttgtgttctggtttccaacagtcattttggggtggtgtgttctgatctccaacaatcattttggggtggtgtgttctgttctctgacagtcattttcgggtggtgtgttctggtctctgacagtcatttttggggtgatgtgttctgatctccaacagtcatttttggggtgatgtgttttgatctccgacagtcatttttggggtggtgtgttctgatccctgacagtcattttggggtggtgtcctgacagtcattttggggtggtgtgttctggtctccaacaacagtcattttgaggtggtgtgttttgatctccaacagtcatttttgtggtgtcatgttctgttctctgacagtcatttttggggtggcatgttctgttctccaacagtcgttttggggtggtgtgttctgttctccaacagtcaattttggggtggtatgttctgatctccaacaatcatttttggggtggtgtgttctgatctccaacagccattttgggggtggcatgtttttatctccgacagtcattttggggggtggtgtgttctggtctctgatagtcatttttggggtggtgtgttctgttctccgacagtcattttggggtggtgtgttctgttcttcaacagttttttggggtggtgtattctgttctccgacagtcatttttggggtggtgtgttcttttctctgacagtctttttggggtggtgtgttctggtctctgacagtcattttgcggtggtgtgttctggtcttcgacagtcatttttggggtgaggtgttctgttctccaacagtcatttttggggtggcatgttctggtctttgacagtcatttttagggtggtatgttctgatctccgacagtcattttgggggtggtgtgttctgttctccgacagtcatttttggggtgatgtgttctgttctctgacagtcatttcagggtggtgtattctggtctctgatagtcaagtttgggatggcatgttctgttctccaacagtcatttttggggtggtgtgttctgatctctgatagtcatttttggggtggtgtgttctgatctctgacagtcatttttggggtggcgtgttctgttctccaacagtcattttggggtggtgtatctggtctctgatagtcatttttggagtggtgttttctagcctttgacagtcatttttggggtggcatgttctgttcttcgacagtcatttttggggtggcatgtgctgatgtatgacagtcatttttggggtggtgtgttctgttcttcaacagtagtttgtggggtggcatgtgctgatgtatgacagtcatttttggggcagcatgttctgttcttcgacagttgtttttggggtggcatgttctgatgtatgacagtcatttttggggtgatgtgttctcatctcctacattagaaactgatggatggtggagggccctagacactgggccctagtagctctttagtagtttacaggcacaaactttaccttcactttcattcctgtgaaacaaaggatctattaaaagtctaattagggttgtgtgtgtgcaaacccttttactgaagtgccaatctatttttttttttttaatgagatcataaagcaaaaagaacattcttaagaagtaactttcttctgttgacaagcacttggacttaacgttccacgaaaacaggaaatcctctcctttctcgtaggcagagacgcatccctgcagtcacaggggcttggcctcagatgtctagggtgtactgagggggtgttgccatgttgaccatgtgcgtcctctctggctgccacaacagaatactgcagagtggggggcttcagtcacaaacctttattgctcacaatcctggtggctgaagtccaagatcaaggtgtgggcagggctggtctctcccaaggcctctctcctgggcttcagatgccgtctctgcatcctcaagtcctcacccctctgtgtgcacctgtgtctgcatctccttcctacaaggatgccagtcacatgggatcaggctcaccctgatgaccacattttactgtaatgactcctgtaaacacccccatctccacataccatcatgacctcattttaccataatgactactgtaaacacccccatctccacataccctcatgacctcattttaccgtaatgattcctgtaaacacctccatctccacataccctcatgacttcattttatcataatgactactgtaaacacccccatctccacatatcctcatgacctcattttaccgtaatgactcctatagacaactccatctccacatacagtcacattcggaagttctgggattagagcttcccataggcactttggagagactcaattcagctctaaactctgaccctgttagtgtctcatttaactcagagtgcctttttatcatttgttccaaaagatagcattgggtcaagctagcttcagaggaatacatctatgccattttcctgcaccatatcaaacaataaattaaaaagtgaaaaattctaccaaggcaatcagggagagtgaattaatgaataaatacatgaataaaatttagcgcgatttttagaaggataataggatagttttgtccaaaaacccttcagatccacggttcagtctgagccatccagccatagcaataaagtaaaaattaccacatggtacaaatgtgtcaccgtcaacgatgctcagcgtggagatggcctgcctgccctcagagctggagaaggacgtggctgcatctgcctatgggccgggtcccttgggtgattttgcagggaggatgtacagggtcctccttctgccaacgccacatgatgaccaagactcacacctcccaggagctgccggtgccccctctagcacggggaccctaaaaaattcttgatgttgaagcaatataacttgtgttgcaattttacttctttggcagtgttgtcttttcctttgcgatgtatttcctgatagaagccttttcattttggtgtgcggcgggtagagtaatgaatttattttagaaatgtcagtggcattttatgatgctaccttcagcagcaacatcacagggcctgattgtgaagctgctaatttacagatcgtctctaagtgaacgcaaacaaattctggtcctcagagccctgctaatatacaatgttcaatttttaatttccagtccgtcttagattacggggatgaaaaacaatatttaatccctcgttaacacatgaataagcggaagctgtcattttcaaccagacaataacgggattatctcaaggactgtcagtttatgtgaaaacattatgttgcccaaattttcataaaaattagcagtggataatactcaagatcagagcaatggaaagagaaaaatatgcattcatggtaataaatattcatatttgtctgctcaggagatgaaaatctaatcaaggggctattgaagctctggctttttttttttttttttttaacaaagacgtttcatctaaattgggtttgatatggaaattagtctcactcaaagtcctccaggccacgagtaagccgggctcacgtggggtgaggtggccactctatcagatgtcgcttctggcatgggcctcttagacaacagccaccaatgctggggttcacactgtctctcttggttcagcatcctcagagtttaatgcaagggagtgcttggagccccctccctttttaaaggaaaaaaaaaatatgatttcatgccggttaactcccagctactgcagggttaaaattgtctgtgtttttgcttttgttgacaattaccataaatcagaagacactctgcatggagcttaatgaaatatgtatgattttaaaaagaaaagatgggagctgcaggacgttgctctgtgtgtgtgtgcgtgcacgtgtgcgtgcacgagtgtgtgtgtgtgcacatgcacgtgcatgcgtgtgtgtttgggtgtgcgtgttggggggtgtgttcctgctgttctcatggaggctgtgcttttcctacacatgggcaggcttgaaaacacagaatccaagagctcctcggtgagtaagtgtgggtgcacggtatcacactgacccttccagccccacggaatccgagagctcctcggtgagtaagtgtgggtgcacggtatcacactgacccgtccagccccacggaatccgagagctcctcggtgagtaagtgtgggtgcacggtatcacactgacccttccagccccatggaatctgagagagctcctcggtgagtaattgtgggtgcacggtatcacactgacccttccagccccatggaatctgagagagctcctcagtgagtaagcgtgggtgcatggtatcacactgacccgtcaagccccacggaatccgagagctcctcggtgagtaagtgtgggtgcatggtatcacactgacccttccagccccacggaatccgagagctcctcggtgagtaagtgtgggtgcacggtatcacactgacccttccagccccacggaatccgagagctcctcggtgagtaagtgtgggtgcacggtatcacactgacccgtccagccccatggaatccgagagctcctcagtgagtaagtgtgggtgcatggtatcacactgacccttccagccccatggaatctgagagagctcctcagtgagtaagcgtgggtgcatggtatcacactgacccttccagccccatggaatctgagagagctcctcagtgagtaagtgtgggtgcacggtatcacactgacccgtcaagccccacggaatccgagagctcctcggtgagtaagcgtgggtgcacggtatcacactgacccttccagccccacggaatccgagagctcctcggtgagtaagcgtgggtgcacggtatcacactgacccttccagccccacggaatccgagagcttctcggtgagtaagtgtgggtgcatggtatcacactgacccttccagccccacggaatccgagagctcctcggtgagtaagtgtgggtgcacggtatcacactgacccttccagcccctttaaggagcctcagggtccgtgctcttgagcactggccggcccagcacggggatccctggtgcatgaggtctcccgtggaccacaggccaccaagagggtatcttttggggaactgaatctttgctctcttacacttataaattcctagacagcaaagctgagatgggcttgtctgagcctcaggaaggaacacgggcaggcccttcagagtcagagagccggaacaccgccaagtagccttcgctccgcatcaagaacgcttcctactgacatacgcgggattttccttggggcgctgttaattatgttacagagctgaatgtttatattcacacacattttaaaatctcacccctgacatatttcctgttcctcttctccccggtcaagcagagctgatcgtgggatgttttgatgattttggcgaagggcttggggaatgtggtttctgaagaagacgtctctgagcagactccctcctctcctgtccctgctgctcccagctgtgcagtgcctgttcctgagacctggctctgaggcccacagggagggttggctgttccccagcccactgttaggaacaccttctgcaccacccaccaagacccgggctttgatgctgggtccagagacatcaccttcctctttgtgacgtgggcggggtgcacggaggggaggagagaggaccccgaggaaaccctgggtagggcactcggacctgggatccccgaggaaaccctgaccatggcacttggacccggggccccgaggaaaccctggcgctgcactcagatctggggtccccaaggaaaccctgaccatggcacttggacccaaggtccctgaggaaaccctggcgctgcactcagatctcgggtccccgagaaaactctagtgtggcactcggacccggggtccccgagaaaaccctggtgctgcactcggacccggggtccccaaggaaaccctggtgctgcactcagatctggggtccccgaggaaactctagtgtggcactcggacccggggtccccgagaaaaccctggtgctgcactcggacccggggtccccgaggaaaccctggtgctgcactcagatctggggtccctgaggaaaccctgaccatggcactcggagccggggtccccgaggaaaccctgaccatggcacttgcacccggggtccccgaggaaaccctggtgctgcactcagatatggggtccccgaggaaaccctggtgccacactcaggcctggggttcctccagggactgccacatcctgcaccttcccctgtgggtaaaggctagcgaggccgtccagggcatcaaggcccatttcagaacgtcgtcctcctggagggccggcgagctgcgtgtccctagtgcctcctgcggctcccagaggctcccccggcatgcccccgtgctggcactgtccccaggtggctgctggcacccacacagcagctgccccgaccttccctcttagaaagttctccgccctggggtgcaggggccatgtgaagccccatagagcaccattcccgctgcccccgacccatcctcactcttggggtgcagtgcggcctctcccagccccacgtgggggcgctggtcttcccaaggccaccctggtggacgtggaagctgctgattgccgccgtctgcctgccttggccgtctgtgcatcttcctgggagaaacgtcttctagggccgtttactcatgagaggacctgccaaggaactagattatttgtggtggtgtcagcatccaacagtacttttttctaaggaaagggataacttgccacaggaaaagaaaatgctgtggctttagacacagccacccatcctgtctccaggctctggtgacagactctgtcctggggccgctgctggttaattcaggcttctccatgctgggaattcgcttccagaagagtggcccccaggatgctttgccttcagggtcagccctgtccgccttacctcaggcccagcagaaatagcaggggatgggtcacaacaggagaccaacacaaaaacagggcttggatgagcccactcgggcacccagtccatggtccagggcactgaggtctcgtggagaggagggagggtgagcgtggactgcattgtttgcaaggagtcgtgaattctgacactgtccaaggagctgcaggtgctgccccagatggagacagccaggaacacctctaggccactgcagtggtgatggccaaggcatacctgccctgctgaccctctgcagccccgtgcctgccctggggatgcctggcctgggggctcggcccctcctgaccctctgcagcccggtgcccaccctggggatgcctggccttggggctcggcccctcctgaccctctgcagccccgtgcctgccctggggacgcctggcctgggggctcggcccctcctgaccctctgcagcccggtgcccaccctggggatgcctggcctgggggctcggcccctcctgaccctctgcagccccgtgcccccctggggatgcctgacctggggactcagcccctcctgacccccgaggcccaaggtgctgctgctgctgcagccaccaggggtcacacttgctcgcctcctgcacaggccatggccccacaatcagggctgcaagaagagatggagaaagagacaccttggaagtggctggaacgatctccctttggagtcaccctgtctgctggaattaagacttctgggactgcacagtgaagttcccggcaatgactcattttctgatattggtgcctgaattgcagcttccgtggctgccacttcaggaagataacgtgtgacccggagcaaggttatcagaaactgccgatagaggtttgccacctcccaccatgaatacggacgctgataggaggaagccctcacgcgctccctcggctctcacggaacgcctggaaactccccagctttctcttgtttgaagaaggagcccccaggagacttccaggacagcacggtctggaccgtttccaagccctttaggaaaactttgcagcaaaattcagcatttcgaaaatagtgaagtcaaggtgaccccgacacagcctgggctcctcctgggacatacttcctgtacggctgtcagaccacaagtctacccaagggcatctgtttgcctgtgagtgagcgtgtgtgtgtgtgtgtctgtgtgtgcgcgtgtgtgtgtctgcgtgtgtctgtgtgtctgtgtgcatgcacgtttgcgtctgcctgtgtgtgcctgtgtctctgtgtatgtgcacaagtgtgtctccgtgcacaagtgtttctctgtgtatgtgcatgagtgtgtgtgtatgtgcacgagtgtgtctccgtgtgtgtatgtgcacgagtgtgtctccgtgtgtatatgtgcatgagtgtgtctctgtgtgtgtccatgagtgtgtctctgtgtgtatatgtgtatgagtgtgttcgtgtgtgtgtgcatgagtgtgtgtctgtgtatgtgcatgagtgtgtctctgtgtgtgtgtgcatgagtgtgtgtctgcttgggttactttgctacctgcaagcaaacccctgccttgtgctgctgggtggcacggccttctctgcccccctccgcttctccccggaccccgggagctgtctgtggagcgagtaggaaatccccctactcacgagaggccgtgcaggtgaccccgaagcttcactgaaataaaagctcgagttaagggggacatgaacttccttgtgaacatggttggctggcaggaaggcactgtggctggggccatgtggacagaagcagaggcaggatcggggcagggcaggagagaggggacaggagggggcagaaagcaggagctgggtcaggtccacttcacctgcgtgtgtcacgttgaaaatgggctgagaggtgggcgaggccaagtggagcactgcagtccaggcttaggggctgtgatctgatttgcaggccatggggagccatggagtgttggggtgaagggagcagcctgcccagttgtggagggggaaacagagggaggccagaggcagactgagggccgcttcagcaccttccgcaggacaaggctggagctaggcagagcagcagagaggccagagaatcgttgcagaaggcctggtctgaagatgtgtgatgtgacgtgccaccactgagctgtgccaggcctgggccacctcactcccccgaggtcccgagagctcttcccgaggctgctcagggtcctgggactttgccggagttgtggcagacctagagccgtcaaagtcagtgggacaggaaacaactttccccggacggccctcctgccgtgccctgaagcccctcttgtgcccagctggtcgtccatccctcctcctccgctttccacctcctcttctctcccaggtgccccctgctgacctgtgcccccagtgtgatgccgagtgctgcgctctcctcagtacctgaaagcagggccctctgcccatcccagagaccagcgcaggaaattctgcttgaggacagtacgttctcctcccggcccccacgacgagacagaccttgaggacagtacgttctcctcccggcccccacgacgagacagaccttgaggacagtacgttctcctcccggcccccacgacgagacagaccttgaggacagtacgttctcctcccggcccccacgacgagacagaccttgaggacagtacgttctcctcccggcccccacggcgagacggaccttgaggacggtacgttctcctcccggcccccacggcgagacggaccttgcagacgctcccagcacatgtccttggcacacgtcggagcaaagcctcggggcgcggccctccgggggtttctccagggaagcgagcaaactgggaagcgtatcccatccagagcctcagacgaggtcaggccaggcggctgctttctttcctggtgcacattcatttattcaacagatacttgctcagcactcgctggtggcggaaacattggtggataaaggagagacagtcggagcctccccctcccacaagcagcgaggaagcaggacttcagggcaggcaagaggcccggtcagagggaatgaggcagaggtctcagtgcaaaatggaagcgagagcctaggagacagggctcgggtgagggacatacacggccaggggcagttcccctgttccgtggccagttcccactttccatggccaggaagctttgtggcttcctctgtcaagttctagtgcagacagaaaagtgtcccaggaagaggacaagcaccacctgggaaatgagtgctcccagcaaggggaggtggcctgcggacatgggtggcccttgaaggggagctgtggagaggcagcagcagacagggcccacacagaaagcacccgtcacccctctaccccgccaggaagctgaggaaactctcaggagccctgacagggcggggaggggacactccaaggaggggcatgtggactgagggcctcagggactctgcaccctccttctacctcctgcaagatggagcctgccccagttggacaggcggcctgggcgcaagagcgcctctcagtgcttagttataccgggaaaccaaggaggccaccaagtgtcaggacacagttacatgggcattgggtaggggaaacagctgtgaggacatagcgtgggaaggcactgggtatccatgtgtgcggaggcactggatatgcgtgtgtggggaggacactggatatgcgtgtgtggggaggacactggatatgcgtgtgtggggaggacactgggtatgtgtgtgtgggaaagacactgggtatgtgtgtggggggaggacactgggtatgtgtgtggggggaggacactgggtatgtgtgtggggggaggacactgggtatgggtgtgtggggaggacactgggtatgcgtgtgtggggaggacactgggtatgtgtgtgtggggaggacactggatatgtgtgtgtggggaggacactgggtatgtgtgtatgcggaggacactgggtatgggtgtgtggggaggcgctgggtatgtgtgtgtggggaggcgctgtgtatgtgtgtgtggggaggacactgggtgtgtgtggggaggcgctgggtatgtgtgtgtggagaagcgctgtgtatgtgtgtgtggggaggacactgggtgtgtgtggggaggcgctgggtatgtgtgtgtggggaggacactgggtatgtgtgtgtggggaggacactgggtatgtgtgtgtggggaagcgctgggtatgtgtgtgggaaagtgctgggtatgcaggtatgggaaggacgctgggtatttgtgtgtggggaggtgctgggtatgcgtggccacatcctgtgttctggagctgagtgcacatgtgtagacatgggtgtgtgtgcatttttgtgggtgtgtgggtgtgtaggtatttaggggtctgtgtgtgtgtgtgtatgtgtgcatatgtgtgggaaggcatatgtgtatgtatgtgtatatgtgtgttagggaaatgttaaccctaagacattactagtttataataggaaaaaatccctccaaaaataatactgtacctcaagcctttgtattacaaaaaaaaataaaaggaggagggtgaagttgtgccagtgagtcccggttgctcttcaggggccctggggtggtgtcggccaatagagacaaatgccattggcaaacacctagggtgcctcctacatcacagctgccgatgaacgcgaccttgagtccaatttagaggaagcttttggactctcacatcttacaagttctctcagaggtcacgcctgccctttcccataagcagaacaacccaaatcccccaggcccacagttctcatatgtcagcctgcatcagaatcacctgcagggcttgtaaacacacaggttgctggttcaccccagaacctctgactcagggggtccgaggcagggcccaaggatctgtgtttctaacaagctccctgggtgctgccagtctggggaccccactttgagaaccacagctttgagcaactgggcctccccagctgagaaaagaggaaagattggtgcctagttcagaaccgtcaactttggaagctctgggagccagcttcttcgtaaggaagtccaggcagccctgaggcccctaccccagctgtgcagctcatggcctagcgcccccagcaccagcactgcaagagccttcaggtcggggacatttcaacatctctgagccaggccatccaatccccaacatcgaacgcccaataaacccaaagctatctccacttccagagtctcacagaaagatcaacatcaaagtactttaagaaacagatgactgtggtgtgcagccccttacgcaacccaggtgctctgggggatcaaggtgggggtgcaggtgcgggaggctggcacgaggccatgcagctcctggccccagagcaggattcctggcggctcacaggcattactctgagttcagccagcaccccaagcagccatcaggcttgttatggaagagattctgaagaaggtccatggaaaatgtggatcatggaaaactatgcatggatttcaaaaatctttctgcaccaaaataaactcatactaacttgttgtaacatgtctgaacaggatctagtttaaggctaggaagagaatatatcagtttgaaaagagcccctatcagagcaacatgaattctgctaaaattgaaggaagaacaaacatcaaaattgtggtgaaacatgggtggaacaatgatgaagtcattgatgctttatgaaaagtttatagggacaacaccccaaagaaatcagcagctttcaaatggagaactcattttaagaaagaatgagatgatattgaagatgaatcctatagtggcagaccccctcatcaatttgcaaggaaaaaattaaccttgtttatatcctaattggagagaaccaacaattaacagcagaaacagcagccaacaccatagacatctcggctggttcagcttacataattctggctggaaaattaaagttgagcaaactttccactccatgggttccaaaaccattgcacccagatgagctgcagccaagggcagagctttcaatggaaatttttaacagcggaatcaagatcctgaagcatttccttgaagaattgcaacaggagaggaaacatggctttaccagtaccatcctgatgaccaagcacaaccacagcagtggctaccgagaggcggaaggggtcccatcgaagcaacagcagactgatcaagagcaaaggtcatggcagtagatgttgggatgctcaaggcattttgcatgttgactttctggagggccagagaaaaataacatctgcttattatgtgggtgttttgagaaagttataaaaactttagcagaaaaatgcctgggaaagcttcaccagagagcccttctccaccaggacaaggcttcagctcactcctctcatcaaacacgggcaatttagcaagagttccgatgagaactcatgaggcatccccctacagtcctggtttggctccttctcacttctttttgttttccattcttaaaatatatccagagggtacccatttttccttagatagtaatgggaaaaagactgcattgatgtggctaaattcccaaggtcctcagtgccttgggaatggactaaatggtgggtttgatcccttgcaaaagtgtcttggccctggtggagattatgttgagaaataaagtttatatttttatttttaccttttaatccaatttttctgtgaactttttgaagtccccttatatttgtctgctaactcaggaaaaatgtaaactttttctttactttggcattaagtgtaactctgtcatcaaatgaaattatccctaggaattttatatgcatggggataagtgagcggcctggagtccacagacctcccagcaggcctccaaggccctacccagacctcccatgctgggaggctctgcaagtacctaagcacacgcttaggaccctggcaaagttgaggtatcaggaaagatttgtagaaagaccttgatattttaataaagaaaacatcttgtcatccagggaaacatcagaaatttgacttgctcacacgcattttaaaacttagtacttacagatttggaattacacgtgtcagggtgtttcgggacattgggaagtctttatcccactggcctttatgaatcttcatctggttctacatggaactgagtccccaaacgactgtggtggcagaaagatggagggcgcgggaggcctggcctcaccactggtgctaggcaatgctaaatgggttgtgtgaccctcctggccttgagttccccaagactgaggtggcatctcagatgatcaagcagaattttccatgtcgagcatttcccagttaccagccacgcatggcccggagtgcacagcccagagggagctcacaatacaatgaagaacgaccgctgttgagtggatgggcgagtgggcaggtgggtgagggagggagtgagcaagggaaggcatagcccctcatctcgagggctcagagttatttccccggccagtcctcaggctgggaaatgggctgcacctttttctccatgtgtcatactttcttccctttaaaaaatttaaccagttcttggcattggtagttttgctaaattaaaccagggaggacctggaagacagcagcgcagccctgacactcacaaggccagtttcctccaggcatggttttaatccagaggctgggtctgctttcctacagctgggccatgagctgctgccccgcagagatccaatgtcctggtgtcctacgttcatcgtggagatgatggaaacaagctcagacaggaaaactcatcacttggcaaactccaggcctggggctgcctgcagagagccctgttcagatgggcttgccgagtcccagcccaccacctcgatgggaagcagttgtaggtgcaccactgggctgtcggagccatcgggaaaggaacccttcctgtgcctggccttaggataactgtgtctggacccacagcccacaccccactcgtgaactgtttcgggccctttctaaggtgcatgtgggcctcttgcccaggatgcgggctgggttcctagaggactcaggtgatcctacctgcggcagtgagttaatctccagggctcaggaggcctgctgtccagaggaagtctgggcagcttgggctggcgcaggcacggtgcccccagtcctgctcttgtggactctgggggcatgctgggcctgggcacacctccaccacgcctgcggccctttgctcacggactgtggattggatctgagcagtctagggaccagctcctcgggcccatgcagaaaggaagagaaggagtctccctggactggattctgggagggaccctcactctttctgcctgaatgaacattagtgcgtggacttttccagtctttccatctgttctgttttgaagtttattcatgttgatttacgtgaatctagttcactctttttgcctctggtgtcacccttcagtctgggcggggtggtggccgtgtatccagggcgtcagggacagggtggtggccgtgtatccagggcgtcagggacagggtggtggccgtgtatccagagcgtcaggggcggggtggtggccgtgtatccaggtggccgtgtatccagggcgtcagggacagggtggtggccctgtatccagagcgtcaggggcggggtggtggccgtgtatccaggtggccgtgtatccagggcgtcagggacagggtggtggccgtgtatccagggcgtcaggggcggggtggtggccgtgtatccagggtgtcagggacagggtggtggccgtgtatccagggcgtcagggacggggtggtggccgtgtatccagggcgtcagggacggggtggtggccgtgtatccagggcgtcagggacggggtggtggccgtgtatccagggcgtcaggggcggggtggtggccgtgtatccagggcgtcaggggcggggtggtggccgtgtatccagggcgtcagggacggggtggtggccgtgtatccagggcgtcaggggcggggtggtggccgtgtatccagggcgtcaggggcggggtggtggccgtgtatccaggtggccgtgtatccagggcgtcagggacggggtggtggccgtgtatccagggcgtcggggacggggtggtggccgtgtatccagggcgtcgggggcggggtggtggccgtgtatccagggcgtcgggggcggggtggtggccgtgtatccagggcgtcgggggcggggtggtggccgtgtatccagggcgtcgggggggggcggtggtggccatgtatccagggcgtcgggggcggggtagtggccgtgtatccagggcctcaggggcggggtggtggccgtgcatctcggggcacaggcactgcttctgaggagaccccagggtgtgtgtggcaagcactggggcgagcctgggactcgggccagacagcctcggtgcagaccctgagctgggcactcatgctgggtgcctgggagaatgcacaccagcctcagctccacctctatggacgtgtttcctgcagacctcatggttgtcatggcaagggctgagaggcacatgcgctgtttagtaggtcatgagcactgtgtgtatgtgtgtgtgtgtgtacacgagggatatgggtgtgatcgtgcatgttcgtgtgtgtacatatggtcgtgtgtgtgctcatgcatatgtatgtatgtgtgtacatgtggacgtgtgtgtgctcatgtgtatgtgtgtgcttatatatgtatataactctgcatatgcatgtgtgtgtatgtgtatttggatatgcacgtgtgtttgtgtgaatatgcaatgttgtttcctgctcactgactcttaattgatgaaacaaatgcccagcaggccaggatgggatttgagccccggctcatggtggggcctagaaagtgacgactactttccctttgcagaacccgggcctcactcaagtggtgtttgtgtagaaggaaaagaaaccacaaaggtgcatttgactcccattttctcgcatctgctgagagcgtattcatgcacaaaagggaaaggtccttgttctaaagcaggagagtacacgtggctgtcagaggttgcgcggcagcggggaaggaggccggggagcatctgtcagttgccgcaatgcaggggcgaggtcacagaacagagggtgtgctggctgctggggagggtgtggggctctggggccttgaccctgttaaccgtccaccctgccctcccgtctgctcctctgacagcagcttctggaggccgggcactgtggccaggctggcacaagtaacatcaggacctggggctgcagccccaggagggcccattcacctggctgtgacccacaggcaaataccgcacaaaacccgtggcccgtcttgcacacagaggccactggaaacacagataaggctgtgtgaactcatctctccactgtgaagacaacactgggaagacagcagatcctcctggcactcgctgagggtctccactgccctccagatgccgagctcccgccttccttcccccaacccccgacaggctcggcacagtcagaccagctttgcagggtccgtcgtggccccacggtgagggtcctgcttgcgagctgaagctgagatggacgtgtgcatgcatgaggatgagcatctctgtggtttaggtgaggtggggtcacccacctccaggacccctgactaataatagcgctgagattcaaactcaggtagcagatcagttaggatcacccaaacaagtggacatgaaccagtgggatgttcagcagagcagaagccgattcctcgttcatcccctggtgcaggactgcggaatgcgtcagctgggcagtgccaacctgcagcccctcaggggccacccccacagtgcccggctcccgtctcacctagggacctccatttcccggcagcagcacttgggaaggagcctgcgtgggccagacccagggagtgcaccgctcctctccatttcggtggccagagtcaacccccctgcccacccagccacacatgcacacacagccacgtgcccaggaggggagtgcttggatttgggcctatgtggcacagccttgggctggacctcagagacacaggtcctaccacgaccccacacaggtgcctgccagctgtgagcccttgtgcaggttgggggtcagggagggcctgagatggcggcattttatgcgggggcagaaactgcaggttcaggcacagaggaggggctgtcacctgccagaacatgcctccctcgatggtaccaccttggggcccaaacctgggtctcagacaagcactttgtcctgagatactgacgtctatgagcgtttgagggaatacgtgctcaaacctgacctcctgcagagaggatggggcagctggttcctggccgccaggctgcgtttcagcagctcacaggtgcataccacacacagccccgccgtggccagtcaccgtgggccagccccacatggcagcttccagaggcaccacagggtggcggccccagaccttggagaaagtggcacaggcaatgtaaacctttgcgaccccaccatcctctcaatctcatccccaatgcctcccctggccccaacaggacttcctcctgtcggcctggaaaactagagcccgggaggaacatctgcctaatacagcccatccccaggtgtcagcatccggggcccgtccccaggtggagcccgggaggaaacatctgcctgatacagcccgtccccaggtgtcggcatctggggcctctggatggtgcccagtgaacctcgggtgggctggaccctggatggggggacccagtcacagatctggatggtgcccagtgagccttaggccaggctggaccctggatggggggacgcactcacaccctgtgtgtgaacagtcgcttggaaggagcagcgatgccgggactcagcttttctgcatcttcagagcagctttcaaatgcttttggatcaaaaccacgtggccggcagaaatcgcacaattagcttcgacatagccgtggcttcgggcagggtggtcctggccagaatcacacatgcagagagcgtttttggagcctgtactgtctgctcaggctgccgaggcaaagtcccacagacagggcagcttaaatgatggaagtttcttttcacacggctctggaggctggaagtccgaggtcgaggcgtgggcagagcccgtttctcctgaggccactcccccgcctggtagatgccatcttcatcttcaggtgtctccacacgtgcacgtctgtctctgtgtccagatatccctttctgataaggataccggtcctgctgggtcagggtcgccataagagcttgttttaccttcatcgcctctgtaaagcccctgtctccaagacgccacacgctgaggtcctgggggtcaaggctgccacatgaacttgggggcgcattcagcccatcacagggccagtgaaccacgctgcagtttttaaagaattatatttatatctcaaagttttgaattacttttaatttttttcttttgaaaaccagttggtggtataaggtttcttgggcacaagtctggcccagccaggtgttcagcatcaactgtgacttcacaccccgagctagtagcatgggccaggattgaccctggcagaggtctctgagacgcgtcgccgcccaggcaagctgggaaggaggggaagacctcgtctccactctgcactggggcattgggcagcccactggctccgtgagacctgtaaaagcaaaggttttgtggcacagcaggccgagagggtgccgtgtgctaccctcctgcagacgtacatcagccacgtaaggcagaaaaatcctgtccaaaagtctgacagattacagcggaaccttctcaaggctcccagaccacacagcctacttctcctgtaagactgatcagagcgcttggagaatgctggtccatgcaaaactgaatccccaggtgtgtccagggccccagagccggagcacaggaggcactggcttggctgccgtcctttcttgtaactgcccaccaagtgccgcctgacgtgaatcccagcctcctcgcggtgccgtccgagctctgggctttgtgtgtgtcatgtccaagttgacaagtggctgtgctgtgagcgtcactgtcctcctccccctcatctttcaggaaactgctgtgactttaaagccggtcctcgccgcttcccgcacacctcgccgcttcccgcgcacctcgccgcttcccgcacaccaccaggcttgtgcttcccggagctgggtctgtgcacgtggcatccgtgcctctaaaggcgttgcaggccggtaagaggccctgctattttccattcatcccataagcgtttttaaatctcagggactgtgctcagcactggaaataatttctagaacatgattcttgaccagccaagcctgcaccggtggttccactctcaaggcattttaaagcaaggtaacaaatgtatgttgaccagctgggcacccatttctgttctaaaaagagagatgaatatcaatgttaaaaagtcatggatcctgaccccagttagtaaataatctagtggagaaatacaataaatgcacaacaattaaataagccggtggtgtacagcaaattagcacacgtgtgaaataagcaagacattctgtgttcagaagggaatcccctagccgtgggctcaagtctgtcagggaacttcctaacagagggcacatgagctaatgctataggctgaactgtctccgcagaaagatatgttgaagtcctggacctcggcagctcagaatgggaccttccgtggacataggactgttgcagacacagttcgcttggtgaaggaggcaccgtgctgcagtaggtccttgatgcggccatgtccctgcgacaggaaggacaaactccagcacacagagtcctcgaagcagcagtgtccctgtgatggggaggacagactccggcacacagagtcctcgaagcagcagtgtccctgtgatggggaggacagactccggcacacagagtcctcgaagcagcagtgtccctgtgatggggaggacagactccggcacacagagtcctcgaagcagcagtgtccctgtgatggggaggacagactccggcacacagagtcctcgaagcagcagtgtccctgtgatggggaggacagactccggcacacagagtcctcgaagcatccgtgtccctgcgacggagaggacagactccggcatgcagagggaagccgtctgcgtggctcggaggcaggagggaagcgctgtgtctgtgggccgagggctgctggcaacgcagaggctgggagtcaggaagggtcggtgtccccttcaaggccctgcagacacctccaagcaaggtctccaaacccagcctgtgagactgcaggcatccactgtttcaagcccatccgtctggagtcctttgttctggcagccccaaaagcctcacacagctcggctttgagtacagggagcgtgtctgcaggtaaggtggggaggccacacagaggcacagcggctgggccctgcaagactcagggagggcgggccagcatgtccgagggcaggaggcagatgccacagggcatcaccagctgcatgttgcacctcgacggcaaaacacagaagccactgcccaccgcagggagcgcagactgaagggacccgggctccttggccgagctccagccggaggtgcttccggtgcaatccaggcctctcatcctcccacggattccccacagagggcttcggttccattattgtatagacttcacgtatgtaaaaggtacaggaattcagcatttggaccccgtggggcagtgtcaccatggagcacgcacagggtgcctccctgagctggcacatccctggaggcatgcgtgcctctgccgacatcccaaagcgcccgtgctggggtcccacatggtgtccgctgtgccgtggggttcctcttccaacccccacaagaaagagaaggtcaccctgccccccacctctccacagctccctggactgggccacatttctttatcctcttcttggtttttaattaactttgggccagcccatctgtgcctgttctggactccagttttgacagctactgactgaattgcctggtcagttccgtgaaaaactagaaatagaaatgcacccggccagctgctgcctgagctgaccagccccggccgtcagtggccttccctggttggacggaccgtgaatgctgccagttctgtttcattttaactatgtgtatttgtataaatataagaaactgtctgctctctacccacagagtaattgtctagctctatcatctaattatctcaacacgtttagtgagcgagatattaaggcccagattagatattaaaaggcatcgttaaagaacagaaatgagatttgcatggagtggtatctagttccagcgtggaaacgcgttcacacagcactcaattagatatgtggactcagctctgaaacgttcctataggagaacaaagatgaaaattcattactacctccaaatactgccaactccgccatttcttttaaaactgcagtcttgggaagctccaagagtgttcgataataaccaagacgtggatcctgtgtgtgaaaagtggcccagctcctggagaggcgcgaaggctgtgggtggactgtggggtgggctgcttctctggggtcacgtggacatccctagagagagtcttggcttgggcaccaccctcaggtgtgtgtcctcaggtggcctgactgcagtgacctctgaaatccagggtatgcagagatcgcaggctgtgggccctgccaccacaggctggggcctcagggaattgggtctgggtcgttgcaagtctcgaggctcccccagtgggctgctgctccatagcaggctgtccccactctgctccacaggaatcacgaagccgcatgctgtctctggggtctgtgctgcagagctgggggctctccctgcaggagtgtgtacagtggctggggctctccctgcaggagtgtgggtggtggccggggctctccctgcaggagtgtgtacagtggctggggggctctccctgcaggagtgtgggtggtggctgggaggctctccctgcaggagtgtgtacagtggctggggctctccctgcaggagtgtgtacagtagctggggctctccctgcaggagtgtgggtggtggctgggggactctccctgcaggagtgtgggtggtggctggggggctctccctgcaggagtgtgggtggtggccggggctctccctacaggagtgtgggtggtgacggggctctccctgcaggagtgtgggtggtggctgggaggctctccctgcaggagtgtgggtggtgacggggctctccctgcaggagtgtgggtggtggctggggggctctccctgcaggagtgtgggtggtggctgggaggctctccctgcaggagtgtgggtggtggctggggggctctccctgcaggagtgtgggtggtagctggggggctctccctgcaggagtgtgggtggtagctggggggctctccctgcaggagtgtgggtggtggctgggaggctctccctgcaggagtgtgggtggtgacggggctctccctgcaggagtgtgggtggtagctggggggctctccctgcaggagtgtgggtggtggccggggctctccctgcaggagtgtgtacagtggctggggggctctccctgcaggagtgtgggtggtggctgggaggctctccctgcaggagtgtgtacagtggctggggctctccctgcaggagtgtgtacagtagctggggctctccctgcaggagtgtgggtggtggctgggggactctccctgcaggagtgtgggtggtggccggggctctccctacaggagtgtgggtggtgacggggctctccctgcaggagtgtgggtggtggctgggaggctctccctgcaggagtgtgggtggtggctgggaggctctccctgcaggagtgtgggtggtgacggggctctccctgcaggagtgtgggtggtggctgggaggctctccctgcaggagtgtgggtggtgacggggttctccctgcaggagtgtgggtggtagctggggggctctccctgcaggagtgtgggtggtagctggggggctctccctgcaggagtgtgggtggtgacggggctctccctgcaggagtgtgggtggtagctggggggctctccctgcaggagtgtgggtggtggctgggaggctctccctgcaggagtgtgggtggtgacggggctctccctgcaggagtgtgggtggtagctggggggctctccctgcaggagtgtgggtggtagctggggggctctccctgcaggagtgtgggtggtagctggggggctctccctgcaggagtgtgggtggtggctgggaggctctccctgcaggagtgtgggtggtgacggggctctccctgcaggagtgtgggtggtagctggggggctctccctgcaggagtgtgggtggtggccggggctctccctgcaggagtgtgtacagtggctggggggctctccctgcaggagtgtgggtggtggctgggaggctctccctgcaggagtgtgtacagtggctggggctctccctgcaggagtgtgtacagtagctggggctctccctgcaggagtgtgggtggtggctgggggactctccctgcaggagtgtgggtggtggccggggctctccctacaggagtgtgggtggtgacggggctctccctgcaggagtgtgggtggtggctgggaggctctccctgcaggagtgtgggtggtggctgggaggctctccctgcaggagtgtgggtggtgacggggctctccctgcaggagtgtgggtggtggctgggaggctctccctgcaggagtgtgggtggtgacggggttctccctgcaggagtgtgggtggtagctggggggctgactcagagaaccagcaaaggccgtgtttcttttcaggccccccgacaaagggctcccttccctcacaaggctttctcatacccgccgtctttgagtacgtgtctgttcctgatctgagccactggggccaggcctgctgtgtgggcacacgtgctcctggcagacactcctgctttgtgattccacccccaacctcgggatggaggtcaggaccacgcctgctcacatctgtttctcaaacgtctagtgcgggcgcttgcacgaagaggtgctgagacgtgcctcacaggatgtggaggatgaccagttatggacggacacgtggcgcgtcagggaaggctccggaaactttgctgtgtgaacttttctactcagggcacggacctcagagctggatctggttgtcatcccagatgaggaaacaggtcaggcggatgatgcagaaggagctgtgactccccggtggccactggtgggtgtaggagcctcacctggcatgagtaggagcagccacaggctgtggggcgggcaccctctaaacagagccctgcagaaggggctcctccatcacgcgccgagcctgccacacagaggagaggacgctccggagagagaggagcgcagagcctgtgcagatctgccatctcctcctccctaggggatgctcctggcccttgtgtgggtgaacgggtgccgtgatgtggccatgaggcgcacggacctctggactcaacgtggcctctccataggcttgagggaaaacaggaacggtgaaatcaactctccgccccacacgggcccagcttcagtgttgggcacagcagagccccagcttcctcctgcagcatccccctccctccccttccagcgtccccctccctccccatccagcgttcccctccctccccctccagcatccccagctccaccagcaatgccgatggccatgccctcgtgctgtggccccggctgtgactcccactcatggcgcccaagctgatggcactgcagctttgcaaacctggccacctcccttgtcagcaatgcttggaagataaatagaagatgctgctaaaaatttggagaaaaatttgagaataaatcatgagccgtggaagtctgctacacagttgggtgaatgtacaggttgttcaaacctttcttggtgtacactcattgctaagcaatacttaacaggtcaaaaaaagttttaaaaattggaataactatggatgaagtgaccactttgactgacagacatacgaaaaagattctgggtgaggtgagggaaccagcaggtcatatgaaatccaccccacacatcattgcagcacagcaaggacctgaagctcagtgtgcaagaagtgaattttgtatgtttaatgtattttgtcactttatccattttataaaaatgagacctttgcactactgtgagttaacctttgtgatacattttgtaataaagccaggagaaaccagtagaactgtgtgccacacacggcttgctggttgtctgcggcaaactcatgtaagagggttgaaggctgagcctcggaggcaccggcctgtggtgggaacgggacgccccagcaaacactccccagtaaaataaaccttcagtgtaaaatagacatctgagctgtgtgtgagaaaatgtgtgtgcttgaaaagcgaaaacaaaaaacagccagctgtggcacattttgaaaatgaatatttggaaatagtttcattgccgtgtgaaatgtttcagacaactgggtctcctataaagtcatccacagtcacgactctaaaaagcatggaaatgacattttctaacccacttcacatctttccaaatgaaatgtttccatgggttgaacatatactgaaattattatcataaaaatccaagacatcccaccgtgttaaaaatggtgccgagaatcaggcagggaggacaaggcctttgcagagctggtgagcaggaccgggacggagactccacggttaagcagcacagctgacttcctccacccggtccgccgtgtggggcagcttttcagctgcaggagccttaaatcaagtactgagataaccctgcacttccggccaggcctccagtgacctgtagggcaaaatatcaactcagtatcagaaaaaatgatggtgccgtgcagttgggtggctgtccctgaaataatcaccagagtacttttagagagaggaaagttcattaaatcatagagggcgttagtttttagatgttcatttcatcttttcctcatcctctaaaagtgactttgtatcgccgcccccctgggcccaatcagtggctttcctggctccggctctccctcggctcagccacaggcatccctcagctctaacgctcccgccgggatgtgctctatgcagtgagggctattcctgacatccccccttccagggaagccccatcactacatcacagcaggccgcatccagattatcctaattagagaattacttgtatcaagtgaatccccaaaccactgtccagggtcgctgtaggagggaccctgctggccttgagctccccaagaagcggcaccactcagcgtttagcttcaaaaggtccccagaggtttcgtgctccatgggtttgtttgttgtttggaaactgttgttaaaataatcgttattaggtgaccccaggaaacttgttgctcaggtgtttgagtctgtcacttaagaggccgagctcgagaagccggcgcgtgggttggggccgctccctgggcgtccgcagagcacgagagtcagcaagccccgcacacacgcctgcaatggtgcagccatcctccccgatccggccccacacacacccctgcaatggtgcagccatcctccccgatccggccccgcacacacccctgcaaccgtgcagccatcctccccgatccggccccacacacatccctgcaacggcacagccatcctccccgatccagccccacacacacccctgcaacagcaaagccagcctccctgatccagccccacacacacccctgcaatggtgcagccatcctccccgatccagccccacacacacccctacaacggcacagccatcctccccgatccagccccacacacatccctgcaacagcacagccagcctccccgatgcatacctttctcagggcctcagcagcccccaaggccccgagggacatggcagcctgctctgtgaaacgtcctgtctgttctgcattgtcctgggcctcctcccagcccttcccacaacgcccaggccagctccaacagaggggaagttggccttcaccatccagcgaggcagggtcctggggtcgggcatctttgagccaggggctggggcagtcctgacagctccacctgctcatgccatgccttgcagcctccctgcccgtccgatcgcctgagtcaggcgtggtcctggcctctcttgccccatttgttttttcaaaaacctgcaagcggaatgctgctgcttccgtcttcataggcacagagccggatttaagaagaggaactgtcttcattttgctcaaccacaagggcagtgaccttgggttcaaccctgggcctctctgactgctttcctggccacggctgctctttggccccatgaggagccacgtggacgtgggtgtgccgattgcacagctggagagacgtgggcagacaggctgggactgaaggtttgtcccagagctgagggtggggcagaggcagccacggtatccaggcttctgagcccagcccttgccttcatgtcgggggatgacagtctcgccatcagcagcacccaatgtaggccctgtccagggagtcagtgctgcatcgtcagtgatgggagagggaggcggaggcagggaaatgcacagagccagtggccttggctgctgtgacagcatagcagacggggcggcgcaaaccgcagattcatcgcccaccactcacaggctgggagtccagggtcaatgtgtgggcagggctggtttcttctgaggccctcggagaagaatctgtcccagatctctctcctcggcttgtgggtgccgtctccgtcttcacgcggtgttccctgtggctgccccgtgtccgcatctccgcctttgataaggacccccgtcttgttggattagggcccgccctaatgacctcattgaaacttagccagttacctccacaaagaccctattccccgataaggtcacgtccacaggtactgggcttagggcttggcatgcgaatttggggaactcaattcatcccaaaacacggggagtatctccctcagacctacgggcagtggggcgtggagcatctccgcacgtgtggctcggttattctacatgatgcaccagttccgccgtggaggaggctcctcggacagttcccttcctgagcgctcagctcttgtctgctccaaggtcaggccctgagaaagtgccccaagaccgtgggcctgggagaaagggtcacggggcttgtgctggattttgggacttttctcttcagcctgtacacaaaggttacacacaaagaagacggcaaagggaggtgggggggtggggagagggccagacagaggcaaacatggttctccagggtttaaagtgggcacggtgcgggatgcttcctccctggctggagaggatccttacctccagtggctctgcgggccgtgcctgttgagaagaaggctctgaagttaccccatgccacaggcctttccgttgcaggcccggctcggccgtcatcatgtgagcgtgagcctctgggtctccatcttgctcatgcccctcatgactacatgactcctcggaatgcaaggggcagtgtggtgttgccagtgagctgcttcttgtttcctaccaggaatcacacatcgcatccgtgtgagtacaagaaagacccaaatacccatccactgcctgctgatctggaggcggagagaggacggccccagagaccatccaccctccccattcacccatggtccacacagtgatgggaaaccacattccaaaatcaacacttttccaaaacagtgggcagaaaaagctggtggcatggccactccggacgcacatctcagagggtttgctgctggcgcttcagggtccactgtgctagtattttttttttttttttttttgagagacttgctgtgttgccgagctggagtgcagtggtgcgatcttggctcactgcaacctctgcctcctgggttaaagcgattctcctgcctcagcctcccgagtagctgggattacaggcgcccaccaccacacccagctaatttttgtgtttttagtagagacggggtttcaccatgttggccaggatggtctcagcatcttgacctcgtgatccgcccttctcagcctcccaaagtgctgggattacaggcgtgagccaccgcacccggccagtgtattttttaaggaagcaggagaaaacaaaatctgaaaaatataaacacttttattttaaacacacactccttcaccattgaatgtgtttttaagatcaacctatttaaactttcaatttaaaaatggtcgtctgttagagggtaggagacttggcttagaaagcatttgattaaaacatgcagatctccattctcagcttggtcttctgaattttgttaataaaattatttccatggaagtgaacctcattctactttttttagtcaggttatttaatgcttgttttcataattgttttcaacagagatacacaaactgacttttaaaaaaatactgtgccttcaggtgaaagcttatataattgagcagagtttgccaacattttggaacttttttgacaaaataattcccacataaatataactttccttggttctgttggctgagaccctaagtcatttctggcgtattttaaaaatccagactcctcagcgggcaccgctgcaaacagacctgcctctaaggctgataacgtgaaggtgtcgttttcaacacaaaaggctctgcacagaggttttttcttctgagcgggtggttatttgagtaacacgtcctcttgtcaatctttaggaaaacgggtgttgcccgcagcgaggtgggcggaggcacaagtgagctgggcccggaagaggctgttttgttcagtggtagggcaggcgcgggagcgctgaggctttgtgccaaagagaaacagaaaagaaagtttgccatgtgagcgtctcacatcactgtctgccaaattccgcatgtgagagaaggctggaaggaccacactgttacaggagaggctctttgcctccacacggcctgattgctcaggggttttgttagggtttcaaatgtggagagcagaaaacactcaggcacctagagctgggcggtctctgcagagcagggacacaaggtgcccttggcgggtgtgccctggccagtccctccctcgggatatggacaatctccatctcccatactggatccttcaccctttcttacagcggatagggacgctggactgaggcaggttctgtgcccggaacctcagtgatggcaaagtcgctgttccatgcaccaggagatgacagggaggggcctccgtaggttgggtttcagagactttccatcagactatatttgtattaaagaaagcgcatttttattcatgagccatatttgtatgaatgttcaaatgcctgttatgattattttgagaagttaagggataatttagattctctgctgatattcttgttattatttaaacagtgcatttgctgattaagcattaaccgccactctataggaggcaggaacccaaacagcctcgttaagggactgataaaatgcaccctcgttagagaaccctttttgggggttggtaattatcacagatatttattaggcagaaaggcacaggagcggctggaggctgggtgagtccggtgtgcggggccatgggacagaaggcccagcaggctctgcacggtacctccctcgccgccttttgttcgacagcccgcccattccgctgcttttctcttccacccttcaccccagcaagaactcgctttgctttgggtaaaccaagaatagggaagatctgaaaaatcctaatgtgcaaagcatatttcagagatgaccattcgttctcccacatgaagattgtattttacacattgatgtggcacagcattcctgatcctgcatgaatttaaagttggtttctcccgtcaactctaccgtggccgcttgtggtgtgaagaagcttccgcctccatgccccagcctgcacctgccctgcaggactcccaggaacctggaatcccaggctattctacaccttttgtctgtcaaggaattggagggtccaggacccaccccctggcctcaaaacagactcatattgtggggagctgaataagttagtctgtggatggtttgagaaaggagaattctggatttggtggatgtgagatggtgcaggactgtctgtgcttctttctcacagcttccttgtggaatatgtagtctgtggtgcacacaccaggccccgggagacctgggatcccttatgcgagcgtgaggcaccccacgtcggaaattcggatacctgggatcccttacacgagcctgaggcaccccacgtcggaaatggaaattcggagacctgggatcccttacgcgagcctgaggcacccacgtcggaaattcggagacctgggatcccttacgcgagcctgaggcaccccatgtcggaaatttggagacctgggatcccttatgtgagcctgaggctccgcacttcggaaatttggaatctgaccacatcatgtttctccccagttcctcaaaggcctggaaatgctggtgttgggtggagaggggataacctgagctctgtttgttatgaatgttctcttttcctcccataaaagattttcaagcaaattttatctggcaatttatttaaaccaaaagcatatgagtagaaagtggtttaaactgaaataaaaaacgtgtaagatgctccaatccttggaagaccatccctgagggacggggagcctggctatctcatgtcgtccccaggacacggcacacacgggccccagctgccatcagggccagcggtgaagggtctgtgccgtcttcccctcctccatggtgatcgaaccctaagtttagctaaaataacacgtttggcctcccctgtgcttagatgtggtcactgagtgagacctggccatgagctgtggctgtacagtactctgggcagaaaggcttcttgatgggaaatgacggccacctggatagtggatcctaggctgatgtggttcccgtaaatgtccctggccaggatgcgggacccagactgcccatttagatgggttttgtgtgggagggaagaaaagcctcaggtgttcacaccaaccttgtcagaagttttctgttatatgcagctgaatttagtcctaaacagcacatcttgtcagaacccaggggttggcccaggctggtcactctgagtggcgtggggctgcagcagcatctcgggaagggtacaagcagtcagaggaacggtggctcagggacctgggagaccttctgctgagcttccttgctgaggtgtgaccctgagaggacgcacacccacatgagcctcggccccgtagtgtctgacatgaatcgcaacttccggatggccccagctcacacactgggaatgacggtggcctcatgctgcctcctccatcccagcctgggggagaaaggcaccgcgaactccagctttctgcctcttcggtgggaacagtgggtgtcctcttgctgtgttaaatttgatctgagctgagggaaacccgaagaatcagctccatcaccctggagaccagcgtcagcccggccggtgggaactgagaaggacctgggtgtagaggtgctggggtcctggacgccagccacgctgggaccgaggggctccgcagacgtcatcccaagacccgctattggttcagagcttgtggatcaggaccagagccagtcctctcactggggcagtgagagcctgacatatgtccagaaggcagcccctgtgatcctcccagggtggcagcggccaagtgagtggtccagggcacaccgtggtgcacacggggcttccctgggtctgggactgcagaggcgtcggggctgctggctgcaccactatagccgtgggctcactgcagggtgcgggccaccattcaggacaagcgttcctgtggacgacctgccagaggtggcagcctgcggacaggggccccactcacttcagctctggcttacagaaccttcatgggatcccgcggaagccgtcatttctgtcaggtggggccccattcactcctggcaagctctgtggcttcattgactggtgggagcattttgttgcctgtaaagccaggaactgttgcccatctcacagcagtggtgcaaatcaaacggaatgagagagggctccgtaaatatcgggcacacatgacagagtgagagagggctctgtaaacattgggcacgcatgatgcagtgagagagggctctgtaaacatcaggcacacatgatgtaatgagagagggctctgtaaacattgggcacatatgatgtaatgaaagagggctctgtaaacatctgtaaacatactgcacccatgagggagtgagagagggctctgtaaacatcaggcacacacgatgtaatgagagagggctctgtaaacatcaggcacacatgatgtaatgaaagagggctctataaacatctgtaaacatacggcacccatgagggagtgagagagggctctgtaaacatcaggcacacacgatgtaatgagagagggctctgtaaacatcaggcacacatgatgtaatgaaagagggctctgtaaacatctgtaaacatacggcacccatgagggagtgagagagggctctgtaaacatcaggcacacacgatgtaatgagagagggctctgtaaacatcaggcacacatgatgtaatgaaagagggctctgtaaacatcgggcatacatgatggagtgagagagggctctgtagacatcgggcacacatgatgtaatgagagagggctctgtaaacatcgggcacacatgatgtaatgagagagggctctgtagacatcgggcacacatgatggagtgagagagggctctgtagacatcgggcacgcatgatggagtgagagagggctctgtagacatcgggcacgcatgatggagtgagagagggctctgtagacattgggcacacatgatggagtgagagagcgctctgtaaacatctgtaaacatccggcatgcatgacagagtgagagagggctctgtagacattgggcacacatgatggagtgagagagggctctgtagacatcgggcacgcatgatggagtgagagagggctctgtagacatcgggcacgcatgatggagtgagagagggctctgtagacatcgggcacgcatgatggagtgagagagggctctgtagacatcgggcacgcatgatggagtgagagagggctttgtagacatcaggcacacctgatggagtgagagagggctctgtaaacattgggcacacgtgatagagtcagagagggctctgtaaacatcgggcacagaagatgtaatgagagagggctctgtaaacatcggccacacatgatgtagtgagggagggctctgtaaacattggccacatatgaaggagtgagagagggctctgtaaacatcgggcacacatgatggagtcagagagggctctgtaaacatcgggcacacgtgatggagtgagagagggctctgtcgacatcgggcacgcatgatggagtgagagagggctctgtagacatcgggcacacatgatggagtcagagagggctctgtaaacatcgggcacagaagatgtaatgagagagggctctgtaaacatcggccacacatgatgtagtgagggagggctctgtaaacattggccacacatgaaggagtgagagagggctctgtaaacattgggcacacatgaaggagtgagagagggctctgtaaacatcaggcacacatgatggagtcagagagggctctgtaaacatcgggcacacgtgatggagtgagagagggctctgtcgacatcgggcacgcatgatggagtgagagagggctctgtagatatcgggcacgcatgatggagtgagagagggctctgtagacatcgggcacgcatgatggagtgagagagggctctgtagatatcgggcacgcatgatggagtgagagagggctctgtagacatcgggcacgcatgatggagcgagagaggtctctgtaaacatcagacacacctgcagcacagggatgatgatccatgacacgattttctctcagacagcagcaggcagggtgttggggcagcgcactcagggcagtgacaaactggtgcctgttccccctccgttccggccccaaaattgtggggacgccccacagcagcttagtatcacccaggggaggggaaagggtgtttctcggtggttggttcagagctttgcatttttagagcgtcatttcctggaggcctgagagatttcataatgataccgagttctctcaatacgtctctgaaggagaaacggactgttcttaggttcatagaatcaagcagctcttggttttccagatgggtttttttacctctttaatttcctaggatgcaaacgtacatcacaccttggccagttttcagaagacttgttttggtgactcccacccccgcttttcttcctagaatattggcggctcatcttcattgcctggctggacgcagacccagccctttcatctgacagaggtgccgtgaatctcgcttcctggcgggtggctcacccccaccttttcccactttttaatagtgtttcttgaagcacagaagctgcttcacttgatttgatcaaattttaccactcccttcctccgtagtttgtgttgtttgaggaaaggatttgaggaaactgttttctgccctgagttcagagaggctcaaatgttttcttcaaaacatttacaggttttttccccccatttaggctttaatctgcctggggttaatttttgtgttttgtggagagccgggatccacttctgtcttccgtccctccccatggccccacgttgcttgtccttcctctgcccatggccctgctgtgtccttgctgccgtccccgtctctgtgagtcatgagcacagggacctctctggggcctcagctccatgttggtttctttcctgtgcacccacctgccccgcggggaggttctgtgccgcacagtgggttaccgcatctgcaagtggctcctccatgcaatgctccttaacattgcctgggctgttcttggccctgtgtggccgggaacgtggtgagttaggctgcatggttcaccgggatgtggccgggaacatgctgagttaggctgcgtggttcaccagggtgtggtcgggaacatggtgagttaggctgtgtggttcactggggtatggccgggaacatggtgagttaggccagtaacctggtgagttaggctgcgtgattcactgtggcgtggccgggaacatggtgagttaggctgcgtgattcaccagggaaaagagggcggatcactctgtgtatgtcctctgggtggtgcagggaggacagaaaggccatcgagtatctgccatgcatttttttcctacagctggctaagggtgctagtgtattcattacattagcctgtgtatctttttctaggaataaaatagtccatttgaaaaacaacaaaggcagccatccaagttgctctctgcccgtcgtggaccaacgtgaggtcagggctgcgtccctgtgaccttgtgctcacctctccctttgtctatctctacaccaagggcaaaccctggaagataaggcaggtgtcaccaggtggatcccaaccgatctgtagggtttgctggaaaaccagtgtccagggctccagggcatcttcccacaggccagaataagaaaaacgcccctgaaataacaaaacaaaagagacaaaggccgtcacagtgcacggacacgagcacccggaggctcacaggactctgcggtagacagaacaccacagatgctaacatactgctatctcgtcagatgcaggcagcgcccagctcacccctgcggagccgctgacctgcaccagtcctgagaactcagtgccgggtacgttgccgggaacacagagcaacttaggacgtgaacaagcctctcgtactagaagtggaggagtaataatgctttcttcatctccagcagtgtgccctcatcaccaccctggggtcgtgctgtggaaggccttctctttctagagcattgcttcaggaccccaggctggtcacgctgggctcctgtccccgtgtcagcctcaccctctcctcctggccctcacctggcagtttcctcagtggctttgggtcgttcctctgccccagatgtccggtttcttcctcgaatttcagctctagtgttctttcttctccccactgtcctccatctcccacatgccagtggcctcgctagctgtgcccaggccttcagctgcctggagggtgcaggctggggatggggctggggcctggacggcttctacagagaagtgggaatgtagaatctccttcagagagtgtgtggccgtctcaccacccgccaaggccagtccctcctgttccctttcctgcagagacacgtgctgcacaccacctcctgtgtgtggggcttgcacactcctatgttcaaaaggcctgcgttccacacccatgacgtggaggggcctgcattccacacccacgatgtggaggggcctgcgttccacatccacgacgtggaggggcctgcgttccacaccgatgacgtggaggggcctgcgccgccccctcctccgtgcagggggtcagagtctttctctgcacctttcctctccgtggaagagctcccggtgcctgcagtggggtggcactggtgacggcaccacatcgaaaggaccccaatgtggagccctgtttgctccagttgtctggaaggaatgccatgcagccccgacctgttcctcctcccctttctatcagcaaattaacatcccacgcattaagccttggtcctggaataatcagcacagagcagaggtttccttcgaaactgcgagtgtgaatcatagaaccgtaagtatcatgatattgtgtggcacgctggaaagaaagcaagagagttgcgtaggttaatgtgtgttcccaaatttttttccgacacctgcactcaatgagcggctctgggccttctgtgtttttctgcaccagccgtctctccacctgccctcccccagggaatcccgacagtcagtggccagggaagttgggtctggaaggaggggacctcttgacttctccaggggaggctcagaggcacagtcctttgctgaggagctccaggtggaggaaggcagagaacgcacagccaggcagtgggcatggactgaaaccagcccataaacccccacgccggcccccctaccaccacaattaattcattaatgctggaaaccaccattgcattgttttcttgtaattatacacacctcaaatgcttgcttttgaagacattaattgcatgattagttttatgatttctgattaccaattaggttacctttttgtgtatttcatacataccattaggctttatggtacagcttttgtaatttctcacctagcaggggttctcacacatttgaaggctacattatccactcaataaacagagagagtttaattttctgtgtaaagtattggtgtggacttgggaagatgatgtttcagatattatgctatcaagagtgacatttaattttacaggggaaaagtcgtggttttcactgtcataacgatgttcacagagcatgactttagagatgggaggaggccgggtccaatggatctgtgtctgcggtgtggattgggctgtcacatcccttctctgaggaagatattcctaatcactctaccctttactccgacttgttaatatatttaatttacttgtgccttgcctctttcccaagaatagttagaaagcatttggtgctgttgggtttcctatgtgaagttccttggagattccattccctctgatctgaaatcaaagggctgggtgtgcactgtggcggagacaggggcacaggattcttaacgtgcccttgtgaggccagatgagaaagtaatcccagcactttgggaggctgaggtgggcgaatcacaaggtctggagttcgaaaccagcctgaccgacatggtgaaaccccatctctactaaaaatacaaaaattagctgggcatggtggtgcctgcctgtaattccagctactcaggaggttgaggcaggagaatcacttgaatacgggaggtggaggttgcggtgagccaagatcatgccactgcactccagcctgggtgacagagcgagacaccgtctcaaaaaaaaaaaaaaaaaaaaaagtctcctgaatctgcacacaaagcggcatttgagccccttttgtaccatttgcactttaaatctcctcccttcccccagggaaaataagagcagatagatcagtaatcaagagatggtcaggtggacgaggcggctgattggagcgcgctgaaatgaccccataaagcaggaatgtgtgggggaggcctggtttgaccatgtgatgcagcagcaccgattcacagccccacgcacaaaggggccagcaaataatgccgtttctaatgttgtgtatgggttggggaccttcctgttatttaaaatggatgcatggttccagtgctctgacagccaggcctccccgaaagggaagccactgggaggtctaagatactttcaattggatgtggctatagaaagagaaagttccaattttgatgttgatccttaaagtattagcttgacaaagctttgcattatgggggagagaaagggagaggagggaggaaaaaagacacagtccccgggtactgtatgctgtcctgtgggcccctgcaggctgcaggcccgcaggaaggaaagcgcagaatccagggtgttctcctgataaccagagaggacgtccccagcaccccgaacgctgcaatattttcataaatgtagaaaaaatagtagtgtttctcaagcaacctttatttacccccagctttgcttctctttctatggaaggcttccttattgtcccacgtgctcctgaataatgcatgagcctcagagtccgccaggccaggaagcacaaaggccccgtggtgggggcccttccaggcaggcaccccagcagcctcgggtaattactggcccttaatgggcagtttccctgcctcagatagatttgtgtgtgtgtttaagactaatttagggttcctttgggggagcttttcaaaatcatcacctgcgggtggggtgggaaggggaggatccttcactcaagtttcacttaaagccacgtacaatacggtaagtttgaaaaaccatcaggaaaaggaaggccgacctgttagtgagcatttgagcttcccaccatgtggggctctgcactttagataatgtcctcgttcacagttttgtctcttcaccgatgttcagccagtgacagggagcgtgtggggagtgaaggcggtgaagaagctttcaagaccccatagcctgttccaaaaacagcctgaattaacttaaagctgcccttgctgccatcgtggccagcgcatgaactgttactgcagaaggactttcacagaacttaaaagtagatcatgcagctctgcgaccgcctctgccctgtgctgggagcgagtgcagggcggacacggctggcacttccagcagaaggcactgcagagctcccaggccaggcagcggccgttgtgaattgcaggttgccctgcagactggacgttgagagaggaggagggggcaggcaggcggtgaggtggtggctccagcccccgccggtgcttctccctgggcactgcctgagagggcgcccagcccctcacctctccaagaagaaacacttctggctcctggaggggtctgaggacggggctcctcttcaggggtcctgtggcctgagaccaggaagaaacaacctgtccccctgactgctgagcagcagcaacccactgggtgaaaacgctggaggctctggatgctgcctggtggcggctgtgagtgatcaggtgccagcgtcagcatcgggtcatccactgtccagaatccagcaccactccctaaattccaacttccccccaacacggggcctgctctgtgggcttcagccggctcggatgttgtctgcagctcccgtcccgtaccctctccactcccacaccctgcctggacatggttacacagtcacacacactccacacagtcacacagtcacacagtcacacgtggccacacagtcacacgcggtcacacagtcacacgcggtcacacagtcacacacagtcacacagtcacacacggtcacacagtcacacgcggtcacacagtcacacgcggccacacagtcacacgcggccacacgtcacacgcggtcacacagtcacacgtggccacacagtcacacagtcacacggtcacacagtcacacgcggccacacagtcacacgcggttacacagtcacacacagtcacacagtcacacgtggccacacagtcacacgcggtcacagtcacacacggtcacacagtcacacagggccacacagtcacatgtggtaacagtgacggccacacagtcacagtcacacagtcacgcggtcacacagtcacatatggccacacaatcacacatagttacacagtcacacacactccatgtggtcacacagtcacacacagtcacacagtcacacacagtcacacacggccacacagtcaaatgtggtcacacagtcacacgtggccacacagtcacacgcagtcacacacagtcacacagtcacatatggccacacagtcacacatggttacacagtcacacacactccacacggtcacacagtcacacacagtcacacagtcacacgtggccacacagtcacacctggtcacacagtcacatatggccacacagccacacatggttacatagtcacgcacacagccacacacacttcacacagccacacagtcacacagtcacacagacatgcactcccacacagttgcacatacacattccacacagctacacagtcacacacactacacatagccacacagtcatacacagacacattcccacacaggcccttgcactccacatagccacatgctcacacagtcacacacacaatctctcacacacacacagacacacagagtaatacaaagtcacacacacagacagacacatagacacagccacacatgcacattcacatacactcccacacagtcacacaaccacacacacagccagacacacacacagtctctctcacaaacacaaacacacgccacacacactccaccacatacacactcccacacagccacacagacacacacagtcatacactcacatgcagccacacatatggacacagtgacacactgacagtgatgaacatgcactcacagtcatgcacatacattcaaacacactcagatacacatacgactatacatgcttcagtcaactcacacagtcagataccaattcagtaaagaacaattacgtgttaatctgtcttgtgccaaatataagtcattggcttttagaggatggaatcagaggcaacttcacgaagacaagaacactgtagccaccccagggaagacgagaggaactggagtagccacggcggagaggagctttctcccgtgccatccactacgagaggaactggagtagccacggtggagaggagctttctcccatgccatccactacgagaggaactggagtagccacagtggagaggagctttctcccgtgccatccactacgagaggaactggagtagccacggcggagaggagctttctcccgtgccatccactacgagaggaactggagtagccacggcggagaggagctttctcccgtgccatccactacgagaggaactggagtagccacggcggagaggagctttctcccgtgccatccactacgagaggaactggagtagccacggcggagaggagctttctcccgtgccatccactacgagaggaactggagtagccacggcggagaggagctttctcccgtgccatccactacgagaggaactggagtagccacggtggagaggagctttctcccatgccatccactatgagaggaactggagtagccacggtggagaggagctttctcccgtgccatccactatgagaggaactggagtagccacggtggagaggagctttctcccgtgccatccactatgagaggaactggagtagccacggtggagaggagctttctcccgtgccatccactatgagaggaactggagtagccacggcagagagcagctttctcccatgccatccactacgagaggaactggagtaggcacggcggagaggagctttctcccatgccatccactacgagaggaactggaataggtacggcggagaggagctttctcccgtgccatccactatgagaggaactggagtaggcatagtggagaggagctttctcccgtaccatccactatgagaggaactggagtaggcatagtggagaggagctttctcccgtgccatccactatgagaggaactggagtaggcatagtggagaggagctttctcccgtaccatccactatgagaggaactggagtaggcacggcggagaggagctttctcccgtgccatccactacgagaggaactggagtaggcatagtggagaggagctttctcccgtgccatccactgtgagaggaactggagtagccacggtggagaggagctttctcccttgccatccactcagcaagtgtcggactccactgagtcacttgtgtgtcctatgctgggcagcagggctgtgagatccacgggacccacccctgagtccaaggctccgtgtctaacaggtgcaacagacgtgtggcggcaacaaggaagggtcatggagtgaaggaggatgtgagtcctgccctgtggaggctggatacactgtgtccttgtgagggtcatggaggatgtgagccctgccctgcgggggctggatgcaccgtgtccttgcagacggcaggagtgcgaaggactcaggcacagagcaagagggcatgacccagcagaggctgtcaagcccagggtgttcctgggtgcgtgtgctggggagtcgacctccacagaatgtggtacatggccctggctcctcatggtgccccttctgagccatctcggatgactctgcatcaaaacagcctcccccctccaccacctcttccatcagacactacatcccccatgggcattaataatgtcctagccgtccataaacctcagagcctggcccacagcacacaacaagcgagcaattctctgggtgggtgggtagatggagggacgtgtcgatgggcaggtgggtggacaggtggtggtgagtggatgggtgggtggatgggtggagggacacatggaagggtggatgtgtggatgggtgggcaggtggacaggtggtagtgagtggatgggtgggtggatgggtgggtggatggagggacacacggaagggcggatgtgtggatgggtgggcaggtggacaggtggtggtgagtggataggtgggtggatgggtgggtggatggagggacacatggaagggcagatgtgtggatgggtgggtgggtggacaggtggtggtgggtggatgggtgggtggatggagggatgcatggaagggcagacgtgtggacaggtggtggtgagtggacaggtggtggtgagtggataggtggtggtgagtgcagggtgggtgggtagatggatgagtaagtgggtggtttggtcgggggatggatggatggatggatggatgaatggacacacagttgtagatttggtgacacaatttggaagtctctggagcaattaaaaatggtccaggccaggacatggtcatgacataggccaaacctcttctatattatctgtcaggaaatcatatttttgttaaaatacttgttttgtgtctattgaacacttagcgtggaaaacttagaaaatgcttactatttgatattcttttaggatgtgtgtgtgtgtgtgtgtgtctttattttgcttttcagtttgtatgtgtgccttatcaaattgtctttaaaatatgcttctgaggaacactttggtctttatgtggttctgctgtaagttcttcaacccatgtgctattgttgaacatttagcttgtttctagtatttcattatcataagtcttgctgcaattaatatccttgggcatacattcaatctatgtggcttactgtttctttaggatacactcctagaaatctaactactatgtgaaatggtgcaagctcttctaaatacctcaattcctcttatccagttgaactaatatctccaacaaatgcaggtgcatctggcaagtccaataaacctgccatcatccactcacttaacaccaagggttaggacttcatttaagtgcatgcaattatttagggcaaacgatagcatcttatcattggtttaatttatagtttttgatttattgtagatttaaacattttatcatacttgattattgatggttctgcttcctgggataatctcttcatgaattttcctatgggagtgtgaattttctgaaatagactcacgagtactcttcatatttgtttttgcctcttacttttggccaatgttctgccaggcttgtctgtgtctaacgttgcttgttgtactgtctgaagttcagaaaggctgagctctggtggattcaaatgcacagtcgtttcctttaagattttgtcaatcgctctcatgtttagaaagtgcttgctcatcctgtcatcagtgaaacacaagtttttatttgttatttttatggttccattaatgtgttaatgtatctggatcatttctggtggttgtaatgtgtgtgaagtgagggataaactaggaccttcccccaagtaaactctagtttcttgaataagccattgtttcccacgcatttgcagtgcacccttcggctatgttgttaatttcgcccctgcaccctcccgagcgccctgagagccgaggcattgctgcagatccctgtttcctgttcttcctactagtcattctagcttcttcttgcaaactctcccccatccttaggacgagtctctttcctgtgccgtacgtctctaatatcccctcttttagcatcttttgtgctttgctcgtgattctcgaagagctttgcgggttcggttgtgaactgtagtcagttctgctctgccgcctcaatgtgaattttaactctgctattgtagttttaatttcctcacagttatttctcatctctcccagttccagctctttgccttcataacttggtaacggttctgtttttatgacaccctgtttttcccgttgtgttgtgtgtttctgctcctgtttttagagaggctgtgtgtcttgcatcttcgttggaaagggtagcagagttctcttccagccaccttaggaaatcctcctggaaggtctgcttgtcctagggggctcaggacgctgtggcctgtctcttactgaaaccatattttcagctgtccctggttgctggcttttatcttccctcttcactcattctcaaaggaagagaagagaaatctatccagcttcttttcctgacaaaaggcaagaagtagctcatcactgccccagctccattcaccacccacagcaggctacatgcattctttccccagatctgtggctcggggagtaggcggacaggtcaatgttcacagctgcaggaaaatccctggttttgctaagagaagcattgaaagctgggtccggtgctcttattgacaacacatttggggttcatgacaacaagccccgtagcctcatgtgcgtctgtcctcctaaggtgggtccccacacccgcctggggtcctccctgcaggccggctccaggctcactggaggctgggcccgcagccccgtggcttcccctctgcgagcgtgcactctgcacacacaagcacacccacgtttctgtctggagccgcccgctcgccctgacttccctgtgagcgcagctgcgctgggtgcccctggtagccagcgggtgggtcgactgatcaattgatggattgatcacagggagtgcttctggctcactgattggtgggtggaattgatggattgatcacagggagtgctgctggctcactgattggtgggtggaattgatggattgatcacagggagtgctgctggctcactgattggtgggtggaattgatggattgatcacagggagtgctgctggctcactgattggtgggtggaattgatggattgatcacagggagtgctgctggctcactggtgggtggaattgatggattgatcacagggagtgctgctggctcactgattggtgggtggaattgatggattgatctcagggagtgctgctggctcactgattggtgggtggaattgatggattgatcacagggagtgctgctggctcactgattggtgggtggaattgatggattgatcacagggagtgctgctggctcactgattggtgggtggaattgatggattgatcacagggaatgctgctggctcattgattggcggatagaaagtactacagagagtttcgaaggacgttggcagaggagaaatccgccagctccttctttcggcaccaggtcagagagaatctggggctgcagtgttggtttctgggttcagtgcgcctcagcccagtgaggagtggagaccaacagcgccagctgcccacgtcctgtccgattcgactcagaaagccacaatgctgatttatggaaatgagcggcttgttactcctaaaatgtccatggatgagagttgtgaccagaagaaatgcaaaatattgaaatttatctggaaggaaattgaagcagcggataagatcatcatactaacggctgcatctccacaccctccccaatttcctaaaacccaggagagctgctcccggaactatgctccatcaagtttaccatcatacaggatggatgggctccggccacgtcacacacttcctgaacgagtttacaatcatatgggatagatgggcaccggccacatctcgctcctggacaaattcaccgtcatacaggatggatgggcgccggccacgtcgcatacttcctggacgagtttaccatcatatgggatggatgggcaccggccacatctcgctcctggacaagttcaccatcatacaggatggatgggcgccccccacgtcacacacttcctggacgagtttaccatcatatgggatggatgggcaccagccacatctcgctcctggacgagttcaccgtcatacaggatggatgggcaccggccacatcacacacttcctggacgagtttacaatcatatgggatagatgggcaccggccacatctcgctcctggataagttcaccatcatacaggatggatgggcgctggccacgtcgcatacttcctgaacgagtttacgatcatatgggatggatgggcaccagccacatctcgctcctggacaagttcaccgtcatacaggatggatgggcaccggccacatcacacacttcctggacgagtttaccatcatacaggatggatgggcaccggccacatctcgctcctggacgagtttatcatcatacaggatggatgggcaccagccacatcacgcacctcctggagaatcccgccatctcatcacagttctttgaccagttggctattttctccattgagtaaattggtttggtaacttttcccactgtccccattctgatcacaaatccagtcactctctgctgttgcttttgctactagaaggaagagaactgctccatatactgaaatattttgggccaagccttccagtaactgaagatccattcagcctttgaatcaaccccagattcccacgcgaagcatatgtgtttggaaactgtgacagattgtgcctttccttccttctcaccctcacctcccccacacgtgcagctccttcgtgtttccatttctttttttctttttaacagcaatttttgtggcatctagaagcaagtgcagtaagtctctgggtttgaagggagcttcagtgtgttggtcagtcaggcaaagcgtgggtgaaacttaggaatcctgtgtttctctttgaactcaacagaaccgctacatttcttgacttccaccttcccaaatgtatgtttaaaacaaaaacaaaagtattctgtctccagtttacaaaggcaaccttcctgaacagaccaacatggattagtgccgcctgtcggaggagccacttggcaatgtgtgagcgcagccacagcacacggtaatttgcagaatgcagccgcctctgatcggtctgaaataatcctcctgtttatgaaacagagcctgagatgcagcatcgagcctggtgccaatcacagtggtagtgcggcttaacacagagctcgagtcctgagcctgtgagaccggctgagcagctgccacagccttggtgccacctctcatgtcctccgagcttccgggcgctgctgaagaattcatcacatggttgtgcaagtgcctccaccccggagaattagcggaggtgccaggtgctccgggaggacccctcagggccatcagcagcccagccgtcactcctcatgcagacgaagcaactgccagacaaacttctttccgttttccaacaacttaccccgctctggagctccataactgccctcccccagcttaaggatggctatgaattaaaccctggaatatccatatattttatggcctagggttccattcgtgggacgtctcgtgagggtctaacgtggccaggcttgtcataggactgggctgtgctggtgtgaggacagccccagctgcctgggggagggagacggcagcctataccttccctgcttctcgcaggcccgaagtagaggggagctcagtgcagaacacctgtgtagactcccaataagggttggatgtcttcctgctcgttctgacaggtggagatggctctgaaatgctcactgagaccctcccagccactcctctgctcctcctcttccctgcctcaccctgctcagtactgcagggtgagaggggccgtggacagggatggggagggcagctccgtctcccagccccagccccagggcaactccaaatgcacccagccctgccctgctcttccctggacacagaacccgcatcagttaagatgcttcgggaagaaataacagaaaaccccaacgagagaaggcttagactacaggatattcacggctgcacatggcgggacacctggaggaggagtggccgcagtgctggatgaggctacaggtcgctgggacaggcctgcaccatgggggcttctgtctctggacttccctgcaccccttgtaagatgctgcagggcccgagcagttcctccccacagctgggctcacagcaaggagtccctcttcctgtgcttctccctttatcccagaattttattttgcaaactccacactgtcaaacaagttgaaagaagagtaaaatgagcacctgcaccctcttcctccagagtcaccaactttgagctctcagtcatgcctgcaactctgtcatttacctgtgtgtctggatggaagtcacaaaggttgctgcagacatcacaaaacttccccgtgaggtgcagaaaagggagtgtctgcatcatcccccagcgtgcagcctggaagcagtgacgttacttagcacacgttcgtatgtggccagttttcccgttgtcccaatagcttgctttttatttttaatccagattccaatcaagggtgaatgctgtgttttgttgtgacatctcggattttctttgttctagaatacttctacctttacgttttagttttggtcttttctagcattgcaattgttagagaaaccaggcttgtcctgtgggatatcctgtggcctgggcctgttggattgccccacactactagattcagatgcaggtcttcagcatgtggtgatgtgtgtgcctccggcagctgtgggtgcacggtcagcccctccccgcgtggcgatgtgtgtgcctccggccacagcaggtgcacggtcaacccctccccgcgtggtgatgtgtgtgcctccagccacagcgggtgcacggccagcccctccctgctgggacaatgccaagtgcagtcgctttggtaaaagaggcacctgccacatcactccattgtaaaggtaaattcttcccttggtaattcatcgttgatttgcaggatgataccttgagaacttaggggtatcttgttaccagcagccttttaccatgtgcctctttttaagggctgagtagggaagaagggtgggctggatgcccctgagtctgaggatgaggactgtgaattcagggaccccagatgcccctgggggtgctcagctgccagtgagcaggcacagagaagccagcccctcctttcttccagggttggcacttcccatgggaccaagagcaggaagacaggaggtcaaggacaccatccagaaaggacagtgggagggagggtggggcaggagggggtggtaacacgggggagagaggatactgcagaccaggagttctggtgaccaggacacaatgtctttggaagcatggagggacagtgcagctagaagcacggcccacagacaggtggagctgccactgcagaggtgcagggcaggcagctgccatggggcagaggagacatcaccatcatgagattcagggtgaaacagagtttgcccagggacaaacgtgttgccgccaagtcaacatctgtaccatcatgcctgaggagtcgggccagggcttttcctggagcgaccttcaatgcggctgctctcccggccctctggacggggtggtgctggggcagccacttgggctctcagcaggtgggtgcacggtcatgctctgtccttccattgcagagatggctcagctcacagtgtggcgccttccgcctttgtaaggagtcttcaccaacatcctcgtcctcagcttttccgtgtcagtcttgctggagcctctagaaagcagaggctttcacgccgtttagcatcacctacgctttaatgacagccttgtccagactttcaaacttacctaaccccacgtatggcctgcggtgcacacgggcccgcatctgtggcctcacggtcagggtgaccccacaaaaagagcgccccagatgaggacctgtttgatgttcgtcttttttaaggacttctacttaccagccgagtgtttgatcagtggcgaggcctcatctcttttgcgccaccgtgttcagatagcacctgccccaacactcgcagcaagacgggacccttgcctttttgtttttgactttaaatagctcctcattgtagaagacagtttattatggactcttcaaaatacatttctagggaaacaaatttagttgtccttattaaaaatgtattacatatttcagaatcaaagctcacggctcacgagcatcccgcgcccggctgcgccccgcgctggcatcgcagacgtgtcctggaaggaagaactccaagtgcatttgaaattcaaattgtgtttggttttaagatggggatgtcatcaatttcccttagaaaattataaaaaccatgatgcataaagaaatacagttggagaaaacagtgacaccatcttcgttcctgaattggtgactccaaacggcttgcccttggaggtcacttttatagggggttacgcaaataaaactgagtggcgttgttaaaattctccactactggacctttttagccaaagtgggcattttcgggagtcggcaacacagacagaccctgtcttacttgtcagctgtttggcaggaagttggtactttgccatagatttcagtttacctggttttgttgaatgtctcataaacagatacttgatttgactgtttgtacctgcagtaaccaggacatctctcagggtcttgctgtgatcatacctgcagtaaccaggacatctctcagggtcttgctgtgatcatacctgcagtaaccaggacgtctctcagggtcttgctgtgagctgctgccactttccagactcttccttcaccatatagtcttggtgctgatgacacggatggctctggggcagggaagtggtcccgaggggcacagctgtgggtgccgagggcttgcggaagtgggggcaagtcttgtatccgatcgctgttccgtccatgggctctgtagtcaacgtggcctcttctgtggttgctcgtgaagacacagctcagcatctacagtctgtagcaaggtggacagtctgtctacagcctacagcaggggcatccggacaggttggaaaagggagactgtggtgaccacacgcgtggaaggggctcagagaagcatgaggacctcccaccatcttcctctgagtaagacgtgatgctgaattttaacccagaggctggtcccagctccatctgcatgtggggaaaattaatgtcaggaaggaggaaaaccagaacttacgaaatgtacttccgtggccgtgaaggcaggcaggtcccacggtggggacgcccagagctgcaccccaagctgccgtctgagggaccctccagggcagctgccttgcggagacctgtcagcccaactgtgtcctggggcttcaagcattttctttatgtttaccttttcaaaaaaaaacaaaatcagaacgtgcagcccgaggaaggcactgagactctgggaacagcccgtgacacggtggccgtccctgagtcaaagcatcacagccggcgagggcggggccggcagctcaggggccacatccaccccggcacggtgagtcgtagtggagacaccaccaaccgccctcctccaaggcaccccagcacctggtcctcagtcctcgctcaaggaacatctgcagagcacactgggttcccccaaatgccggaggggtcctttgtggacgcagtgcccactccctgggccactgggtttgaaggacaactcagcccccatgggggaaataagtgaattgaatggaggacgtcacgcctcactggaggtcttaggtccaacccccaccacccacacagcccgaacgctttctcaggcccccagacagtgcccagggacattctgatcgagcttggcctccagacagccacggcccacactgtgttgtgttgtgttgtgttgtgttgtgttgtgttgtgttgtgttgtggtctctggcttccttcatccataaatgggtgcccacctctcaaaaccgctgcaggaatcgaatgagataatatgagggctcaagatgaaaacccaaatgcagggtgttgtcgaaaagctctagagaatggaaactccagaaaaccacaagggcctttgatgcttcatgagtttgaaaacaatgtttatacaggagttagggttaggttttggatgacattcagttagaaaaactcatagccagtctgcttggttagaaaatatagtaacttcagatgtctggcagtgttgtgttaggaccagagaacctagtgttttgaccaaggaagcatcatctctagtgcaatgtgtctgctggggacacggtcggagatgcaggacaacttgaagacatttggagggtcctgtgcaggagccgggtcagtatagacccctctggtgcctgtgggataagtcgtgctcctgggcagatgaattcgctgccccgtgcgcaggatatatgggcgcctttcctggctccccattgccccatgacctcacaggaggacggtgacatcctaaagccatgttctgcccaccctctgggatgccatggtccccaccctctgcaatcaggactcccacttgctcctgtgacacccccaagtccccgccaggctccgctgagattaccagggccctcacctgtgaactgggaagagtaatgcccaccttgttgcctggcgtgagggtgaaatacagcttagcacagcacgcgtggaaatggcgctcacgattgtgacgatcgtgttcgtgctgccatctttgcacagcacgcgtggaaatggcgctcgcgattgtgacgatcgtgttcgtgctgccgtctttgcacagcacgcgtggaaatggcgctcgcgattgtgacgatcgtgttcgtgctgccgtctttgcacagcacgcgtggaaatggcgctcgcgattgtgacgatcgtgttcgtgctgccgtctttgcacagcacgcgtggaaatggcgctcgcgattgtgacgatcgtgttcgtgctgccgtctttgcacagcacgcgtggaaatggcgctcgcgattgtgacgatcgtgttcgtgctgccgtctttgcacagcacgcgtggaaatggcgctcgcgattgtgacgatcgtgttcgtgctgctgtctttgcacagcacgcgtggaaatggcgctcgttgtgatgattgtggtcatcacagttgtgttgtcatctcagcacagcacgcgtggaaatggcgctcattgtgatgactgtggtgatcacggttgtgctgccgttctatttactggtggtggcttgagcagaggggattgcctgaccccttacatgcacgggggaacaaagtgaaagtggtgaataaagcacttgcgcttctccaaagccttgactcagtgtacaaaagagcatctgtaacttttcaagcacccctaagccacagacatccagaagctctctacagtgatgctactttttgtctcctggagccttgaggtctccagaacagtgcctgggagctcggcagagaagctgagtggtggaagctgaatggggctggggccagcgctgctgctcccccgggatccagccaggttttctcagatctgcagagaaggcgcctgaggtctgcctcgagagagatacctgtgtgagccccaggtgtgaactcagacatgaacaaatgtggagggcagtggtccaggcagcagagctcactcgtcctcttaacacgggagccttcattgttcaaaggtgtgattcatacactgacgtggcattttgacacttttgagaggataatctgttcactggcaaacacgtgtgtattagtcaggattagtgtgactgagtgtgacagaaaataaaaaataaaagtggcttaaatgagctggaaatgcactttcatttcctgtggaagaagtctgggggggaggcagtctgaggaccttgcagcctctgaggtcccagaaacaaggtgttctactcctgccgctccagccctcagccctgagctgctcctcatgatcccagatggctgctggagatcccaccatccaggtctcatttcagccagcaggaagggggaagaagaggagcagggcgcgcgtcccaccatgagacactccctgaaagcagcacacaactctcacttgggttgccttggccagaaccgagtcgcatgtccagcttcaagaaaggctgggaaagagaaacttcatccacgtgtccagctacagaccagaggctccaaggaagcagaggaagaccagcaggcctgggatggtgaagaatcctcgtttgccctgagccaagctgccttgagatggggtggggtctgcagggtccttggggccacattggctgactccccaggccctcagttttcccagcatgactcagccctaatgtgggccctgggtgccgctcgtgatccgcctgctttgtggcttcattcagcatgtggaagtggttccatcatctgctccagccaaggcgaggcgggttctgcctcacgggaaacaggtcaccctttctctgaggagtgttgccttctgcccaagtatttggggcacagcactagttgggggtcactgcagtgtagcatccaggttcacacccaaagactcttctgcccaccaacagacagccagtgacccaaaagcatgcctgtcctctagaacttcctgtcgagccaggtctcaccatgtccctccggaatggggcagcctccattccctattttgcgggaggctcagttgccaacagtccagagttcctaccgagttcttccgggggcctgtgtggcagccttgagtcagcaaagagtccctgagtgtcagtgacacacctcacgccatgcaggcacagagaatccacggacagcatgcacttgtcctcgggaagctgctgcccattggacaggtggggcaccagacagaggcctcccatccttaacatcccaagacaaacctgctaattaaggcttcaggtgcaaaggggaaggccctcttgtggttctctggcagcggtcggcacaacaagctcgccccctgccctaggaggaggacctgtggtcagcttctaccttcaggagggtgactctctggcagccgtcggcaagctgagctcgcccctgccttgggaggaggacttgtggtcagctcctaccttcaggagggtcacaggaggctgtgcacaaaccccactgacggtctgagctctggggccgtgtgctctcgctgggttcagggggattgttactgatggcagagcgaaggtgacttgagatgcatcagttctctatgagggcttgaagtccaggccacttttgagccagtccatctgctcatctctagagtaaggaggaaaaaggaaaaaacacttctaatttctctgtctgtctcatacccagctgtggaacgaaggactgattcaacctcctccccactttgccctccagattccccttagagacacaggctggttagggtatctgaattatttgagcaaaattttcatgcttagggaaaagcttgatgtgatcaaaacctaagtctcaggacatcaaatccccagatgtttaaggtagactatatatatcaagcctttgaagagttcaaaggaatgctagccaatgagtgagaaaatctgaaaacttcaccagtccttgcctgtcatatgaacttgatgatctaacctgtagtcttggatgtcaggggcctcagaaacacaacttccaaaccagaacatccttgggggatgaagacaacagggatcctaggagtccaattctagtctctccattctggatatctccacatcaagaatgaataatagatggagtccagctgttttgtagcagactgcagattagtgattcactgattgtaatcagaagcagctgctcataatcacagcccaggtacggacgctcattgtcaagtactaggtgttaattttttgcctataccctgagcctgaggctaggagtgtcttgaagctaatgataacataatcttgcaaacattaattagaatttcttgaacttattctaataatttgttattttgccaggctttagtattttaggtatttatgtgttttaaggttttattaaatattttaggtgattattagctctattttttaacaatatgggtcctcaatagaaatctggatggatggatggatggatatatgcttccataggtagatggacagaatggatggaaggaaggatagatggatgcatgcatggatggatgatggatagtgggtgaatggatgagtggatagaaggatggaaggatagaaagatggatgggtgcatgtatgtctgtatggatcatgggtggatggatgaatgcttgatagtggatgaatacatggataagtgatggatagtatatagataaatggatggatgagtggatggatggatgacagattggctgatggatgagaggaaggatggatgcctgcatggatgatgggtggatggatagatggatagtggatggatataaggatggatggatggatgggctgatggatatataggaggaaggatggatgcatgtacgcatggatgatgggatatgtggatgggtagatggatagtggatgggtggatagaagagtggatggatagataatggatagtgtgtagatggatgcatggtgagtggatgggtagatgaatggatggatgaaagggtagatggatgatggatagtggatgattggatgaatggataagtgtattatggaaagataatggatagcggatgattggatggatggataagtgtattatggatagataatggctaatatataggtggatggatgatggatagcatatagatgggtggatgagtggatagatggatgatggatagtatatagatggatagatgagtggatggatagttaatggatagtatatagatggatagatgagtaggtggatggatagtgtatagatggatggacggatggatggatggatgagtgggaggatggctcatggatagcagatgggtggatggatgcatgagtgtattatggatggatgatggatagtgggtgagtggatggatggatgagtgtatagatggataatggatcgtatatagatggatggatgagtatttggatggatgatggatagtgtatagatggatgaatggatgagtgggtagatgaatgcacaatggatagtggatgagtggatggatgagtgtatgggtgattgatggatagtatatagatggatggatgagtgaatggatggttattggatggtgtatagatagagggagggatggatagatgagtagatggatggatgatggatagtgtacagatggatggatgggtggatgagtgggtgtatggatgatggatagtgtatatatagatggatgaatgagtgcctggatggatgaatggcttcctaacccatgtccctcctcccccttagtcacgtctctcacaattatcttcaccacaacctatgtcatcattctctgtgacatcaacaaccattggtttccctggcctctggtttatttgtcttcctgtttgcattctccccaatcctccatctacctcagccactgcctctgccccggccacaggtgcagactccagctcattcagagtggcttctatcccaccatgccaaccaaggccagctgtgatttcatggtgctgaagccaatggccactcttcaatcctcatcaactgtgggctctccatcagcttttgagagctaataagccccttctcaaaacttcctcttgtcttggtgtcaaccatgctgggctcaccttcatctccgatgtctctggctgctctttctcaggctcatcaatggtggcctccccacatgctctccaaatgctgggttcctcaggacacttctctccagacaccacctccctccatgacctcattcatctgtataactccaaatggcagccatggagtgaattgaccctgaatttatagctctgaccagatcctagagttatgtctttactcagaggtcttataggcctctcataactaaaactgaattcttgttgttgtctccaaacttatgattgtgctggttctcaggagagaggacagcactgttcacaggtgagttgccttcttccacctacattcagcagaggcagcaaagtacacccgagtggcattggcacaaggatgctgggtgtgtcatctgcacctagatcctgccatgcctgccttggggtcacacaagctgtccagtatgcctggcctcatcctcctctcctccagcatgggagactccaccaggctgcagggtgcactcttgcctcccctccagcgtgggagactccaccaggctgcggggtgcactcctgctgccctgtggcagttactgtttccttcatcctcggctccaaagggcaaaaagtgagccccagcctgacactttccctctgggtgaggctgtcaaatcctctcctttctgatttcacctttcctggcatgtagagaataaggaataactccaagatcattctcatgggttttgaaacctcagatgcaaaagaagaaatgctctgaggttcctcagcctccagatgccacttcccagatcactcccccttggcttggcctcaggtgaaggtgtgtgtatgtgtgtgtgcatgtgtgtgtgcacgtgtgtaggggtctgctgtgtgcatgtgtaagaatgcgtgtgtgggggagtctgctgtgagtgcatgtatgagtgtgtgtgcgtgtgtgtgcacgtgtgtgggtctgctgtgtgcatgtgtaagaatgcgtgtgttggatctgctgtgagtgcgtgtatgagtgtgggtgtttgtgtgcatgtgtgtggggatctgctgtgtgcaggtgtgtggagtgcatgtgtgagtgtggatgtgttgtgtgtttgaatatgcatatatatgggtctgctgtgtgcatgtatgtttgagtgcatatgtgactgtgttgtgtgtgtgaacgtgtgtgggtctgctgtgtgtgacatgggtgtggtgtgtgcacgtgtgtgtgtctgctgcatgtgtggattgcatgtgtgaatgtgttggtgtgtgactgtgtgggtctgctgtgttcatatatatgtgagtgcataagtgtgggtgttctatatgtgtgtgcgtgtgtgggggtctgctgtgtgcatgtatgtggagtgcatgtgtgagtgtggatgtgttgtgtgtgtgcatatacattgtggatctgctgtatgtgtgtggtggtgcatgtgtgactgtgggtgtgtgtgtgcatgtgtgtgtggagtgcctctgtgtgtgtgggtgtgttgtgcgtgtgaacgtgtttgggtctgctgtgttcatgtatgtgtgagtgcctgggctagtgcaggtgtgttgtgtgtgtgcacataagcatgtgtctgttgtgtgcgtgtgtgtgactgcatgtgtgggtgtggggggggtcatgcagtgtgatcgcatgtgtgagtgtgttttgcgtgttcatgaatacacaaatattgtgtgtgtgcccatggctggcagtgggtgggcgggtgatggggcgtgcagagggatcccatccttccaggagacgtgacagggagccccctcccatccagcacgctcccctgaatgcacctgcgctgccaaaaggaggtaggggtggggagggctgtgccgtggccgcttggtgtacccttgtggcgggagggctgtgctgcggccactcggtgtgtgcttggggcggggagggctgtgccgtggccgctcggtgtgtgcttggggcgggagggagggctgtgctgcggccgctcggtgtgtgctcaggcgctgtgagcctgcagggcgccctcgcgcttcttcctctgcgcagcccctggtgttgcgttctgagctgaggcttcctaattgacgctgacggatgggctcagactcgagccgacagagccagctgagcggagcctgttaaaaatctcacttattaacccaagtcctctaccacactcctgtccctgtcagggccatgctgatgaggcatgggggtgagggctcactttggaagacccagcgccaaatgagcgcgtccctgggtgctggagctcccaggcagcagagccctgggcttccgaagggggctgcccaggccaccctgagcgggtgcaggtgggccactgtggacccaggcccagcaggtgtttggggggctggggccagtggtgtccacagggcagcttagtggcagaaatgaagaatcccacaggcacgtgggctgatggcctctgtcctgagaggaggctcagggtgcagatttcatgggtgcctgggcctggcctgtcctgagaggtggctcggggtgcagttgtcacgggtgcctgggcctggccttgctggtttcagaggaggggtgtgttgggcgagggctgctggaggagggcgggccagcttctcctgtttgtggctggagtgccatgtgcctggcacccaggaggttctccacacgtaattaatgaattaattaatcacaaaagcatttatgttttacattttctctaaaattaacatttaatcttcctaataattgcctgaggggtaaatactatattgtcttcatttggcacatgaggaaattaaattttagcatcccagggactcacacccagggccttggactccagtgcccctcatcactcagccacaggaggcaccagctgggggcctcggtgtcgtggcctctgcccttctggaagctgccacctgaactccttggctcaggccacgccctctcttgagacgtccctccccgtttcctgtcttcctcatcgttgaagatgtagcttgggcacctggcccccaagacatcttcccaaatgtccagattattgatccagctccccaatgaccccacccatctctgaggccacacagcccccgtgtcatttcccacgctttagaaaaaaccacccatctgtttctctgctgctagaccgcagcctccaccttccctccctatgaccaacacactgccggcatctaccacacacataccatacaccacacatgcacgggcacacacatacacatgcatgcaaacacacatgtgcacacactttcacatgaatgcacacacaccacacacctaccacacacaccacacatgcacatacacatatacacacactacacacacccacactgtacacacaacacacataccacatatgcacacaccacacacaccacacatgccacacatccacagacacaaacatatacatatatacacacaccgcacacatgccccacgcacaacacatatatcacacatgtacaaacaggcacacaccatgcacataacacacatatacaccatacatacacatcacacatgatacatacacacatctcactacacacaccacacaaacatcatgtgcactcaccacacacacgcaccacacacatacgctacacacacacaccaaacatgcacacatacacagacatgtacacatgcacacatcacacacgtctctcacacattacacatagacacacacgtgcatgcacacaggccacacggacacaccctctgcagggcagccagggctctccttggccccctcaccccattgatggccccggccgtagctccagatgctgctttgtgcaggtcgggtgtgtccctggtcgacaggtcctctcagatgcattctctcctcttttccctgaggacagatgtggtgtaatgtggtctttggccacctgaggacgtggggaggactggatgggatgaaacggtgccgtgatggtggctctggggtggctccggcagtggcaccatctgcctgatactcatgtgacctcagtgacctctcctttccccacagcctgctcctcattgtcttctcagctccctgttctcctgctgggaggcacagtcaaaaggggggtttgtcatggtttcctgtgacatgattcttcgtttgggggagcagcaacgtcttctccgaataagacacacagacccccagcgcaccagcaaaatgcagcagaagggaagcagagccagacgtgtgcaaaaccctctcctaagagcacaagtgaagggttttatgtgaaaggatttgggtttaaatcagagctgctggtgtgacgcgtaagcagcctggggaggagggacccgcggcgcccccggaacacagcgctcccatgccgacacccccggtgcacagcctccctccaccttgagcagcgagagggcccatcggcctccggggtgtcagcaaatggcccgagactggccggaggccagaggcatgtggtcggcagcccatctgcagtgccctggatgtggggacccctgttagagagaggtcttggggtgcccagccccgtaactaagatgggatattcctgagtaaagagaaaagaggaggagaaagggagggggatgctgcagggtctgtgcgaatccacatgtggggcaagagagggggccagggagccgcagtcccagcaaagcactcaacgccagggcagagggcagagggcagagggtagagggcagagtctcgcaccacccgcttccaaggatgtgccgaatgccagcctgcctgcttttctgagagcagagctcctgtctgagtgccagaggcctgtagactgcgggggcttcagtgcctgcccccgggcccctcctggagacaggcagtggacagtaaaaagaacactagggactttaaacacatccccgaaatcttaacaacttaacccaagaaagtttgtttctcactcatatccagtgcagcgtcctgaggtggagtgtggctctgctccgtgtggccactctgagatccaggctggctcggcctctgccagcccttggcttccaagcttgccctgccctagagctcgtggaggggaggaaagtgtgtggaaggtctccacagccagtttagggtggaacccatcactcattcaccctggggccgacccaggcccccgaccacaccgagcagcagagtctgcaaggcagcatggcccagggaggcggggcaggcacggggcagcagctggtctccacctcagagcacgctaggaggcgggaggcaggaggcgagccggcagggctggggggtctctgggctgcaattcatggaattctgtgtcttctcaggctgctgctgtgaacaagggtggagaaggagtgagtgtatttgtatatatgaggggagcatgtgttcacatgtacaccagcgagagggcgtgatctgtacgtgcatgagtgagagcacatcttcacatctgcacgagggtgacagtatgttcatatgagcacaagccagagagggcgtgtgctggggagtctgcaacatgcttacttgtgtgaatcttgccgcccagctctttctgaagcacagcgatgtctgcaacgtgtcaccgcctgagcgtgtgcagagtgtgcacagtgtgcactgcttagcctctgctttgtggcatgcatgtgtgctgctttacacacatgtgcgcgcgccccagctcatggcaggctgtaagggtggtctgtcccaggatctctacagcttctggtggcctccaacagtccttggatgtgggtggctctctccttcacgtcgacccccatgagtgcctgtctgcatccgaatgtccctttaaaaggatgccagcaacactggactagggccaactcccatgacgtcatctaaatgtgatcctctagaaagaccctatttccaaacaaggtcccagcacagagtctgggcccaggaccccagcaccctgagctcagcccactggctgggactccggctttcccacctcggcagcggtgcttctctaagtggctctacaggtaacaaaatgtcaggaaacaccacacaccagtcctgccttttgaccacactgatgcgcggaggcctaggcctggcaccctggagggcaaaggaccgaggaagaggccacggccatgggagggcgcaggcctgagcccacctgtggcccagccctcaggaggtgcacacagcctcagcctcccgtcctgcaaacggctggccctgctcttcccagcgtgcccagcgcctgcccacagcagcacccaggccaggtgaggacggtgaggctgaagggcgcagaatcttctgcagggaaaccggtcatgcaggcccagcagccggagcctgcttccacgtctccactgcctcccgcgctgctcccagaataaagactaggagggttcaggtgcagaggagagaaacgcagggccccgtgtggaaggtcagcctcaaagtcacctgaaatcaaacatcaccgtcaccatgcacgggtgaccacgtagctttggagaaacaaatatttaaagttgggtgagatttgcttccctccatctgggactcgtgcgcttctgtgcagaggcgccctctgcaaagtgtggacacctgaaacaggctgcctgcaaagctgctctgtgacaagaagccaattcaaagatgaaaagaagctcagtttttagaaacattttcaaataatggaatgagcctgtggatggggtgctggggccccatcactctgtgttcatttgggtttagagggatctccccgcttctcgcctccttgccatggtgaatcgtacattttgggcagagggtggcagatggccccatatgggattggagaagacgtggctccctgccccctcctgccccctcctgccccccgtctctcctccgtccctgtcctccctctgtcctgcccccgcctgtccccgtcctgccccgtcctgccccgtgtctctcctctgtccctgtcctgccccctcctgtcccctcctgttcccatcctgctcccgtcctgccccatgtcgagcgccagttctcctgtccttgtggcctccccacccttctccctgcccgtcaaacgctgaggaagccattgctgtcaggcggcaccgtggacgtggccttctccgggggagctctctgtggacacccacgtttccttcacgcgcacatccgttttatgatgtggagctttaaggacctgggaggaaatgggaggtttgcagttgtaaatggcgtcagcaggggcttcctcgcctgcctgtcaagatggaggccaagcccagggaggggttcctgagcagatggcaggagaaggcccttcgccgtgtcccccaggggctccgtgcaccaggcctcacctgcgcagcacggcagtgtgggtgtggcgaccactgcctcgcgtgggcacagtctcgcagctctgaagaggccattggggcagaacaatccccctcactctaaggagcaaactcctccaaagcaccacaaaccgcgacttgtgtcggggctctcacggcggggtccccggggtcaccagcagcatcacctggggaacaacgcaaatgcacgttcttgggcccagccctggctcagaagctctggctggccccgagctgttttacccgcgctccaggccattctgactcagggtccagatgaaaaccaccggggtaaggaatgcgtgctgtgtagacagccacacgcagggcagctggagcactcggggcagctgctaattaaaaagcaatgctcattcctcagtggacatctggaaaatacagcgatgcagtgaggaagaaatgcgactcccccggacccgcccagaggcagcaaaggcgcttatcattcgtgggcatcttgtcctctgatctttcttctgcgcatttgaactttcttttttatacgagtaggatcaccacattttgtacactaacaaagtttaacaaattgttagactttcccatgacattagggccttttccatttaacgagagctgcacatgctgttttggggacctgaatggcgtatcgaacccctgtccgcctctgactctggtctcccaccctcttccctccccaccgttccccgctgtccttggtctttgttgtcctagccacaccggcttcccagcactggctggactcacaccccacagcaggaggaccgggcagggtgaggggtcccaaaggtctgggcttaccactgaagttccacttctccaaccggcttgccctggccctgtcactgccttctctacggtcccacgcgctctggagatgcttgtctgtgggcccgggtggttggcttgggggaggctgccatgcgtgtggttttagcacggcacaggtctttgcagatacacggcacgtgtcacagtcatttgagcaccgtcctcctgtttgtcaccgagtcatctctttttaacagaagctcatccagaggctgtggtccgggtgaaattagggagcagcgtggaatgtgggtagggacttggcttagggacttctaaaccaagacgaaggcttctgggtttggaaggagggcgagttttccacatcctaaccccggtttgcacaacgctggtttccaaacggaattctcaacataccagccctgggctaccgctccgggaactcaacctccatttctgtgaagcccagctacccatctgtggtgggtcagacaggtgaaatcacgggcctccttggctatacgttaaatggaagttaaatggaaattggccagcacccggctaccaagggtgacaccggctgatgaaagatgcaccaaagcacagatgagccgtccattcatctctctcgcttacagctttctcagctgacatagagtttctggtctcctctgacaacttctttcttttcaccattaagaaaaactccaaataatttcaatttgcagctcattagcaccctatgcacagggagtgttgaaagagtttttctttttcctcttgatgaaagaagtccctggaactcaggacgccctcctcagaattctctcctttgttcttcccaccctcctccctcacctccctcatgccccaaagggagtggagtggaaagggaggaaagaaagacaaaaagcgaaacaggtgccccaggaagggcagcggaacccctcctcccacaaagccccttccctctgggcgtctctcccggcaagccccaagggtcccagcacgggaggaggacggcccctcggatctaatgagcggacctcacatccaaaaggggctgcgatgttggggtgcccctgccttggccagagcagacactgccctctgctcacctgtgtgcaccagagaacatggtcgagggatgccgggttgataaggggagcccggccaaaccctcagtcacatggagtccgcctgccctgaacctcctcatttctcactgcctgtcctcagagcgaggcttttttcactgagccatgtcttaagtcgagggtggtccttccctacttagacagcgaccccatcgccctatcacctgtcggagactcattcagcattggggatacagatggccttgtcctgagttccagggaccccaaaatgtataaaacagcctcagctttggtctagaccctaaaatccagagaagcaccctatgcaaagaggtgtgggtagaattggacccgctgtttggacctcgtcagatgaggggaggctgtcacagcgaggaagccactgcgtggagtctcggcacaggggccggcctgtggggagcatcagtctcccataagccgagtgctcatcaggttccccaagcttagcagcttggcagcatttattattgagcaagtatttcatgggctcacgcacgttcctgtgtgatgcctggtgctgaggacattaaatcctgtatatttggccagggttcttaggatttgggtgccagccctgggctatctcctgcccttaagcttagaaatctcaagacgttgaacacactcaggtacacagcactgtgccaacagccacgatggagaggagacgcatctacttcacgtggagatttggggtgaagtcattttgatactaaaacatacatgtgtgtgcatatatatatatatatatatatatataatagagtagattacaaaaatccatgagttttttttgttttatttttttgggtttttttttttgagatggagtctcgctctgtcatccaggctggggtatagtggtgcgatctccgctcactgcaagctccacctcccgggttcatgccattctcctgcctcagcctcccgagtagctgggactacaggtgcccgccaccacgcccggctaattttttgtgtttttagtagagatggggtttcactgtgttagccaggatggtctcgatctcctgacttcgtgatccgcctgccttggcctcccaaagtgctaggattacaggcatgagccacagcgccccgccccaaaaatccacgagtttttaagataacagatgaaacttcaaagacatctcctacctgctgctgaccctcagtgctcagtcttcagagcccccgatgtggctggggagggtctcatggaaaagcgtgagccctggggtgaggagcacagaccccagcagtcccgccgtccccgtggaaagcctgtgcccagcagtcctgccgtccttgtggagagcctgtgcccagcagtcccgccgtccccgtggagagccagcctccagcagtcccgccgtccccgtggagagccagcccccagaagtcccgccgtccccgtgaagagcccagcccccagcagtcccgccgttcccgtccccgtccccatggagagcccagcccccagcagtcccgccgtccccgtccctgtccccatggagagcccagcccccagcagtcccgccgtccccgtccccgtggagaacccagctcccagcagtcccgccgtccccatggagaccctgtgcccagcagccccgctgtccccgtggagagcctgtgcccagcagccccgccgtccccgtggagagcctgtgcccagcagtcccgccatcccgtggagagcctgtgcccagcacggcacctctagcccagcctggcatagcctcgtcaagttgcagagcccccagtgccagggcgcccgcctgtggaccccacacgtctagatcgctgctttgggatcacgggggatggtgcgctgcgaccatgatgtgttgtgaagttctgtgctcactgtccgcagcctttgcttaaacaacaacggttggctttatctgatgaaggtggaactgcagtgttctccacgtggccctcacatggctccgcagaagctcagggtgttgtgggccaggttcgcctccacccacttcagccagcaggggaagctcccctgtcctctctgccgagccctcgtgagttggacggtggccccggcttccagctccggcctggcggttccctgatctcctccccacgcaccctctgccatcagcctggtattttccatgacccattacagtcctgttccccgaacctgcctcctgttcaaggacagcaagtccatcccatgggcagggcccagcaggactgggccagtgagacggtttcctgtgaggatcctggggtcaaagtgccacaaactgggtggcttcaaaccacagaaatgaattgtctgacgggaccgcgggccggaagctggagatccaggtgttgtcagggccacgtgctcaggaagctctcgggcgactctctgtggctcctggcaatgccgggggctccttggcaggtagacgcctcactccgttccgtctccgtcctcggggcgtgtctgtgctgtctcttcttagaaggatgccggccgtactggataagggcctcatctttactaactccatccacagagaccctatgtccagaaggcggcattcactgtgctggtgttaggagttgaacgtgtctttttggggaaacggttctgctcgccacagtgccttggtgtcatctcatccaaccctgggcctacgcgggagctcacacggcgggggtggcgcggggctccttccacacctcgctcagggctgagccccctccagggccagagtcacagcctcctggctccacagcctcggtgtcatctcatccaaccctgggcctacgtgggagctcacacggcaggggtggtgccgggctccttccacacctcgctcagggctgagccccctccagggccagagtcacagcctcctggctccataaggcatctggcttgtcgcaacacgttcctctttggactgactcagctttcgaaaccttcttacttatcctaagcaacagtacccacaaaattcatgtttttgatgtactattttgctttttctcgtgcacattaaaataaagttttaaaaattgcccacattccacataaaagcaagtgacacagcacacttcgggaggtgctgcagggactgaacgtgtgcattaaaataaagttttaagaactgcccacattccacataaaagcaagtgacacaccacacttcgggaggtgctgcagggactgaccatgtgaaatgtgaatcgtccaaggcaacaactgaatcttatagatgcttaatccaaaagagtgttttcaacaaggtcaattccaggcccagggtttgtccaggacagcggtccatactctttttggcaccagggacctgttccatggaagacggtttttccatggaccaaggttgggggaaggtttcaggatgattcaaacgcattacatttactgtgcacttaatttgtgttattattacattgtaatatataattaaataattataaaacccaccatcatgtagaatcagtgggtgccctgagcttgttttcctgcaactggctggtcccatctgggggtgatgggagacagtgacagatcatcaggcattagattttcataaggagcgtgcaacctggatccctcacatgcacagttcacaacagggctcaagctcctatgagaatctgatgccactgctgagctgacaggaggtggagcccaggcagtactgtgagccatggggactggctataaataccgacaaagtttcactcgctcactcacccgccactcacccgcttacctgccactcacgtactcactcacccaccactcaccggccactcaacagctcactctcccgccactcacccactcacctacctgccactcacctgctcactcacccaccactcaccggccactcaacagctcactcacccaccactcacctcctgctgtgcaccccagttcctaacaggccacagactggtgtcagtccgtggcccagaggctggggatgcctggtccagtgggaagacatgggtgggagatctgggatgcccatggacttttacagagtgtgagtttgggggcaaacacacttggagttggacctcagctctgctgctcactagccaatgatctcagctcacagtgcttaatgttctaagcctcagttttctcatctgtaaagtgggaatcatagcagcagttctcagggatttggtagggtaacccacgtaaacatccatcccagagcctgacgtgccatgagaggctccacagacactggatctcagcttctgccctggaaggaagccactgtccccagaaccacttccgggccagagtgaaggcagctggacagcaggaggccaggcatttgcaggggcggtgcctagtctctgcagctgacagctgtatggaaccctgcagtgttcagtacaaagctccaggatgtgaaggatttgtcagctctcaggcatgcagccctgccctcaccctcctgtgatgaattgggccaggcaaacagtagaaataggagcagtcccctggctgtgcagaaaggcatctgcccactgggctcctgcttgtcccaaggaacacctcttccctccccatggccccaggtctgaggctccatcctcctgggaccagaggagacatctgggccctgtggagtcctaaaccttggccacagcatgacaagggcagggagtgctattcctgctctctgaacccacactcgttctggctgccatgtgtgtgcagcaccatctctccaagcagccgtcttgtggcttccccatccaatgggccgggatttccttgtaatcagccaggaagcattcctactctgtctgccccaacccatctcaagagggcacggaaagggctgggcacctgcaagctgacaaaccccattgttgtgggaacatatgtgttctcgggcacagttccctggtggtacaaaccgttcacctacagctttgccagctacatcggaagggccccatttctgcctctcctcccagaagatcatgtcaaagacaccagcctggccaaacctagcagagaactgagggcccagtctggggaagaatcagctttctgctagaaggaggtgggccctgaggggagcagaggctctccctggaacagaggagctgatgctcagaggggagcccagggcagcccctgagcttggtgctgctgaggtgcaggtctgatgggatagaggctgtgcatgcagaggagagcgggaagctgggcccatgccagtggccctccaagtactcactttgttcatgcagaccaccgggccgtggtctgcctggactgagggggttctcagtgcctcaacccagatagctctgagaaactggcaggccacggaaatcatcctggcctcctcagaaagatccaatagttcccaataatcctgccagtaagaatgcagagacagaagatgtacacacacacacacatacatgcgtatgcacatacacatgcatatatctttatgggcacacagatgtacacgcatatacatgtatacacacatatgcatctatgtatacatacatacacacatatacacgtatatgcatctattgcacacatttacacctgcacatatacatatataccagacatctatagacacatatgcacacatacatgcacacatatacatatatacagatacatctgtatgtacatatgtgcatatttttgtacacatgcatgaatacatatgtagatatacatatatacacatatatacatgcacctacaggttgagcatcccagatctaaaacccaaaatgcccccaaatcgaaaactttttgagcataggcctgaccctaaaggaaaatgctgatttggagcatcttggatttcagatttttgtatttgggatgctcaaccagtaagtgtgatgtaaatattctaaaatgcaaaatttgagacacttctggttccaatcacttcagataaggaatggtcgacctttatatatattacacacacacacatttttgtggcttgtgatagtctgctctctactgtgtgcacatcttcccacacctcttcacaaagaggctaagtgggcctttcaggtgcactcagcatcagcagctggcacaaaaccacctgggccgtcacccagccggtgcacacacagccacggtgtgtgtggagaagcaccagaccccatcgctaacgcagaacaggacagggctggccccaagcactcgggtccctcctgcctcagaacaaagccaggctcacacagacactccatgtccccaaggtgggggctcctggggcctctggctgtgtctctctcccttttgaattgcttctgttctgctttgcaaaacactgcctggtcttattattgaagttactttcttgggtttattaagattcttcttttactcaaatattgaccaaggcctgccctgcccccaccgcttaactggcaaacaggctgtggagccataacctgacactagacataacgacacaacgttaatgactttaaacaaccgggagtttacgtcgaatacatgttctatgtgtctaattttcacccctggtgctcatttaaattcttcgcatgttttaaaaatttatgtcttccttttcccatctccctgaattttactccagcctaatttataagaaaaatgtgctttgaacttttaactaggatgctggagaacaagccacctttcattcctgatgagctgcgatcttttcccttttcttcagaccttcagttgatgatgtatttgcacacgcacacacacacacacacacacacacacaggagtatatatattttttctatgcttcttaaagaaacaacaagtccttttaaaacacctttcaaatgcacagtataagaagcactgtgggggagaggaacagagactcccagagaaggagtttccttaatgcttactggaatttgctattttcttcttttcatggaaaatgtgtctgagagcaccagtacagctattatctgtatcctgtggcctttgtgggtatttccaggcagagagaggactgagtctagtgtgcagagcggcactcccaccccacgctgaggcagcgcatccctctgagagctcaggggcagcaagggcagtgagggcactgcatggcgagagggtaacctggatcacaccaatgtgggatgcttgttgccaggctccacacacagtggataaaaccagccttctctcgtgagtgaggcctagacctgcagggtgggaagaggcaggactgggagaaggggggctgggaggaagatgacatcggatctgtctgcagaaatcatctgtcaagagtcagaaggtgtcagatcttgctgaatggtgggtgggtggtctctgcatcacctactggtcacccagtagggcgagaagggtcagaggggagactgtgtgcatgtgtgtgcaagtgtgtgtatgtgtgtgcacgcgtgggtcctcaccttatgtgtcacccctcatctagagctatttggctgggaccttggcattctctggagcagctgcagttacagaatggaagctccgtgcacagtctagaatcatctagagctttttggctgggaccttggcattctctggagcagctgcatggttacagaatggaagctccgtgcacagacactggagttgttcaccactgcagtccctagaacttggtctgacatatcatgagtgctcagcaggtacacaacgaatgaagaagtgtgtggaaagaagggaaggcagtcctcacagacatggaagaaaaattcccagccttagcaaattgtttcatgaagtaggaggttaatcctctctgatattaagagctaataagcattcttaagagctgtatgccaccaaactatgacttcgcgggggcattgggtaaacaggcccctccacacccggtgaggaattagatgctacgaaataagggcttgcgcctgtttcttaaggaatcccttactgtgcaatttttaaatttcccataagatcctctttaattttaacttctaaatataataaggatacatcaatattatctactcttgcatatgtttctactaaataatttcaatagtttttcttgaggaacttttagaaaatgtttattatttcactgtctagggaaaatgttagcaatgaagaaattacaccaaaaagaaaagttgacatattttgccatcatgaaaaacctgcccagagctccacaaaaaatcatgcaacagttcccaattccaaaatatattacaaagctatggttattaaaacaatacactactggcataaaaacagacttatagatcaatggaacagagagtccagaaacaactcatacactgccaagtgctccttcataagcatgaggagaatacaccatagggaagggtcgcctcttcacaggtgctggggaaactggatgtccacatgcaaaagaacggcatcggaccctcacctcacatccacaaaaacccactcaacatgggctaaagactgagacataagactggaaaccataaacgtactagaagaaaacacgggggaagcatgatgacattcatctaggcaaaggtttcttggatctgacaccaaaggcacaagcaacagaagcaaatgtgaacatgcaggacaacatcaaaccagtgagctcctgcatcagcagggaaacaatcagcaaatccagagggcagcccacgaaaggtagggtgagtggtgggtgtgtggtctctgcatcccctactggtcaccggggaggaaatatttgcataccacataacggataaggagttaatatttaaaatgtataggtggctgggtgtggtggctcacacctataatcccagcactttgggaggcaaaggtgggtggatcacttaaggtcaggagttcgagaccagcctggctaacatggcaaaaccctgtctctactaaaaatacaaaaattagctgggtgtgatggcgggcacccgtaatcccagctacttgggaggctgaggcaggagaatcacttgaatctgggaggtggaggttgcagtgagccgagatggtgccactgcattccagcctggatgacagagcaagactccatctccaaaaagtaataataataaaataaaatgtatagggacttcctacaattcaatagcaaataataatgataacctgatttaaaaatgggcaaaggactttagtagacatttctccaaagaaggcatacaaatggccaacacactgtacatggaaagatgctcaacatcactaatgatcaggaacatgcaaatcagagccacgatgagatacgtctctgtacccatcaggaggctgtgaccaaaaagacgtgtgttggtgaggatgtgtagactctgaacacttacatgctgttggtgggaatataaatggtgcaaccattatggaaaacagtatgaagttttctcaaaaaattaaaaatagagccaccatatgattcagcaatcccacttccagatatttatccaaaggaagttaaatcaggacctcgaagtgacgggtgcgctccggagttcatcacggcattgttcacaggagccaagacatggaagcacatgtcccccagggacgagcgggcaggaaagcgtggtgcatagacccagtgggtgctcttcagccttaagacaagacggacaacctgccatctgcaacaacagggataaacctgcatgacatgacgtgaagtgaaacaaaagccaggcccaggacagaggctgcacgacgtcgctgaagcgtggaatctatgacaattgaacgcaccgaagaagagaggaggatggaggctgccgggtctggcgctgggggaagcacgggaaggggccgttccaagggcacaaggtttcagcgacgcggcctcaacgcggtctcgacatctgccgtacggttgagagccaacagtaccacgctgcacactcagggaagtgtcaacacggtgggcctcgctacacgttcttagcacacggaagtgaagtcccatgaaggaagcggagtcggagagggacgccggggcgggtttcacggtggacgaaggagctgcacgccgagaagtccagccaggtgccacaagccagaaaaggtcaggagccgccccagagcgtgcggcccacccaagccctgacttcagctcagtgaaacccatctggaccgtggcctcctgtgagagaataaatctgtgttgttttcctgcaggtttctgataagccacgtgtgttttgggggagacacaggaagccaaggaccaagcactttctgtgcggccgttctgttcttccactaagcgggcgttttccttcccagaaccctcggtggaggcattcagcagccgcctctcctgtgaatttttcttaaatatcatttggcaataaatcatagcgtgcccatcaaatttttccctagagaaaattattatttttaggcctttaaaacatttgctctttccttcttctaagatgatgtttgttttcatgcaggctaagatgtttttacctatactctatcacccacagatttctcaacccagtggggcagaaatggggatttgtgctgtttcatatggaatttgacattaaaaaaatccatgcagctgctctcacggggaggataatatcccccgcacctgggttaacgcagcactctcgtgatgcagagcctctccgtgaataaataaacctcgacagctctttctggagacggcaaagcagtgctccgtggatgaggccgttcatcctgcctcaccgccgttgctcctaacaggggtcgagagactgatctcgaaggcagcgctaagcggaaggcctgatactttcagcgtcggttcagtttctggtctggcgtaacttgcaccgtgtagcggaatcagatgagaggcacaagacgcattgtgacaccacataagcaccacaaagagaaagctgtggattgggtattgggtattcatatatatgtgcatatatatatgtgtgtgtgtgtgtatatatatgtgtatatatatgtgtatatatgtgtatatatatgtgtatatatatgtgtgtgtatatgtatatgtgtgtatatatatgtgtgtgtatatatatatatgtatatatatattttttttgaaacggagtctctctctgttgcccaggctggagtgcagtggtgcgatctcggctcactgcaagctccgcctcccgggttcacgccattctcctgcctcagcctcctgagtagctgggactacaggtgcccgccaccacacccggctggttttttgtatttttagtagagacggggtttcaccgtgttggccaggatggtctcgatctcctgacctcgtgatccgcccgcctcggcctcccaaagtgctgggattacaggcctgagccaccgcacccggcaggtattcatattttaaaagttaaaaaaagcaaagaacctctttctttctctaataagatgttgattaaattttaagtgaacaaggtacaagaggtgaaaacacaacatctatttccacagaacgtccgtacgagggtgttcccaggaggaggagtgcggcggcctgggaggcacatggatgccgagtctttggatcagcagagggtcgttgagtcgctttgaggggccagacactgttgtaggagctgggagcgcagcggggaagcacgctaggggtccccttgtcgcggagaagggacaggcactatagtgaccgggtaatttctagtaaggtgtgatgtgaagaaaggagaagagggcacagtgatggaaggtggggctaagcagaggcctctgagcgttaggacgagaagaagcccagcctggaaagaccccggggagaaacacagaggccacgcaggctggctgtggtgcctctgagggatggaggagggcatctgtggtacctctgagggatggggaggccgcctgtggtgcctctgagggatggaggaggccgcctgtggtgcctcagggatggaggaggctgcctgtggtacctctaagggatgggggaggccggctgtggtgcctctgagggacagaggaggctgcctgtggtgcctctgaggtatgggggaggccggctgtggtacctctgagggacaaaggaggccggctgtggtgcctctgagggatggagggggccggctgtggtgcctctgagggatggagggggccggctgtggtgcctctgagggatggagggggccggctgtggtgcctctgagggatggagggggccggctgtggtgcctctgagggacggggtaggccgattgtggtgactctgagggatggagggggccggctcgggaggtggttcgtgatgccgtgtgttgaaggctgtggatcttgtccttggtgggtgcaaagccagcagacatttccagagggagagggatgtgacttaaattgtgacttagaaagttcactccacgctcagaacactgggcctgaggagcacacgctggagtggaggccctgggccagtcggaggggcagtgtgcgagtcagatgagggacccgcacatggagctggggcaggacctgctgtaggtcccaaggtgaggagggagccctgggctgggtctgctctggtggggaaaatgaaatgtctgcttggccaagttacactggggcctgcagtggagacgttgagtaagtggctagaggaacacacgttcagcgtggggaggtctcacggcaagagatggcgatgtggggtctttggagcctggggagagatgaaggccaggccagcccggatccgaggctgacagcagagagcagggctgctgaagcctcggtgcagggagggcccgttgccctcagcatccctgtccagcacctcccacccacgctccagcctcacccagcccttcctccccacgagcacacagcgtgctcctgctcctgctggccccaccccgatggtgggccaggcccagctgcaaccactacctctctgacccgatggggttgtcatgtctgaagggcttgccacgttattcagtcacatttaggggccaaatctagaagttggagaagaaaggaggagggggcagcaccctagtcacaggggtggtattgaagatggcacgggggtctcctctcctgctgccttcctgggagagggactggagggcacaggtgctgagaagaagtggagtccctgagtggagccgatgggatgtggaggaaggcctgaggagccggtgggacgcccaccctgccccaccccaccccacagcaccagcatctgctgattgagtttaaatatcaacggttcaatgtgtagagccatctgtaatacttttagccccagattctttcacatcaataggcaaaaaagaggtaattaataaaacgaacataaagttctaattatagggtgtaaatatcgctctcaggagaattattaagatgaaggatgggttttgtgattaggagaagaaaataacctgcccaggggaatggaaaggaggcagacattctcagaccagaagcgacgtgtgtgtgtgtgtccgtgtgtgtccatgtgtgtgtctgtgtgtgtccgtgtgtgtctgtgtgtgtggaggggccactgctaacgactgtacagccaaatgggagaaatggccggtctgttactgatgcaaacaagaaagccagcatggtgacaaaatatttagcatggggacaaaggtcacagaggcatccttgtcatctcccagaggtgacaaatcacaggttcgtctcagaggcaatttcacattccaaaaggtagagaaataattcttttctatttttatttttatttatttttttaggactgagtctcgctctgtcaccgaggctggagtgcagtggcacgatctcagctcactgcaacctccgcctcccaggttcaaacgattctcctgcctcagtctcccgagcagcttggattacaggcgtgcgccaccacacccagctaatttttgtatttttagtagagacgggatttcaccatattggacagactggtctcgaactcctgacctcaggtgatccacccgcctcagcctcccaaagtgccgggattacaggcatgagccacgacgcctggcccagagaaataatcgttaaagaaatgtaggaagacagacctggggtcaaaggaaagatgagcatagtccccagtcctccagcttgagagctgcggggcctctggaggttcagaggggtctcaggaatgggctcagaattcaagactacaaaggatgctaaagacaaagattcaggctccaaagaaaggaaggaggacacataggaaaatgtaactgacaggtgcacacccagcctggcccaacgcagcccctcaccatggtctcagggctcagggagctcctggaatgcaagcttcgcgttgaaggatcccacaggcctgcagggcagctctctggccaggccctgccaccgagtggtacgtcccacagcacacccaggagcctgtggccgcctcccgtccgggccttggaattccttttggctgacagtctttgcctgtgtgaccctcacgggatgcctcccacgacctcagcctgtgaccctcacgggatgcctcccacgacctcagcccataagcatccctgtggccagcttgtgtaacctgccaggcaggaggctgggatgaaattctcacttgccacaccttgtaaatatcaggtgtaaatatcaccctcaggagaattaagatgagcgatgggatgtcctgcaggcccagcaacaaggccggactctcctccgcttcatgagaaaatgtgtgttgtcatcagatagcctttggggctgcctgggtgcagattcgaggctacctacttctcatttcacgttggaggtttcacggatcctacatattgcagagaaacctgaggtccgtttttggttttgctttatagtgataaatccgggatgacacagccgtgggccgtgttgagggctgggatttcggtgcagttgaatccccggctgtggccccagtgcccgttcatgggcccctcccgtgtgattctcccagctgagccgtgagttcgtctgagcggcgagtcggaactcgaggcagatcactctttgctgttgagatggttggatcagtgtgccccaaaatctcctgtcgaaccgtaatccccagtgttgggtgtggggcctggggggtggtgactggacttgggggtgatttttgaatggttttgcaccaccctctccttgctgttctcatgatagtgagttttctgagacccgtgtgtttaaacctgggtagcccctcccaccttgcgcctacgcccaccgtgggacgagattgcttccctttcgccttccaccgtgactggaagctccctgaggcctccccagaagcagaagctgccgtgctccctgtgcaacctgcagagctctgagccgattaagcctctttcctagaatcatccagtctcaggtgtttctttgtagccatggagaatggactaataccactgtcaaagatggtccaagtttgtttcctctctccaaccagatttttaacgtttccttctcttctctgcgcctttcccagtgatgaggacagtggcttccatgggcaggcgttcagtaaacagcacccagtgaactcagagctgccagtttaccccgcaggggcagcagagctgactaggattgggtgtagatgagctcagagcccacaaggccccacagggatgtcaccatcccggtaaaatgtgagattcgggaatgaataggaaaatcatgtgcttagtgcacgtaacatcagcagttgggaaagttcaccgggaaagaaaagcgccacaagtcctcgcatcaatacttgcagagacaaaataacctcaaggccgatctttcatgcctgtgcctgggcatccccgcgtctctaaggaggacagttatgtaatttagatggaaaattgacaggactgggcaggtccctctgattgatgtggaggccgtatctcacgtcctggaacgcgtgtgtttatttgctgtttcacggggcgggccatttttctccagccaggaagggtaggggtgtgcaccatagggcctctcccaagttcgcctcggcgcctgcccccctccatcacggtgatcaggtgtggccttagccccaggtttctgagggcgtcagcatcacatgtgtttgttctgcttcatgggctccctccgtcaggcaggtcagggtgtgacatgcaccccttggtgaccgatgggctggctgggtctcacagaaggtacaccaggtgagctgccaggtgccacctcctccacctcccgcctcccgcctcgtccacaggctcaggaaccctctggggatgagcacaagcactttcttttgaaaacgcctccatggcggaagttccttggttggggaggactttgttgttatcaatagcttgaaaatgaatcaagttccctgaataaacatgaggtcaacctcagcaacgttagtttgggcaaatgtcagagcaagcacagaaagtggctggaaggactttctcatgcgacttgtaaataaatgactgccgagtacagaactccaagggccacagatagacagcaccttgggaagaggttgagagttaaagagcagtggttcccagcctcagccccctggggagggtgagcaaacagacggtgctgaggccccatgtggagtcggagattttgcaggctgtggctggggcccagctttgctgcagctcctgggggcctcccaggtgcataggtgaggggcttttagtttgagcaccctccctcctgccaaagtgccccctagatgcacaggtgagggggctttgagcttgagtccccctcccaggtgccacccaggtgcacaggtgaggggcttttagcttgagccccccccgcccccgaccccgccgaagtgcctcctagatgcacaggtgagggggctttgagcttgagccccaggagcctcccaggtgcacaggtgaggggcttcaagcttgacacccccaccccatccccaggtgcctcccaggtgcacaggtgaggggctgcgacgcacagggatccatgtcttagaggaagtttcaatactttataattgcatccccgctaagtgagggaagcactctggcctctttcacatggaaatccctcctctctgaggaccgaggtgatgtgctttagcatgacaatgagtgcaggcagatatgaagtattttgtgatttaaattttgcttgtgatatttcaaagaggtttcctctggaaaaggttactgggagagaaggtagctcactgttctgctggtgagctgtctccacaactccacacatttatcgtggtttcaggctgggtgtcttcaggctccttgagctgctttgcagtaagtgacacaataaaaaatgtaaaatacagaaggcacccacttttcccacttacggttttagtgggtgttcacagaggcgatgaagaaatgaaatccccacatttaaacaaagcggagagtgacagtgagggtgatagtcctattgtataattgcctcctttgactcagagagggagagcctattttcatacttatccgaaagcagtgaagcttcaaagaataggggcagacacaatgggctttcagagggaagctgccatcgtcgacgctataattggtcaccgcactgcccgagtgcccgtaggccggccagacgcagaaccggaagtgcaggcagcctgggtggagcagggaggtgtgagcccgggtcagagcagagaacgaggggaggtgtgagcccgggtcggagcagagaacgaggggaggtgtgagcccgggtcggagcagagaacgaggggaggtgtgagcccgggtcggaggtgtgatcccgggtcagggcagagaacgaggagaggtgcgagcccgggtcagagcagagaacgaggggaggtgcgagcccgggtcagagcagagaatgaggggcgagacacaggcggccccctcccggccacctgggccccgagcttgtcctgggcccctcgaggtgtgctgccgaggcccgaaggtggcctggagggtggggacccgggaaggggctgtggggccctcagcgtggcctcagaaacaccgaaagccttgacctcagacctggctctggcagagagggggccgagggaggcaggtcagccctggggtccctgcaaggcggaggaggcaaaggaggaaattgacttctgcctggaggtcaggagattactgcttctaagccatgggaggagaaggggacagaaacacccctgtgtggtgccaggggtgccacgaattatgccattcaggcctccagtggatctatacgtggccctgggggacggtgtctcctagaggctccgagctgctgacaggacacttaaaacccagagaagccaacgtgttttccacgtgtggcagaactcaccattgctcctgacagccggagggcgagcatgtgagaatcccacgtgggaatgaaccacgagcatccacccatcccaccccggaagaggcaccacgccccgcccttgcccccaccccagggtgaagccacgggccctggaggcccctcagatcctttcctcccccaatttctgtgattctacttataatttgaacaattcaagggtcaaactccacctctagaaacgtgcatactcacagggtacacagggggtccacagagcaccccaaaatgtaaaggttatcaccgccgcgagggtcatctgtgacatggagaccaacctctgccatctcacgtaatgaaacacctttagaaaaccttacaatttttgttcatctgccacattcttttcagcagaaactgtgtttgctctgcagagggaacagcaggggactctcggctgggtgcctgtgcctgagcccgtcctgggcagctccaggccctcattctcccgaccacaaccgcagctgcagatgcagctgcgcccccttcctctccccgggcacagcgcattgtagaggggtcccattaattctgaaaaaaagccttacaagatagatagaaaatttatctcatttatttaagctcatcactgctgattaatcccaaactggggtcccttgcctccactttagaaaaagagatgagttttaaactcggcacccgcggccctgggagattgatccgcccggtcatgctttgaagttgaagcgcagtgcccatcgattgcacacattaaatgaccagccacgctgtagaacgtacagctcatgaataagaagtacccaagccctcctagtcactggaaagcctcaggtccagccatcacggggcagcctccgggtggcccatctgcgggctgtaggagcagagacccccggccccagcctgggcagacgtctgtcgtgcagtgtggccagcggacaagcctgctttcctcattcgcttacaaggtgttctgtgagcacccagcttccccaaggtcctactgagttgcttgggacactggggagcaggcaaagacgactagcagatgccctggacgtgcaggagccgtgccatgtgggatccccacccccgaaaacacaccctcgagctgaaggcagctggtgctgggacgcggagacctcggctgagctccctgggggtggagatgggcttctctccactgctggctaatgtccgccagagccacagcaaagaggggacccaggagaggtggccccggggagctgaaactcagggagatggcccagggctgggctggcctgagtatagcaagtacgctgcacaccaggcgcagatgccccgctgcgggcgcctggcctctcccgcggcttgctggctcagtgcgggctgcaggtcagaggccacaccttgcagaaggcagatgggaacgcgagccccaccccatgaggcagctcaagatgatctgtaagagtcactcgattgagcggcatgaacggggagggggcttcataaggccagagagttccaggcaggggccacttcgcccaactttgacaaactggcagtgtgacccccagaggggaaggacaggctctccgggcaaaggggactcctccatgacaggctggttttattttatcgaagcacttcgtggaggcctggtcggcaggaaaagccgcacatattttccgtacatatcttcaggattttggggatccgcgtgcgcccctctgatctgccctcttgggtgcgctccgagcgtgctgcacggcgttgctggctgtaggtgcgataccctccaggtcctcaggaaacatggtctgtaccagaaacctcctaggagaacgctttgtgtttgtgacataacaaatgtaagcatttttgatgttcaaagtcctctctcaaactttttttgttgccaagtgaatgtaaaatccagaggatgctcttggtcgagagggtgactaggagacgtgtggatgaagccccagagcccctccgctctcaccaccctgagtagggcaggtgggtgcagggagggggggcgggtgcagggagggggggcaggtgggtgcagggagcgggggcgggtgcagggaggacaggcaggctggcgccaggcaggcgtgtggaggcgggacccgggcacatacatgcatccgcctgcaccagtcccgacctcagagccaagcccagcggccgctccgcttcccaagcacgtaaaacacgccaggcacgagaatatgtggacgcgggcgcttatttcttgttgaattttgttctgttctgttttcaaacatggaatcgggtgttgcatcgtgttccatgatttgctgaaaatacttaacaaatacgaaactgtggaatatcttttcttatcacagcaaatggacgtatctcattcttcttagtcacataaaatatttaaataccctccgcgagagcttgtttgccactcatttatttgctgttgcaggcgatgccagagtgactgttctcatacacatacatgcacttatgctataattcttatcaattagattataagaaacgggattttttttgctcataaagtatgtgcatttttattgccaaattactttccaaaaaggctttatcagtttgcatgtgcaacagcagtatattaaaaaaagttattaaaccttttaacgtttaccaatgtgatggtgttaacttttgattttttaatcattacagaacggaatgtctttcatgtacttatgtcttcccctgagcttcacccgagcagagaaaatgctcctggaccctgtttcctcaccaagttgtaggagctatttgtctataggaaatagcaaacttttaatacttctggattaaaaaaaatagcttaggttttgtgacaacttgaacccaagattaaaaagtattttatattttcttctaattatcttatggtaaattgtttattatttagattttgacctatctgactttttaatattggaatctcacttcattttcttacacaatttcccacttgtgtttatcgggtggattttttctgtacccacgggtttgaaatgcccccttcgtcatacactccaggcccttgtgttgtcacgttcattcctagaccatctgttttgtactactggtctgaacgctgatcttcacgcaaaacacgatttaatacctgcaggagcgcccggtctccttcctgtgcccccagattgcttgacagttcctgagcatgtactccaggacctgaacccaaaccacctttagaaccaagttaatgacatcctgccacccccgcaccacacacacacaccaccatacacacaccacacacattcacaccacacaaacaccacacacacacccccaccacagacacacacacacaccaccatacacacacgtcaccaccccacgcaccacacacacacaccaccatacacacaccacacacaccacattcacaccacacacacccccaccacacacacaccacacacacaccaccatacacacatgtcaccaccacacacaccacacacacacaccacacattcacaccacacaaacaccacacacacccccaccacacacacattcacaccacacaaacaccacacacacccccaccacacacacaccaccatacgcacatgtcaccaccacacacacaccacataccatacacacacaacataccacacacacagcaccacacataccacacacatacctgcacacatactacacacaccacatacacatcacaccacatatactacacacacaaacataccacatactacacacatcacacacacaccacacacataccatatacacacacaccacacatataccccacacacaccacacatgtaccccacagacacacacaccataccacacacaccacacacacatacccccacacacatacatgcacacataccacacacacatatcacacccacatttcacaccacacaccacatacacacacactgtcaaaggctggggacctcaggggaccacggagccacctggtgtgtggctgaattcccttgttgtcaggtaacacttttgaagagaagcccaggccgccccttttctctccggcagagacctgaccctggaggcctcccacgagcctcctgagagctgaatttctgaggctcatgaagcccgaaacccagtctctctgaccttgtacaagatgtctgtgcccagggggcctggatgtcccagggtgggtctggctgccccgggaccaccaggagggaacgtgcccaacaggcagcttagaaacagtagaagccagcggcaccgggcggggagcttctcgagggagcggagagtacaaggcccagccagttttgttgtgttgctttcaaagtgtccttcaaaggtgaaccaaattcatcccggaagcatctgacttcatctgtcaccaaagaggaccagcccgccggaagacagtgatttcccccatcaggtgtgggcattacctaaagttgctgacctcctagaatttttgtgacgctctctaattctagcaatttagctcaaatcctaccattctgactgtcctgtagtgactgttacggtgacagcttgggaaatggaggcaggaaggggcgtgagctccgttccttggggaaggtgtgggtttcgcctctgtgagaaaggagatggctccagggagctatccccagcattggagaggtggttccagcggcctccagcatagcagagatgtggccccggctgcctcccacatggcagagaagtgggccggcagcctcacgtgtggcagagggctggccccagaagcctcccctatggcggagatgtggcccccgaggcctcccgcgtggcagtggggtggccccggaggcctcctgcatggcagttgggtggccccagaggccttcagagcacacatcttccccgcatagcccagcagggctgcatgcctgggagctgggctccatgtggcttctcatggtgggaaatctgccttctaggcccttcctaggggtgacgactaagaggtcgtgggggactctttggagcttggggactgctccagccccgtggaggcctgtggagagctcctccctaaaccaggatgggttctggtcacgttggttgatggcacacttctcccagggtctccagacagcagtgtcttgccaaggaggctgaaagcttcctgtactttcttttttttttttttttttgagatggagtctcattctgtttcccaggctggagtgcagtggtgcaatctcagctcactgcaacctccgcctcccaggttcaagtgaatctcctgcctcagcctccccagtagctgggactacaggctcatgctaccacacctggctacttttttgtacttttagtagagacggagtttcaccatgttagccgggatgatctcgatctcctgacctcgtgatccgcccgcctcagcctcccaaagtgctgggattacaggcatgagccaccgcgcccagcctcttccctgctttttactggttcttctcttctttggcagaactctgtttgaacactgggatttgcgaatggcagagaggctgggtctggcttgtgtcggcctccaggccccggctgcgtggttcccaggggacccggtgctggctccccattgtccagacctccaggcctgtcagtgtcttggggacgtcgatgttgccagcagcttttatccactgggggtgcagaggtgtgagggagatgccaagaggggaacagcccaccccagcccttggcagcttggacggggcccccaggtgcctcccccagccatgagcacaaatgaagtccgagggaaagatggggctgggctcacccagccaccaccccaggggacccagatggcaccagctcaaacaccaccccgtctcccacagagcaggtgttcagggtgtcccagggaggccccggtcagtgtgaaatgcatgtccttgtcctccaggtcacggccactctcctctgcctctctctctgtggggtcgcctacaagacatgaaggacaaggagagaagcaggacgtgaggcccaggggctctcctggccccctagactgtggggaagccccctgcccgccctgcccactggggtgacccaggcacagcaacagctgggagtccacgcgccccccaggcccaccggctgctgcgccagactttctatggcatcttcagatgtcactcccagcagaggccagaccccctcctgtcgcagtttccatcaaggtggggcctggaggccacggatgagcccccttgctcacctgatccccgacaccccagaggggttgtgggcatccactggcacgcgggggtcataagtggcatccaagtgggtttcccacgaattgcttccagaagagccagtcccgggcagccacccccgcgtcccccgccgcacccgcgtccgcctcccgggcagccacccccgcgtcccccgccgcacccgcgtccgcctcccgggcagccacccccgcgtcccccgccgcacccgcgtccgcctcccgggcagccacccccgcgtcccccgccgcacctgtgtccgcctcctgcccctcaagctgtcccaggctcagtggcttcctcaggccatgggacctacagctgacactggcactctgtgtgcggtggtgcagacagcactgtgggatgtgccagagctgctccctgcacttcccacagtgggcactgagctctgggcactgggcaggcaaggccaaagccgctggaatgtgccacccacctgatgatgaaaccacagcaggctgaggttctgtgagtcttacgcgtttttaaatgtggctgtttctcttctaaatgttaccgctgccacatgaattcatgtttccaaacacattgcaatgagagggtgctttctgcacggatgtggcctggtgtggccctcaccggcagcgcctcaccgtcctctatctctggggaccatagtgaggctcctgagagtgggagcgagcccggtcctcaccccgtcaccaactacctggggacagccactctgtgcttccagcctcaagggactcacgctgtggacaagcccagtttccagtgccatccacagctgggacagtgcccaggagtgctttgtgaatgggacgaagatcacagcaaatgagcccacctctgggggcttttcccagaagtacaataaataatcttccttcttagacttcatggtccttaaactttataacaattcagatacttaggcagtttttcaaaacatgttgatttaaataaatactgaactagcactaaatgctggtgagaaaaccagcaagactaaagccaggatacgtgaacggtacctgtggggccctaggtgctagtcctggttaatattacctgtgccgttccccgtgtggtttgtgtgagcagggagaaccccacgcagggctggcccgagggcctgggatccaccccacagcaaaagcgctcagccagctgaagcccttggcgcgcactcggagtgcggctaacgctcgtgccccacagggggcagaggaggccaaacagcaggggcctggcacttgcacgggaccatctctcctgggagcagcagcacccagagccggcccagggggtccctgcagccatccccacccggccctcccaccctgctacccaggtgagcaggctggtgaacacgcacacaaaaaaaaccagtgattatgaactccaggaaaacctccgctgttgtgcagaagggaaaacgcaggcttcagctgggccccctgcgcgtctcagctcccagccgggcgtggcagctgctagactgtgtacctggaaaggatcgcgattcttctcccctcccgccatgcttcccaggccggccccatgcccatctctgagcaggctcccccttggtgtgctgtgcccacggtctccgtctctgccctctgcccaccgtctgcagaaagcagggaccctggtcctgggagaagcttccctccatgtctgtccagtgtagactgttcagatttcagcagagaccaggtttgcggatggcacccaggcaggtcgcaggcgctctggtcctggggaggcctgcccgcgagtgctggctctagtctgggagtggggccggcctggggcccctctgagccctgccccaggctccaaggccttttccaccaccccctttcatcctcgggggcgatttcgttttggagcaccgtggtctgttttcactcagtggctttggggttggggggacccgcggcagctgtggatccaccgtcaccatagagtgtggatttacaccactggccttggcgccccagacagggcaggccgcaccccggtgcaagcctgtggggcggggcgtgtccccacgtgggcccgggttatcctgctccatgccagagcccctgtggagagcctgtgctggctgcttctcggtgttcggtcagccttctcgccgctgtgccaacattctggaaacacacacacagctttgttcaactcctatgacgacgcgatgaaacagcggctgtaacagccgttacaagtggaaaaatggaaactgaagagaccgcgtgacctcagccgcctggacagagggcctcggctccctctgctctcctctccagccccactgctcacctggccactggggaggggcgcgtttcctcagagaaacagctgcccacccatttgaacaagtccaaaaatatcttgaccttattacttgtccaggccccctgggcccctatgtcgccccacacgatgggttcatttccttccattagctgcagagaggccgggtgtggggtcagggtttgcggtgaaatgtcgagacccagggggccctcggtttgcactgccacgggatcagctcagcccctgcccgtttcatacgggatcagcccagcccctgcccgtttcatacgggatcagcccagcccctgcccgtttcatatgggatcagcccagcccctgcccgtttcatgggtcagttgctcttcaagccctttgtggagaggagggtcaggccgagcgggatagggctttctctccagcgctgaggctgaggctgaggtggttcctgcagggcaggaaggttcccgcagccacagcttttgcaggtgaggctggacccagccctgagccttgtgggcgctgctgcaggtcggcatcttgctaggagcacctcctccagtgtgaagcagcaaacgagccccgggtgaaggttcgaggggctgctgaaccgcccccctaatccgtcactgtgcagatgctgagaccccagaggtgggggcaggccccccacttggcctcctgagacctagttggtgcctttccaactaggccaggctgactcacgagctgctctgggccagaagccacgtggtaagattggtccctggcctaacgttgagctgcctgtgccctgcccacaagcagaatttaggaatagtccctggaagcagaactaaacacacccatcccagcttccttctcctcctctgcacttacaccatgagtgtctctaccttgagagacttaaactccaaccatgtgggaaatgtttcagccactcatcctgaatttactcctgtgggacagcagctgcgctctgcttgaaagagtaagagatggaatatcctccattcaaccagcctcccagccctctggaaagacacctgccttcctggtttcacttttcttcttgaatgaaaacagggcagtgttcaagcctcagagggcctggagcaaagatgaaatgtgaacagcctccggaggaaatcactcaaaagtagggtcatacgaatccacatgggaaagtccctgttccgagtaagtgggagtggggcgggaggctgaatccaggacccacaggtgggacaggccttcctgccagggcgtcttctctgctgtttcaagagggctcctggaatcttgtttactgccatacttttctttgcagaactttttatagccaggatcggtcaactttagtatggactccgctggcccctgcatgctcagaattagtggagttcttagtaagatgacttcatactagattaaataagcacaaggtaatgttcaggattgtgggctgtcagctcctcttgggccagcagtgccgaggaacatcaggctcagacatgcgttcgatgaaccttcctaggtatggatggacgtatgtcccaggctgtgtggtgaggaccctcccggtgtgctgtgcatgggagtgtccattgtgcattacatattcagatgggaacgtgagtaacaggccacgtgtcacagcaccgccaaggcaggtgtattcgtctgttctcacgctgctaataaagacacacccaagactgggtaatttatgaaggaaagaggtttaatggactcacagttctgcagggctgaggaggcctcaggaaacttacaatcacagcagaaggggaagcaaacatgttcttcttcacgtggcggcagcaaggagaagtgccgagcaaagggggaaaagcccatgataaaaccgtcagatcttgtgagaactcggtcactatcatgagaacagcatggggtatccacccctgtgatgcaattacctcccaccaggtcactcccccaacatgtggggattatgggacaattcaagatgagatttgggtggggacacagtcagaccatgttagccagccagcaccgagtgcactcaaggctccccgagtcaagcagccagcacattctgtcatcccagcgcctctactatttaaggaaagagagcaaagcctttattttcattgtccattttcctctgattcctctttccaaactgggcatttttgtgctggaaagaaatcctgaatgttgatgcgatgctgtgtgatcatctcttgggtagtcattttccaaataatttcttggagtaccgacactcgtcgttctttcagggacccctgggggcagttggtatattatacatgtatgagtttttagatggctcctctctctcaggttatttctgctgtttctgttaagattatagacaacataactgggatgtgtgatttcataggttgaccctgatcagcttcccatgcctggatgatcagtaagaagccctggaccccctctgtggagggcgggctgcagctcctacccttagagctgattcaccgttttcagatactggggccaaaccggccctcccagacgcctgctggaaccgattccgcctggcactgcatgcatcccaacccggggccccattaattctcggatgcctgagtccagacccacttagcgtggttgactggagcctgtgccagggctgagctcatgagctgaattcttacatgaacaaattacttgcagtttggtctgtggctttgcactgcacacctctgtggccgcccctcagcatggggtctacggtcctgtgcagagcaggcgaggcctgggtaagccatcagggcaaatccacccacacctttggcaaagccagcccaggtctattccctagggacagtgaaagagatagcataggcgaggccatacctgtgtgcccgcacctgggaacctactcccgtctgtggcaagcttggaggacagtggtggctgaaaatgcaggaagcttctcaggcatatgggcatctgcctgaagctgctgtgtgggcatttcacatccacccctgaaagcccagaaagggctgacagctgctgccaaagtcagtggggtgtggtttgccacagaagtcagcgacagcagtgggatgtgatttggagctggctgggaggctggggcagggtattgaggctgaagtaatatacgttttgggtactgtgaagtcagatgacttgataaagatgcagaaataacgatttgactgagggcaagaaagcaacctgggaggaagctgggtcagcttgtcctcagtcaggaagcttccgccatgcaccatccaggagctctcccagctgcacgcttcatactcgaacttgtatgagatgggaacccatgacaataaaaccaggctctctgggatagtattgaaaaagtggaagttttcttagtacagattcatctcaccttgaagtctgagagcagacccagaagaattgattgcagtggtcgagtctggcctgattcgatggtgtttgctgcatttgctgggaccagaagaagggcacgcatgttgtaagcactgtcctcaaagagacttgacatcaacaacttggcacagggagggttaactgtgtgttattctgaaaatatgttttggtccggacatgtccaggcggtaatgtagcagaccctccactttgaggagatgataataacactagcccatgtgtaatatatcaaatcaaaagcagccgtggacctgggaaggacagacttttcatcaaaaggcctggtgctgtggggtcagggctgtggcagggcagtgctctggccataggaccgcaagcactaccacagccaggcgaagggagcccttgtcttgttccgcagaggggagtgagcatggctagaaggagccgcatgtgggtgacgtgggtgtgagtggaccaggatgtggggtgattgtggccgtgagcggcaggaggccagagaaggtttggcctggagctgcctggctcaggggctgcccactgcctcggtgggggtggtgagagttcaggtgtgcactgaggagagaagtgaaaccgacctttggttagtgagtattctgtcctgattgatctgtggggacccgcggggcagctcatcacggatgaggcagagaaagcgagtttggagagctcgtccaccttggcccgggggcacatgcaagcaacagtgtcaagtgctctctccgtgctgggtgtggccccatcatgcattccaacatagggaatacccgtgaccaccctgcgaaatgggtgaagccccattgtgcaaacagggaaactgaggcacagaggaaggcagtcccttgtccaggggcctctcacggtgaaggcgtgcagagccagtactggaagccagcaagagggctgctgtatgcctgacttggctgccacggtctgcaccatgtcgagctgcctgtggggacaagcgaacttcagttgctctgggccgtgttccgccatctgatccagcagcacggcccctccgccagccaagcctccttcacactcctgaggcctcgctgagcagccgccaccccttatataaactgacagatatggctggatgcttcgacgtcacctaaagcttcaccttcagagtgtgcactatcccatcctatttcaggtgttagctgggagtgggaaggccgtgtgtaaggagcaaggggagcgagcaaatgccttgctctgaggaacgtccttgtgctggaggtagaccaggaggacacacggcccagaggctaattctttaatagtagagatacgtggtgggatcataaacaaagacagtttcacgggcttttgctcgtcactagtgagccctaattataaagtatcgaatcagaattcaactagccaagccatcatcaaaaactcatagcagttcatcaataagtgtgtaaaatcctactctccatggacattgtggaccttgggaactggggtcagcatttttattaacccgtgtggacacagcagtctgagagttttccattcctcgagggctgcttgcggcgtgttgtacgtcgatggtatcagtggcgtcccagccctgcttgggaggacacacactgctcattttcagcaaccagggagaatgaaatcacccagcactcttcctcaggctgatgacctcggggtgccctgggtgacccagccatagggtgagcattcaggccacagcgccttccccagaccctcaggacccctcatcaggacatccttctggccggggcccctcaccccagctcgtcctggccagagtctagggtcagcctttgtgcttcggagactcctgcagcagggtgagaagcaagttatttagacagagaaggcaagcaccggagacagcctgccgcccccaccctccgtcgccctgctggggacaacgtggagggcactggcctgaggagggaatttgggggttcctgctgcctgtcaggatgtggagcacagtgcagcagtgtgtggtgaggggcagcgggtgggcggtcattctggcagcctgcagggtcccaggaaacacggtcttctttggtcagatgagaagcaaggccttgctcagcacaagcgaccagcacgtgacctttcacctcaggtcaccaagagtagcaacagttaggcctcctccaccgagcacatgccttgctgaccttgcccagggaagcctggcagccagggcggggctcccatggcaaggaggcagccctcctccaggagataagccgtgtccagcatcctcaatgtagcgctactacctctatatgtaaggcctgcacctggtgacctaagtcaggttttgcttctaggtggcatttgcttgagggtcccaagaccccagggagggcactgtctgaagaccccggcacaacccctcagagaacacggccacctggctgtgagcggagctctgcttgagcgctgtggcccgtttccagcataaagcaggaagttcctgggacttgagctgagcactgtgtggcttcatcattgttttcagaatgtggtctgtccagagagcagtggcataggaagacattgacttgttgcatatgtgggcattcagcgcctgtattcacgtggacatgtttatgtgggcattcggcggcacctgtattcacgtggacatgtttatgtgggcattcggcacccgtattcacgtggacatgtttacgtgggcattcggcacctgtattcaggtggacatgtttacatgggcgttcagtgcatgtattcacatggacatgtttacgtgggcatccagtgcctgtattcatgtgtacatgtctacataggcattcgatacctgtattcacatgtacatgtttatgtggacattcaacacctgaatgcacatgtatgtgggcatccaacacctgtattcacatgtacatgtttacataggcattcgatacctgtattcacgtgtacatgtttacatgggcacccaacacctgtattcattcacctgtgtacatgtttacgtgggcatttgatgcctgtattcacatgtacgtgggcattcaacacctgtattcacgtggacatgtttacgtgggcattcaacaactgtaatcacatgtacgtgggcatttgatgcctgtattcacatgtacatgtttacgtgggcattcgacacctgtattcacatgtacttgggcattcgacgcctgcattcacgtggacatgtttagtcgtcagcctgagccatgcaggcggagcgttggcttttgagaaggtcagttgccttcctcacttcctagcctgtccccagggaggaaaacagggagtctgtgtgttcttggagctctggtgtcaccgcggagtttgctgtgctcactttagactctggttctgtaacttttaattccttcagtggttcctgtctgaattggtttttgctctcgtttggtttgaattggggtatttttttttttttttttgctgtggtgtaaagatttttctaaaggtcctttaatgttatacaagtcaattatgcatcaatattatggattaaaccattttcctcagcagtggttgaaagaaactagcttttcagcagacatcttattctggtggatctttcagtgcttttaaagtaaataacaataaagaaattttcatttctatttcaaagttttactgtaggcattgcatgcagactgattataaatgagcgagcctgcccttcccactgggatgtgaagttcgctgaattatgtcagcagcccaggaatgactgctgtgcctaagcacaccttctggccctagctctgaatccacatgtgtgagaggagcatgcatgtccctgatgcagcgggactgccctttcatagtgtccgggggacaggacatgacaggcaggatctgccagagccttgctgcatccctgagcttagcagtgtggggcactgcgtgtcctccggcatcaggaaggctgcgtccctgagcttagcagtgtggggcactgcgtgtcctccggcatcaagaaggctgcatccctgagcttagcagtgtggggcactgcgtgtcctccggcatcaggaaggctgcgtccctgagcttagcagtgtggggcactgcgtgtcctctggcatcaggaagtcacagtgcatggccccttctgtaactcagcgaccgacatgggcgtgtttccaattccacttgtatgtgtttcttgtgtatctaacaagaatttgtggatctgtttgaatgtgaaaaaaatgcaagcattctctaaaattgaattgtgtgtggagaaaatgatactgaggataaaagtgttgaaaagagaacaggaaaagcggagaaagaaaatgagggaaaggaagagaggaggaaaagagggaaagccacagcaccagaggaggggagtggagaggtagggaggaggaggagagggaagaggaggagagggaagaggaggagagggaggaggagaaggagaagatggaggaggaggagagggaagaggaagaggagaggaaggacgaggagaagagcgaggaggagggggagaaggaggaggagatggaggaggagagggaggaggaggagagggaggaggaggagagggaggaggaagagagggaggagagggaggaggaagtggaggaggaaagggaggaggagagggaggaagaggaggaggaaaggtaggaggagagggaggagagagcatgaggagagggaggaggagagggaggcggaggagagggaggcaggaggagggaggagcagaggagggaggaagagaggaggaaaagagggaaagccacagcaccagaggaggggagtggagaggtagggaggaggagagaggaggagagggagaagaagagggaggaggagagggagaaggagagagaggaggagagggagaaggagagagaggagagggagaaggagagggaggaggagagggagaaggagagggaggaggagagggagaaggagagggaggaggaggagagtgaggaagaggagagacagaggagggaggaagaggaggaggaggaggagatggaggaggaggagagtgaggaagaagagagaggagggaggaagaggagaaggaggaggaggagatggaggaggaggagagggaggaagaggagagggagaaggaggacagggaggaggtgaagaggaagaggagggaggaggagagggagaggagggaggaagatgagaaggaggaggaggagatggaggaggagagggaggaagtgaaggagagggagaaggaggacagggaggaggtgaaaaaggagaggagggaggaggagagggaggaggtgaaaaaggagaggagagaggaggtggagaggagggaggaagagaagagggaggaagaggaggaggagagggaggaggtgacgccccctccgcctcactccttgcccacctccgagtacacagctggctgcggctatccccccgggcccagcccacctatgcacacctctgagtctgcattttgcggcggtctcctcactgaccatccctatagcatcacagagacagcggcgttactgtaggtcatgaacagaaacggctcaaacaactcaagaaacacagttctggccacgccaggcttacttggtgagcagatgccctgtgaggaacccagcctgcaggcctgcgggggacaccatgacccgggcctggggcaggaaaccctggatgccccagcaggtaccccagggcgtggagcttccgtccaggctccgtcctgcccttgtgtggggactgccccgaggctgcgcccgcctcagccccacacccaggcttgctgtcctgggcgactccctgcatgtgagcgccggctcccgaggacgaagccttcccagcgctgctgtgtccccatgtgccccgggcgtgctccacgctcctctcctcgaggcatcgagtcctgtattcaggaagcttctcacgctgccgcctccgccctgtgggttgaactgcaagggtttgttttccttccatccctcggccctgtccatgctggttgcaccttcactgtccccgttatgcctatgggagaatagggactgcccagacccagcagggtgaggtgaggtagcctggccactgcggctcatgaatttgggtggaaactggggtcctgtggatttctgtccctctaaagagcagctcatatgacagtagctgccgcagacccgaagggtgagagcgagtggttgccacacacggcgtcctgcagagtggcgccatcttcccaagtcacatctgagcctacactgccgtgacggagtgaggcgttccgagactgttcgcgttttcatgaaacgtttctccttcctgaggactgagggactccctggcatgtggacgttttcaggccctcagactctgctgacagcagttaggatgcaaggccaccttctcatcttccctgactttgctttcattgtgtcactgttctcatcaagaactttcagagactctggcatgtaagtagcagaagaagagaccatgttccttgaccagttattatttcaggccttttacctccactctgacttgtcctcatggttcctctagaggaagcctcccccgtcggactggtcctctcatctttggaagcctccccactcggactggtcccctcatcttgggcagatttctacttcccattgttgactcgaagacctcccctgtcgggcgtgccctctgctgtaccatgaggctgagtcactctggggtcctggatccagcccaaggccagcttcctaaccccttaaccgcagttacagctctgagccctgagcccacttttgccgacactgtcaccctccacgcacactgtcttgtgcacatgagccggtgtgtggtctcacaacctagattatgaactgcgtgcagagatggggggcttaccattttcttaaactcactgcagctcaacttccagtgaaatcttggttgggaagaataatattgacgtggtttatcccttctaaaccctcgcaggcccaccctaggattcaccaggcttgacaggcatgatgcccaggccatgctgggctcctgcatagccatttttacttggcctgaggccagcaaccctaggcattcccttgccctgttgtataaagacatcatggaggatggtgcatattctattcagcgcatctctgtgaggactcctggaacatttcttttttaatttaagaatagctatgattttcaaaaaatagattgtctgtttttgtcatatagacattgtggatcctgttcctctcttccccgtggcagctagggagctcacagccccatccgtagccagctcctagtaagtaggtccgtgtcatgggttttgcatactaacctcattctaggctccaacttatttcccattcttgttttccctatgttttctttttgtcacctctttttaaatatgtgtttactttgctaacttgtatgcatctttctggaatgaagtgaggtataaatgaaaaagcaaattacttagtgctctgtatgacacttaggatgtgctgtgtagagctctcagttggagtttattgattcattcaccaactgacttcaacttggatcagtccagttattgttaccatcatcacaaagagtccagaactggatgaggcggacacaagccccaccaaccaggacctgggggctgaggttcgggaacaaagacaccaatgggcagagaaattgaggctgaggaagatacagctccaaggaacagaggcaacacagacagagggaggcactgggccaaagtctgggtgagagggccctgggcttgggtgggaggtacagcaagccgcctggccccacagcccactacatctttgtgaagctgatgttgagtgcataggggcccctggccctcgcagcgggctgatggagaaaactgagcacgggctcttctccccagatgaagacacgggtggtgctgggaagaggcaggtgggcttgagcaaaggcgtctgtggggactgcagagctcgtcagggtaagagtcccacgcattgtaagaacaggttttcatctcctggaggttgggagccgcctctctcctgtttgttttctaggcatgactcccactcacagaaggggctgtgcttggtttgtgcttctaatgtccgcgtagagctaaacctcagctaaaggccagccggagcatgaccaaggaggcttgtcctgaagagagaggggtcagaaaagcggaggtggaggacccctgcctccgtctgctgcgagtgcctagaacgaggtcctcgcgatgagctgctggttggaaactgtagcatcttgatggtcccagcactgaggatgatgtgtggacatctgtgcaaggcaccttctcacccaggcctggatccagttctgggagttctgggaagctggttgtatcactgcccatttacaggggagcaggcggcccaggaagaccccgccagtacccagtgtacacccggagtcggcatgcagcctggaccatatcacccaggcctccagctccacggctccaagccacaccctggacagccacccgtggcctagcagcacatgggacctcgcacaaaggagctggggcgcagaggccagagaagaaagaagatgcaaaagcgaccaaagactcaatgtgtttacgtgtttgttcaaaaagatgttctcccaccccccacaggggtccccccagacccggccaagagacccaacgctgagacccaatgccgagagcctcgtgtgtcctctggggtcgccctgggtgccagctccacctgattcatcctagagagagtgtggagctgaggccgcccgcagcaggattcgcccaggtcacagtcgttcacaggcggttccgggagcaggagctgcacctggatcaggggcctctttccacttcctgccccaggtctctgggcagcactgagcaggactctgctgggctcacactgcagccaccatggtctgcgggccagggctctcacaaactgtgtttgtgtctatgtgtgtctctgtttgtgtctgtgtatctgtgtgtgtctgtgtctgtgtgtatgtgtgtgtgtgtatgtctgtgtgtatgtgtgtgtctgtgtctatgtgtgtctgtatgtctgtgtgtttgtgtgtctgtgtatgtctgtatgggtgtctgtgtgcgtctgtgtctgtgtgtatgtgtgtgtgtctgtgtctatgtgtgtctctgtgtatgtatgtgtgtctgtgtctgtgtatgtctgtgcctgtgtgtgtgtttgtgtctgtgtgtgtgtctgtctgtgtatgtgtatgtctgtgtgtgtgtatccatgtgtgtgtttgtgtctgtgttctgtgtgtgtatctgtgtgtatttctatgtgtgggtgtctgtgcatctgtgtgtgcgtgtgtctgtgtatgtatctgtgtgtgttcatgtgtgtccgtgtgtatgtgtgtgtgtctgtctgtatgtgtgtctttgtatgtgtctgtgtgtgtctctgtgtgtttgtctgtgtgtgtttgtgtctgtgtctgtgtgtgttcatgtgtgcctgtgtctccgtgtgtgtctgtttgtgtcttgtgtctgtgtgtttctgtgtctgtgtctgtgtgtttgtgtctgtgtctgtgagtgtgtgtctgtgtctgcatgtgtgtctgtttgtgtctgtatctgcgtctgtttgtgcgtctgtgtgtgttcgtgtgtgtctgtgtgtttgtgtgtctgcatgtgtgtctgtgtgtttgtgtgtctctgactgtgtgtgtgcactgccctttgcactgctttgccagcacattttccctgtgccgtgtgtgtctttctcctccactcagttgtaagctccctgagggcaggggctgtgtctcactgctctgtggagtcccagatccagcactctgcacccgtgacatggtgggtggctgttaaattgagttggcaaagaggtgtcagtgtcagctgctgcaagccacagaagggcatgaactggcagcaggtgggattagttttatatcagagatggagacagggaatgggggggcaggtaccccaggaatctatatctgcatagcaaattatcccaaattggagagccctgttttgctctcagctctataatctggtcaggcatgacagggaagtcttgtttctgctccactggcatcagctggagtggtccaagggggctggagggctcgccccaaagagggcttgtctacatagctggcacattgtggtggcagttgtggagctcagccagggctgtggctgggagctctgggcctctgcatgtggagcctccacaaggctgcttgggcttcctcacagaatggcagcgagtttcccaagaacaagtgtcccaagagaggaaatgggagctgccagtctctcgagtctgagcccagaagccagaaactggcagggcgttacttctgctgcctcaaccggccaagcgggcccacagcccccgcactcaggtggggaggacagaggtctcacctcgggggcaggtgcattctgctgcctcaactggccaagcgggcccacagcccccacactcaggtggggaggacagaggtctcacctcgggggcaagtgcgtcagagaatgtgtggccctcttcagcacacccagcaatgaatctgaatgcaggcgcctcatgaccttgctgtgtctggagctggctgaacgctcttcccgaggatgtccgtctacccgagctggagggatgtattagaggatacgaaggaagatttgatgcttttttcagatctgctctgtcattgggcaaaataagctcccctatagcgctaatttttaacaaagatttctccccaaaggagagagtaggatcatgtatttggaaaagctcacataccattgaatgaaaatgaaaagaaattagcttcacgcattcataattcctacattctctgggtgcacagggcctgacaacagcagaaagcctccggtttaacgtaaagaggtgggacctgctgagaccctcacctcagaaagtgcttaattgaaaatccagtttctccacatgatgctgctaagaatatttaattagcgttatcattaagcaagggtagttgttatactgacatcatgcattctgtgactgacacacttaaaccagcagaaacctccagtcatattctatctacataaactctgctctgaagctaagcatggttccaatatgttcctgaaattaaattcactggattaaacaaatagaattaagggtgccagaatttcatctctaaattgcagagcagtgttctagaagcagaagcagcattcaccggggccggtggcagcgggaagtgaaagtgctggggaggctcggagaccaaggaagccacagagaaccccaggccggacgggctgctggggccaagcgtggatgcggtagccgaggtcggggtgtgtatcctaaagcccagtaagccatgatgcctgcaccagaggccacagccccacatgtgctttcaggccatctgccgggtcttgggaagaataaagtgtgcaaaggggcgggtggcagggaggggcccatggcagcccccagggaatccaggtgaggagcgcctgggatagtgttttagatgtgaagcctgcaggtctgggagggagctgtggtggagtgggaggcaggaacgcgctgagccacagggagctgcggaagagagttccgtgtggaggggctggtgacatgtctgctgtgctgttacaaatcctggtgaagatgtgtgggtgtgttttatgcaggaccaagggagcccgtggcgtggctaaagccaagcccaacatcttctacccaaggcctgcagaaggtctggggtgtatcagcaacccatactgtcttcagtggagttgtggtggctgaattccaaaatcctatctgtgttccatttgcctgttgacattgctgtgatgtttccataggtgcttagtcaacctgtcacacctagaagtcaatacaccttccttaactgcccccccgacaatgaggggagtcatccagggaaggggtgtggaattccagcagggcgagctggttgccggcagctcattagctgtggcctctcagattagcagtaattaaactgtgaaatcagaccagcgccttaagcctggatgccgtcgggagtggcctggggataaatcaccggcatgtgttggtccttgcttggcacgggcaaagcgtgtggggggcggaataatgaggacattcaaccgctgccctcggtggacactgggctggccgcggtggaggcgttgtcatgacgatggctgggtgcaggcaaacgctcctcccgttcgctgtggttaatgaagatgatcatgaaaaattatgccaacattacggccatatttttatgctgactggcacgtgcaacctgatgccagcgtcagcacacagcggtgacagtaattatgtgttgacaaatgaggggacaatgtgaggaaatgtctgactcagagatgtgtgtgtcgacttcgccgagtaacttcttccgagggcatgtttgttctttaaagcctccataggtgccatggcactgtgggtgccaaaacaccccaatcacttgtccttattttctaaagaaagacactacaattaaagcagaaactgctcccctaagcagaatggatgagatcgagataaatcaatgttttttatattttaaggaaatcagtgtgatttccaaatgatttttccaaatgacttttcttgtggggtgatgtgtttaggtttttttgtaactgattttgtttctgaacagaaacatctggggtggagctggggctgggctggggcgtcgcagcccccttggcctctccaggagctggggagcctcacgtcatccccatcatggctccttgaagacaagtgttgcggccgcgtgctctcatggccgggatatgggaacgggaggccagcgtggggcgtccggcccggagccacactctgtcactgtaggggggtcgcttcttggccccaaagcaaagcctgaggatgtagcgtgcggttctgcccgtgtgctgtgcttcagtgaacacactcagatcgcacagccgaacgcagatgagctgctcggaggagcagaggacgatccgttgactgtaaaacaggcttgctgggcctcactctctctgcatctcctgtgctctggatttgatattccagcaatctggggaattcatagccacaaatataggttgcagtcttgttagtgaaatctttttttattgattttgttaaacaaagatgcttaagtagttgcaatctgaagtagagtttgtctttccagtttgttcttgtttttaccgtttggaagatcaatattagtcgccacactgcagagtgtgtgactcacagtggcaattctctttttaccgctcggtgtcagcaataagcaggaatcgtgtatggaagcgtcccatgactgtgccttcatgtccttaatgtccctcaagcgggctttcttgcctcctaagtcctacctgccttttgagtttaaaaacaataacaaaacaaacaaacaaaaaatagcaaggagcacagagctggaagtttctgcttcagctggggcctggctctgctccaggtctgagcctggcaggccttgccaggaccactggttcccaccgcctccacacacacacagcgtttctaagaggagcaggagtatagacagttctcaccacactgcagaggcacagcaccaaacagaacagtgttcgcctgtgaccacggaaggcagactggcctggcagtgaaagagcggtcgccctggccagttgctgacttgcacccatgggcactcacttccccaatgcagtgtttcctgggagagcaggagcattcttactgctgtattcgtgagcattcttactgcagggtgtgactgtgaggacttcccagccatttgtacgcaaaggcaaacaccgtacaaagtgtcaggcatcattatcaaggtagaaggagagagaaagattgggttatcctaagaacacagataacatggcagtcagtctcattgtaaaaccaagatgccaggaggaacagggaaacccctccttcttgttcagaagcttccgtggtccccttaaattggtagggtccaaggataaatctggtacaaggcgttcataagccacagatggatgatggacgtggagtgctgtgtgcccagcacagcctggctacttcatgtcaacctccctgcagccagggaagctcagtaccttgcccagagctcctcatctacactgcaagtgccaggatttgaatcaagacgtgccaaggcctggcccctaccctgcagggggagctgtggcaatggcagcccctggagtgactattgtatggtgctaggtggtgccaggaggagggctggcagtgtccagagggggacaagccactcccagctgggtcatcagacaggattccacccacccggcaagagccagtgctgagagctggccaggaagacagagacataagcccagaaaagaccatttctggtgccatcaactacaagtagagggtgaaggccccaacggaggtagccaaggggacgtgtttcgagagccacctgcaaagtggccctgtgtctcacccagcctctgagatttcaatgtcctgtcctccaagaaatggtgtctcagccaaatgctatggagcattgagcaagttcttgcagttctgggtaccttagtgtctcctccataaactggggaaaagaataggacccgcagcacaggcatttgtgaggaacacccaagtcatccaaacacactctgcaagtgccagcaattctctaggatagaagctctgagaatagctttttctgattcctcccgtgtctcttcagtgaaagtgtttgtttatgggtggatcaatggatggatggaggaaggatgggtggatagatggatggaggaaagaaggatggatgcatggatggatggatggatggtttggttgacagatgagggatggtggttggatggaagaagagtggatgatggatgggtagatggatgatggatggatggatgaaggaaggatggatgggtggatggatgtaagaagaatggatgatggatgtgtgggtgaatggatggaaggatggatggatggaggaaggatggatggttggatggatggatgggtgtgtgggtggatggatggatggatggatggatggattggtggacagatgggggatggtggatggatggaagaagagtggatgatggataagtagatggatgatggatggatgaatggaagaagaatggatgatggatgggtgggcggatagatggatggatggatggaggaaggatgaatggttggttggatggatgggtggatgaaggaaggatggatggttggatggatggatgggtgtgtgggtggatgaaagaaggatggatggatgggtgaagggtggatggatggaggaagaatggatgatggatggatgggtgggtggatggatggatggatggagtaatgatggatggatggatggatgagtggatgagtggatggatggaggaagaatggatgatggatgggtgagtgaatggatggaggaaggatggatggatgagtgggagtttgggtggatgaaagaaggatggatggatgggtgaagggtgaatggatgaagaatggatgatggatgggtggatgggtatgtgggtggatgaaagaaggatggatggatgggtgaagggtggacggatggaggaagaatggatgatggatgggtaggtgggtggatggatggagcaatgatggatggatggatgagtggatgggtggatggaggaaaaatggatgatggatgatggatgggtgggtgaatggatggaggaaggatggatggatgggtgggtgtgtgggtggatgaaagaaggatggatggatgggtgaagggtggacagatggaggaagaatggatgatggatgggttgtacggatgagggatggtggatagatggaagaagagtggatgatggatgggtgaaaggatgatggatgggtggatggatgatggagggatggatgaaggaaagatggatggatggttggatgggtggatgaatggaggaagaatggatgatgaatgacaggtgggtgggtggatgaaagaaggatggatggatgggtgaaggatggatgcatggaggaatgatggatggatggttggatggataaaagaaggatggatggatggatgaaggatggatggggagtgagtggatggatgggggaaggatgggtggttggatggatggaggtatggatgcatggatgatggaggaaggatggagggatggatgagtgcatgatggatggatggatggaagaatgatggatggttggatggatgaaagtggatgggtagatggatgggtgggtgggtggatggatggatatggatggatggatatggatggatcaatggatggatggatgggtagatggatgggtggatgaaggatggaaggatggatgagtgcttgatggatggatggatgaatggcaggatggatcatttcccagctgtaggacagacaatcggctcctgtcccctgctgtatgccaggcacgcagtctctcactcttttattttttaattttttattgtggtaaaatatataacatttgtgatttttaacctttaaatgtacaatttagtggtagtatttacattcaaaatactgtgcaaccatcatcactatctgcttctaaaactctttccatctttccacactggaagtctgtccccattaaacactaactccccagcccccaggacccactgtcctacattctgtctctatggatctgatgactctaaggaccccatacgagtggaatcacacagtgtttatcatattgtgactggcttatttcacttagcataacatcttcaaggttcatccatgttgtagcctgcatccaaaatctctgccttttcagtgctgagtaatattcccatgtgtgggtggaccacatgatgtttatcttttcttccattggtggacgcttgggtggcctcacctcttggcttctgtgagcgctgctgctatgaacatgggcgtgcgaatctctctctgagtcactgcattcggtgcttttgggcatatgcccctggtggaactgctgggtcctgggctgattctgtggttagttttttgaggacccactaacagcgactgcatcatgctatattcctccctgcagagtgtgccagttacgattcctcagcattctcgccagcacgtttttgttgtgtgtgtgtgtttagttacggccatcctagagggtgcgtgcatggcctctcctagcctccacatgctccactcatgtggctgcgactaaagcttccctgtgttcacggacatcatgaagatcaaacgaacatgagagtgtttggaaaatggtcacaggttagactgaatatgaggtgttgttgcttctctgaaaacaaaaggtgggcaccgtggtgctctgggggatggggcagccacatggggcagtggccacacagcagaggcccagcagcccctaaccctgcccggtgcagcctcctcctaccactgccggggctctcctgccctcaggagactccagcaagtgactgcactgcgaagagaggaccagccaccagccctcagcatccaagggaggaattaattccgaatgaagaggaaaccaagcagtgaggcaggctaagatttccagaagaatttaatctgcagtcaggttaggggcgtggccttcccccatggccaggggggcagctgctcccaactctgaaaaggaggtggaggctcagtgtgcagctcccctggggacccagccgagaggatccccaactgtgccgtggggtttggggctaggagaagggactcgaggccacaccagcctggctcagggccaccgccaacctgtgcctcagagcgaaggccgccccatggccacagtgactggggcaggctgtcttgggcctctggagagctggagtctgtgctgtcatcaccagggctgagcttttgttggaaaagggaagggagagaaaaatgaggagggcacatcacgccagaggtcatggtgtatgtggctggaaatttgagttggactggacacctcagggcatctccctctccttcccactgtggcctgggatggactctgtgcctgtgagtgggcagccatgggctctgatggagggttaaccctgtgaccgaccatgagtgggcggccgtgggctctgatggttagctctgtgaccatgagtgggcggccgtgggctctgatggagggttagccctgtgaccgactgtgagtgggcggctgtgggctctgatggagggttagccctgtgaccgaccgtgagtgggcggctgtgggctctgatggagggttagcctccggcaccagcacctgggcctaacatgcttttcaggggcggggctggattgtggctgcagggccttggacacgcagggacacacttcccaaggggggccctgatacccctccctgcatgcggtgcctggggccaccatgctcccacctctctcctttggctctgaaaagttttttcttttttctcttttttttttattattatactttaagttttagggtacatgtgcacattgtgcaggttagttacatatgtatacatgtgccatgctggtgcgctgcacccactaactcgtcatctagcattaggtatatctcccattgctatccctcccccctccccccaccccacaacagtccccagagtgtgatattccccttcctgtgtccatgtgatctcattgttcaattcccacctatgagtgagaatatgcggtgttcggttttttgtttttgcgatagtttactgagaatgatgatttccaatttcatccatgtccctacaaaggacatgaactcatcattttttatggctgcatagtattccatggtgtatatgtgccacattttcttaatccagtctattattgttggacatttgggttggttccaaatctttgctatcgtgaataatgctgcaataaacatacgtgtgcatgtgtctttatagcagcatgatttatagtcctttgggtatatacccagtaatgggatggctgggtcaaatggtatttccagttctagatccctgaggaatcgccacactgacttccacaatggttgaactagtttgcagtcccaccaacagtgtaaaagtgttcctatttctccacaccctctccagcacctgttgtttcctgactttttaatgattgccattctaactggtgtgagatggtatctcattgtggttttgatttgcatttctctgatggccagtgatgatgagccttttttcatgtgttttttggctgcataaatgtcttcttttgagaagtgtctgttcatgttcttcgcccactttttgatggggtttttttcttgtaaatttgtttgagttcattgtagattctggatattagccctttgtcagatgagtaggttgcaaaaattttctcccattctgtaggttgcctgttcactctgatggcggtttcttttgctgtgcagaagctctttagtttaattagatcccattggtcaattttgtcttctgttgccattgcttttggcgttttagacatgaagtccttgcccatgcctatgtcctgaatggtaatgcctaggttttcttctagggtttttatggttttaggtctaatgtttaagtctttaatccatcttgaattgatttttgtataaggtgtaaggaagggatccagtttcagctttctacatatggctagccagttttcccagcaccattcattaaatagggaatcctttccccattgcttgtttttctcaggtttgtcaaagatcagatagttgtagatatgaggcattatttctgagggctctgttctgttccattgatctatatctctgttttggtaccagtaccatgctgttttggttactgtagccttgtagtatagtttgaagtcaggtagtgtgatgcctccagctttgttcttttggcttaggattgacttggcaatgtgggctcttttttgattccatatgaactttaaagtagtttttttccaattctgtgaagaaagtcattggtagcttgatggggatggcattgaatctataaattaccttgggcagtatggccattttcacgatattgattcttcctacccatgagcatggaatgttcttccatttgtttgtatcctcttttatttccttgagcagtggtttgtagttctccttgaagaggtccttcacatcccttgtaagttggattcctaggtattttattctctttgaagcaattgtgaatgggagttcactcatgatttggctctctgtttgtctgttgttggtgtataagaatgcttggccagggcaattaggcaggagaaggaaataaagggtattcaattaattaggaaaagaggaagtcaaattgtccctgtttgcagacgacatgattgtatatctagaaaaccccattgtctcagcccaaaatctccttaagctgataagcaacttcagcaaagtctcaggatacaaaatcaatatacaaaaatcacaagcattctgaaaagttttttcttattttggatgccttgttaaaaggcaagtaccccagcaggtgtcagtggagactgtgaccgctgaatagcaatggtgatggggtgaggctggatctggccagaagagggctgaggggcatggagaagactcggggagcacagggaagatgtgggaggtggggaggatgggagggaggacagggagaggacaggaaggactggctctgctcattctccttcgcacttctgtggagcagctgctctgggcccagataatgatctctcgagggcaggacttgtggttttatttgcgtcatgagcctttaggaagtttggggtcgtgcatgtagagctgaacgtggggacaccgagaacgtgcaccctgcatcccgactgctgagttcacttctctgcaaagcacaaatcgctgtcccatcctgggtcacactcctgggagccaaacctgggtgggattctgtctctaccccacatcagctgtaagatttggggcagggcgcagaaccccctgagcacgtgggaaactgatcaccacgtgggggatgtttgttagagagattcagtgggtgatgtgggggcagaaggaggcccctagagcagagtatggcatctgttctgaatgccgatatggcgttggggggacagcaccctggcggcctgcagcaccctctgtgaacagggaaggctggaaggaaggggtgggtccccctgacaggtaggggctgctggatggtcccactttgcccgcccggtctcttcctacactatggttctcactgatgttccctgggcagacaactcaggatgagcctctgtgagtgctggacttgtgttccatccagctcctccccaagagaggggcaggggctggtgccccaaagcaccagcaccccacatggactggcacattttgaaagatataacacaaagaacttccattataatcgctgcccaggcgaccattctcaacgcgtacattatttgttaaagtaatttttaaagcctcaaagtcatgagtccagaacttgcagatctgaacaccaacatcattgaccaataacagcaaccgctgaagataaaaagccaggccgccccggacagtgagccccacatgtctgagtcacacgtgtccgtcttccatttgaaggaggcctttgaaaagacagcagttcattctttaaagtctggctttaaattcaactttaatgaagcggccctgatgggcttacaaggagctgacactggacacgccaggctcctgggccaagcggctgacactagcagacctctgtccacctcgggttctcccacctgccggagttcccgcaggagccagtccatccaggaagcagggcctcccagctcctcaggaacatcgctccccgatgctgcctaaacaggtgcatctcagcccagcaggctcccttggcgcatggtggacacggtgctgcattgacaggatttgggcagaggagacgtaacttagctcggacctaagtaacaatgccgaccgcctgcgcccacggcgcccaggcaccgatgctcccaggagagggaaggggggagcggcagatccagggactcgaaccccaggcaggtctgaagggcttcacaggacatgatttttcagacccaagagaaacgaggaataatagagtcacttgcctttttcttgaaacgtcggaattatttgatgtgacttgtgtaacttggaaagtatgacataaacctaggtatgaaagttaaggagcgatgtcactcctccagttgagcaatggcctgacgtggctggaggggcgtaccgtggcagggaaaccaggagcacgctgtttgttagccacagagcagccacgcaggcagggctccatccgggaggcagagccactaggagtcccgtgaaatcagggattttctgagcagggccttctgctgtgcagcaagggttggggggtagcgtggggagctggggaagggaccactgcctccacgtctctgagccagtagggtggatgggcgggggtcaggagggacctggacacaaagcaaggacaccgcgggatgcaggagacatgccagtcccgtcctccagggacccctgcgtccgcccacccgggccaagagaggatgccccgcgcacgcagccttcccagcacagcagctgccacctgcctcggctccctttagcctcccaaaccttgtgcaaagtccaccttggccagctggacccagagctgcacgggggccacggtctggggcccgcgtcccagcccggctgagctgaccagctgtgtggcctcgtgccacctacctcgcctctgagccggtcttgccctttggggacatggaggttaccctgactgctgtgcaacttcactgaaggagccgcctgagcggagcatgacccaggagcgtgcaggccacggggaatggcgcctggacaggcctggactgtgggcaacaccacgctcgtcatcatccatatttggatgtggtcggcattagtacctgtccagtcaattacgacaccggcccttttcttccccgcaaccggcccactgcagccacgccgggagctacggggagcacatcccatcccgcgaccgcatctcccgctccgtcaatcccgcgcgtcccctgcgccgtcagtcccgagaccgcgtcccccgcaccggcaaggctgtccctcccgcaaacccctggcttcaccacgtttgccctggggctgccccgtggatgatccaccacgtggtgctgccttttcagtgcaccagagagctgcttcagggccctgcgggagatccagcactgccttcttgtgcgcggtgtctcgggcgtcaggggcggagcctggttcattcgcggggccccaggttaagttcagcagctggggctcttttcaaaggtctctgaaatcacctgtttgtagagcaagtgggctttgagcaattatttcccttgttcttcaaaagctgttttgcaaggctaggtttttaaattgcaataataatttatttagggggtgggggaggtttaaaaaaaaaaacttgtatcttgtgagccacagagcataccagtcgaacaacaggtgaaagacgcacggcttcgagatagaaaagatcctcatagcccgctaactgccaagtgcttgcatcttaacacctcccgccttccccgactggaagaccttcctctgcccgtatccaaagttccctggggtcctgcccagttgccccggccctgcccgcgcctgccggggtcctccttgtccccaccggccgccgagagctccagcactcctgcctcagtcggagggtgagctgggcctgcggcgtggagcatgtctctctgctctcccgctctgccttccaggcctggcttctgtgtcgctgccataggaggcggctcagtgctcctcctccgtgggccacttctgctgtgggttcctcgacggtctctgcctgcacggtgcagactcagccttcacccatggccaattctgctgtgggttcctcgacggtctctgcctgcacggtgcagcctcagctgcaaggctaggtttttctatgtcgtaacaataatgatctctttagggggtgggggaggttttaaaaaaaaacttttatcttgtgagccgcatagcataccatagtccatccactgcccgtttgcttttctggcaggggtccaccccacacggcggctcctggccccacatccctgacttcggcccgtccctcacgcgtggccctgcatgttccaggctccgtccatgtttcgcagaaagactttttcttcttcatgtgcttaagtgaccagcgctcccatccgcacaaccctggctgaggaataatgacatggaaagcgacgtcctctttcccctgagcagtttctcgtctatcaggaacagggtttttttttttttttcctcccttctcctgacatagtcacccataaatggtttggccttaattcctatgaaggtaaggacactgctgatgttccttgagtccccacgctagcagcttctcatgcctttccctgctaagctccgtgctgtattgcttccattgcgcagtgagagcagcgcaggcgcagatactgctactccacaaaacaggaggctgagctttagaaggttaaaggctgggcgcagtggctcacacctgtaatcccagcactttgggaggctgaggtgggcagctgagaccaacctggccaacatggtgcaacccgtctctattaaaaatacaaaaattagctgggcgtggtgacggacacctgtaatcccaggtacttcgggaggctgaggcaggagaatcacttcaacctgagaggcagaggctgcagtgagccgagatcgcgccactgcactccagcctgggcgacagatcctgtctcaaaaaaaaaaaaaattaattaaaagattaaaaaatttgccctggtttacccagataataaattacagagccgagatcctaacctagaacttcattattcactcattcatggaaactcttttggaagtgccactcttccagataattccacttaaaaacacatacacgtaattctttgattgtaaagaagtctggtctttctggcatttcctactgtttttcacaagtatatttttggttaaaactatttttgtgcagtggtacaaatcctacccataaaatgtcagggtagtcagatgccaagtaaaccactgcagcatttacctacacaatgccagccccgcccagccctggctgggaacctgggtgctggacgctgccgtgggaagggcctgtgaccaatgggaaatgctcgcattcttctttttttcaaatttattttagaatcgggggtacgtgtgcaggtttgcttcctgggtgtattgcatgatgctgaggtttggagtaagaatggatccgtctccaggcagtgagcatagtagccaaggggtggttttttttcactccttccctctccccttcctaccccctccctctgggggtccccagtgtctgtcattcccatctttgtgtccatgggtacccagtgcttacctcccactcataagtgagaacatgtggcatttggttttctgtttctgcattagcttgcttaggatcatggcctccagctgcacccatgttgctgcaaaagacatgatttcattctttttatggttgcatagtattccacggtgtatatggaccacattttcttataatcaaatgaggatgactcaacttctcaaacccccccgtgaagacacagctgtaaacatgaacctgccctagaagttcgatgaacttctcaagaaaggctgaaatactcccattcgtacccaggactaaattgtaatttttaaaataacaaacatcatcagaagctactgtttggaattacagattttctcaacatttggcacagtactgggtttctgggtagtttttgtctttgacagcttgaatagtctaaacatctcaatatttacatatttacatctttcataaagatttttaagagtaaaattataatattgtctgggtgtggtggctcacgcctgtaatcccagcgctttgggaggccaaggcaggcagattgctgagcccaggagtttgagaccagcctgggcaacatggagaaaccctgtctctacaaaaattataaaaattagccgggcgtggcagcgcacacccatagtcccagctcctcaggaggctgaggtgggaggatggcttgagcccagggaaggtgaggcttcagtgatcccagactgcaccactgcactccagcctgggcgacagagtgagactctgtctcaaacaacaacaacaaaagcattataatctaagttcttcctccccttgaagcacaccccgctgcagagtgttcatgaagcaccttcctttctctgcagctccagtgtttacgccaccttttacctgaaatgaccaacttgacgtggcatcccaataactacaaagaaaactaactacaaagaaaacacgcatgccaagtagggctgggggcaccccgtgaacttcagtaaaacacaaagatcccttgagaagggcccccccagactgggcacctttccagccggagcctcggcctcctccaaaggtggtgatgaagccaccctggcagagttgcagagggagtcccgtgagtgcagtgggtgcagagaatggaaggccactgtcactgtcacctctgacacagccaaggggggacaggggctggtctaggttgatgtctgcccacggtcccacaccgcctcctcccggttttctttctagaactcagtgcttggaccaccctgtttggtggaagccgagtgtcggggcatgtccgcctgcccccagctcagagcactgccactgctttgctagacaggcccatgctggagaagcaccaggtaacgtggctcagtgtcctgacggctcgtgagtccacaggagcagcagcacaggccacattccccacacggactcagcctccaggcctgagtttgcttctcccaggactcaggccccacaggcttcctcgggaagggcccgcaccaggccctgctcttcctgagcccacagtggacgattgttttcacaccccaactcctcggagttgcagctccttcctgggttgccacagatcccagccacaacgcctggtcctcccagcctctcaccagcacccacttcagataggggagcggggaaccagagaccaaggcctcccaaggatggggtcagctggtgccaggatgaggagggagcaagatgctgggcctggtggcaggtgtgggcgtgatgcctggacagcagccatggccgcggatgggggtgctgtgctaggtggctttggttcttgcctggcaaggaaccggtgggggatggggaggtgggcagggcacggttgcagatgccaggagagcagggacctgcagccatgcacgcatgccacgatctgggaagcgttagggcaggtgtggggcctggcacatggtagagaacggaggggaggcgttaaggcaggtgtggggcctggcacatggtagagaacggaggggaggcgttaaggcaggtgtggggcctggcacgtggtagagaacggagcttcgactagaaacatggacattttcagaggtgggggtgttggaggaagggtcactgccatgctgtgagctgcggcccagacggaggccactagggctggagtgaggcccagacgggaggagaagcagtggtggctggtgcctgtgctggtcactttgtaatgggctttgtgtctggggctgtgttctgatagcacaggaggctggcaggaagggaaaagcttgcaccaaactgcacttcctattgtaagttctcaactttcccgatgaagggtctgtgggaaccacaccccacagcacagttcctctgtggggtccagtgggcatcggccagggaacagcaccgtctcctcccacagcacagcagacatgcctggcacatggcactgcccgggggacagaagcccactgcgcggggtgtgggttccgacgtcagcagagggaggcgtttaggatttgagcagagacataagtgtcagtagcttcactgtccttgccccctgcacgcaggcctggagagggtgcctgtgccgacaccccgcctttcctcccagttagttcctgccccttggagaacagccacaccacagaaatccatctcctgaccgtctgttatcagcactgccggccatggcaaaaccatctggtcactgactgtctgggcttccagcaggagtgggtgctgccagatgtttgtcataagccctgaacccttctgaaaggcggcgtggctgctgcgagggtctgtcccacggctgttccttgtcttggcggccctcgccatccctgagatggagctggccatctctaatcacagatttccagagtcagtggtttgctgcctttgatgggtgtcctctgttctaaaagatgaaaatatggatgctggactccaggtaggagaggaagctgcaatcagggcaggaagacggaaacagagagggtggcctctgtacctggaggtgggctgtaggttaggtgggagcttgtggctggggagaggatcagatttgataagacgaggatgggctttcgggtgaagaagccagctggaaacagggaagcagaagagagagtgcgcgttgaccctgaggccagcacaaaagggcgacagccacaccgcgcaccagtcgcccagctcgaccccaggggagctctggcctgggctgcccaggaagggagactggacgagggcacgtgctcgcccagagcacagctgcagacccatcctgaagcctgccccctctggggctctcagaggatgggaagctgtggctgtgccttccctgggatgcaaagtcaggtcatgttcggacaagtcaccatgttgttgaggcagcacttacgacgttccccgctacatccgtgatggccgacctgtcttagccgccctggccactcggtgcccccaccctggagaaaacccagccgagccaggccagagctgcagacacagcaggcaggtgggctctgaagagcccctcgtgagtgcgtgtggaggagcctggggtttggggtgcaggagctcgtggatcctgcttgggagcttgcagcctgaagaccagagcttttctgagcatatctaccctcaggggtcaagaaatcggaatgggagtctcgcaaggccgggctgtccagggcaactgcaagtcccacttggctgcaaagtcccatgtctatggaagcatctgcccatagcgaaaagcggagatgtgttcacggtggtctctgtccttccccctttccatccctccctccctccctcctctctctttagaaggcctgtgttagatgtgtttcctcatcccgtaggaatggtcccctcggtcttggtgaacatgaaacaaagggtgcgggcagttgggattctgtgcgcgcggctccatcagccttgattaagttctccaagtgatgtcgggctttccaccgcgtgtcagcggtgcagagtaacctcaattaaacagtcatttgagggagagagaagggaaaacgccttccaaacaatgatctcgtgtgtcttagcaacagccaagcttcaccttctcaaagaccctcccacgccgaggacagagacacctcccgagcgagcgcactccgtgggcgctggagagcaggcactcagccactcctgcgagctgccggctttccctgcacacgctcagcctcttgatgcctgggtgctaaattacatctgacatttaatttaaatgcatggtgccttcattcaaaaataaacccgctgccacagccagggcgttcgccgcatggatttttttctttccacctgctctccctcgctgaccccatcctcactttgtccagtgcgcgcaaactggaattgagcctgtctctctcctcgggatattgccttgtgccccccatccacgagcttcccttcacatgtcagcatgtctccagttgcaatttataaccgagaaagaaatcaatcccttggtcctgcggctgcaggtccccccagcctactactgggcgtcgggagcctcctcggccccacagctcacagcagctccccgccaggatctgggaggttttcccagagttgggcaggacgctcactggtgaggaggctctttagagcccacggtcgagtagccctttctagagaagctaaagatgcggccagaaggttccacggcctaccagcgagccctggctcgtccaggaagatcggccgatggtgccgagctggcccaccccagaatgcagctgcaccctgctccaatgccacggtgtctctgggaggcaaaccctgaggaagccatctcaggcgggctttacacccttccttccagctgtttccgaacccactgaggagctgaacgctgcggtacatttaagaatttctctctcaacagctcactgggtactcgacactggagccggagggagaggacaactgaaagcctcaggagtttgacattttgaacttttgccaaaacctatttccaaaataaactggagacactccaagaaatgccagatacaactgccatcctcgggccagccttcctagcttgcaagaactgttcactcagatattggcagggggtccctggggctgggtctccagcagctccatgttacctgccacttcctgcctctcataggtgcggaggaagcagctcacctgggtggcatcttgctgcttccccaaggagctggcagcaggctgggacattcctgtgcagtagtagcagctcatcctctacgcctcactccctacatccggccagcctcattgccgtgggggaagccaagacccagagatttgattgttttgatcgtttggccaaaaccacacaacaagaaacaagagaaagaacattggtagggctgcttccaaaactcatccttttttctctaaatcgagcattctctaaaagatgatataataaaaattatgaacaacaagcaaccaaccagtaaaatacacattacgaagaaggatcaggaccacgtgctatgttgcaggcctgagtatgcatgccaagcagaagggccacaagcaaaagagccctcagaatcccctggggagcccacagcacagagaagcaggcctcagagtcacccgaacagtctacagctcagggacacaggcctcagaatcacgtgaacagcccacagctcggggacacaggcctcagaatcacccggacaccccacagctcagagatgcaggcctcagaatcacccagacaccccacagcgcagggacacaggcctcagaatcacctcaacagcccacagctcagggacgcaggcctcaaaatcacccaggcaccccacagctgagggacgcaggcctcagaatcacccacacaccccgcagctcagggacgcaggcctcagaatcacccgggcagctcacagctcagggacacaggcctcagaatcaccctgacaccccgcagctcagggacgcaggcctcagaatcacccggacaccccacagctcagagacacaggccgcagaatcactcagacaccccacagctcacagccgcaggcttcagaatcacccagacaccccgcagctcagggacacaggcctcagaatcacctcaacagcccgcagctcagggacgcaggcctcagaatcacccagacaacccacagctcagggacacaggccacagaatcacctcaacagcctgtagctcagggacgcaggcctcagaatcacccggacaccccacagctcagggacacaggccacagaatcacctcaacagcctgtagctcagggacgcaggcctcagaatcacccagacaccccgcacctcagggacgcaggcctcagaatcacccgggcagttcacagctcagggacgcacgcctcagaatcacctcaacagcccacagctcagggacgcaggcctcagaatcacccggacagcccagagctcagggacacaggcctcagaatcacctcaacagcccacagctcagggacgcaggcctcagaatcacctcaacagcccacagctcagggacgcaggcctcagaatcacccggacagcccacagctcagggacgcaggcctcagaatcacctcaacagcccacagctcagggacgcaggcctcagaatcacccggacagcccagagctcagggacacaggcctcagaatcacctcaacagcccacagctcagggacgcaggcctcagaatcacctcaacagcccacagctcagggacgcaggcctcagaatcacccggacagcccacagctcagggacacaggcctcagaatcacctcaacagcccacagctcagggacgcaggcctcagaatcacctcaacagcccacagctcagggacgcaggcctcagaatcacccggacagcccacagctcagggacgcaggcctcagaatcacctcaacagcccacagctcatagacgcaggcctcacaatcacctgaacagcccacagctcagggacgcaggcatcagaatcacgtcaacagcccacagctcagggacgcagacctcagaatcacccagacaccccagagctcagggacgcaggcctcagaatcacccggacaccccacagctcagagacgcagacctaagaatcacccagacactccgcagctcagggacgcaggcctcagaatcacccagacaccccacagctcagggacacaggcctcagaattaccgagaaaccccgcagctcagggacgcaggcctcaaaatcacccaggcagctcacagctcagggacgcaggcctcagaattgcccggacacccctctgctcagagatgcaggcctcagaatcccccagacaccccacagctcagggacgcaggcctcagaatcacccgggcagctcctacctcagggacgcaggcctcagaattacctcaacagctcacagctcagggacgcaggcctcagaatctcccagacaccctacagctcagagacgcaggggtcagaatcacccagacaccagacagctcagggacgcaggcctcagaatcacctcaacagcccacagctgagagacgcaggcctcagaatcacccggacagcccagagctcagggacgcaggcctcagaatcacccggacaccccacagctcagagacgcaggcctcagaatcacctcaacagcctgcagctcagggacacaggcctcacaatcgcccggacaccccacacctcagggacgcaggcctcagaatcacccggacaccccacagctcagggacgcaggcctcagaatcacccggacagcccaaagctcagggacgcaggcctcagaatcacctcaacagcccacagctcagggacgcaggcctcagaatcacccggacagcccagagctcagagatgcaggcctcagaatcacctcaacagcccacagctgagagacgcaggcctcagaatcacctcaacagcccacagctcagggacgcaggcctcagaatcacccgcacaccccacagctcagagacgcaggcctcagaatcacccggacaccccacagctcagagacgcaggcctcagaatcacctcaacagcccacagctcagggacgcaggcctcagaatcacccgcacaccccacagctcagggacgcaggcctcagaatcacgcggacaccccacagctcagggacgcaggcctcagaatcacccggacagcccaaagctcagggacgcaggcctcagaatcacctcaacagcccacagctcagggacgcaggcctcagaatcacccggacaccccacagctcagggacgcaggcctcagaatcacccggacaccccacagctcagagacgcaggcctcagaatcacccggacaccccacagctcagagacgcaggcctcagaatcacctcaacagcccacagctcagggacgcaggcctcagaatcacccgcacaccccacagctcagggacgcaggcctcagaatcacctcaacagcccacagctcagggacacaggcctcagaatcgcctcaacagcccacagctcagagatgcaggcctcagaatcacccggacaccccacagctcagggacgcaggcctcagaatcacctcaacagcccacagctcagggacacaggcctcagaatcgcctcaacagcccacagctgagagacgcaggcctcagaatcacccggacagcccagagctcagggacgcaggcctcagaatcacctcaacagcccacagctcagggacacaggcctcagaatcacctcaactgcccgcagctcagggatgcaggcctcaacacatgcggattcccacactgcctcaccatccccctcaactgctcagcagaccaggcagctgaacggaagagatctgcctttaatgggcatcttctgctctagaaactgctgaggactgtgggtgcagggcagtcccgtgatctccatactcagggccccgtgaagactgtggggtgtatagaggcccgtgatctctatgctgttggcaccgtgaggactgtggggtgtatggaggcccgtgatctccacgcccttggccccgtgaggactgtggggtgtagggagtcccgtgatcacactcagggccccgtgtggactgtggggtgcagggagtcccgtgatctccttgctcagggccccgtgagtactgtagggtgtagggagtcccgtgatctccacactcagggctccgtgtggactgtggggtgcggggagtcccgtgatctccttgctcagggccccgtgaggactgtgggttgtagggaatcccatgatctccttgctcagggccccgtgaggactgtagggtctaggggaggcccatgatctccatgctcttggccccatgtggactgtggagtgtagggaggcccatgatctccatgctcagggtcccatgaggactgtggggtctaggggaggcccgtgatcttcatgctcagggtcccatgaggactgtggggtgtagggaggcccatgatctccatgctcttggccctgtgaggactgtggggtgtagggaggactgtggggtgtagggagtcctgtgatctccacactcagggccctgtgaggactgtggggtgcagggagtcctgtgatctccacactcagggccctgtgaggactgtggggtgcaggggaggcctgtgatctccacactcaaggccctgtatggactatggtgtgtagggagtcctgtgatctccatgtttgtggcgtgcgtgctgagtgcatcctgcagccagagaaggagctttgtgatggtcaaatcagggcgtgcgtcaaacatgttaggtttcatttaccgactgcctggaaatgggtaggaaccagatcgttgggtggtctttgctgctgtatcagcttcctcttgggtgagcgttttgctttatccacacggttctggagcctacaaaagatgctgacatttgagagcaaagcagcggcctccagcctgccctgcagatgctggcaccctcactcagcctctgcccagtgtcccagacgttttggggagataaatatcaggactgaggtgcaaatggaggggagaagagaggtgagcattgtcggaggagcccagcattgtgcagcctgccctctcccccagcctgcctccctgagcctgccctgtccctgagcctgcctcccacagcctgtcctctcccccaacctgcctcccgcagcctgtcctctcccccatgcctgcctcccgcagaccacccccggctctcagccttgcgttcgtctggagcaatgtttacagtgagagggtggacgagtccgtgcagaagcttctcatccagcagatcactggctggatctgtgatgacctgggctgagacatacacagaaggacctgggcagggccccaggagctctagggtctgcccaggggccaccgttgctgactgtacgagctccacctctttcatcctcatttcttcccctgagaaatgctggggtggccactcctggagctgtctcggtctataaatcttagctccgtgcaaggggagcatcgtgacccaacccagatgcggtggcatagggactcagaggcgcctctcagacacccgtagtcctcgtaaggaaggtgccgcctggaaggggacccacatttcatggaggcagaagtgaggggtggtggggagtgaggtgacacgcctcagggcccctcagagatgccgggggactggggtgcggctgaagtgaacacccaggggctgagggaagccccgagtcgtttggtaagaggcctttgaacccattctgttgctttttcatcagcctggatgtgcctgagtgatgaggacagtggggatctgtggcttcccctccacctcactcagtgtccaccaggcagacagacctgtccttgggggcccttccacatcctccgtcttctgcacacgttctgatggtactgaagtgcctcacacatttaaacatgaaaacagcagactcttactactttctaaaattcaaaagcagacccaatctcatatcttaaattgaggttctagatggctactatattatacctctatttgtgttttaaaccaagaattattttaaattttttaatattaaaatggaattctgagcatgctcaccagagccatttattcttcccagagcagattccatcgttgtgtaatggacggcacatcacggcccgatgctgggatgggaggcttgggtctgttgaacgggcgccaggtcgggtccccagttcctatcaccttaggtgacgttccagcctcttccacttgtttgagtttcaggctccttgaatctccttcgatgtctgggagagctgctgtgttcaccccgttgaggccagctgacccccagcccaccccagcatcacggcttctgtgccctccatgcctggaccacctcgcgcccgcttgtttacgctctgattcctccatggtcttgctgtacccagtaacctagcacgtagtagcacctcaggaaacatgtgttgaattaggacttcccataaaaacagaaagcatgaaggggatccagatggtgtcaagcattagctcttctaagctgcgtcagagtcgtgccccggagcacgtctcctgcagcagcatcgccccgtcacggcaccgcctcacagctcccaccacgacacatgcaacgtgcaaagaggacacagggagctgcgacttccgtggctggtggcaaagaaatggggcagcactttcacagccatgccaggaacctaattcagccaacctggaaataactatcccagccacggccttgccagaagcccagctcagccaacctggagattgttatcccagccacagccttgccgagagcccaactcagccaacccagagatagctatcccagccacggacttgccagaagcccagctcagccaacctggagatcgttaccccagccatggccttgccaggaacctaactcagccaacccggagatagctatcccagccatggcttgccaggagcccaactcagccaacctggagatagctatcccagccatggcttgccaggagcccaactcagccaacctggaaattgttatcccagccacaagtgtgggtcccacttaaatggaggaaggatgagtcacaaaagcagggtaatgtggcctatcccgtgcctgtatcgctggcaggtgggaagcctaattcttaggccctaagcatagcccgccgcaccgattgcaggctggtcccaccgtgagcagacagcactcctggctccactccacagcttagccaggaggattcaggcaggtccaagcccattaccagacctcgctgtggaaggcggctgacattcgaacccactggatgggcatctaagtctctgacctttgctgatggtcggttcccagagctgcctcccctgccctcaccccaagagacctcctgacctgtgagtatctctagaactctccagaagtcagatgcagggagctgcccaggctcagtgagtggtccgttcattacaaggttctctccaccacagataacacaagcacagcctggctcagtgagtggtccattcattacaaggttctcttcaccacagataacacaagcacagccttagcacagagcattgggttggatcatgcatcacgttcatgcaataccgaagcattttcaagacagattaaactgagtagtgggatggtcctcttccttggctacttatgagtatttaatatcaatactttggaattacaagcaaaaggtattaggaagaagaaactaagctccaagttggtatcatctcactgagactgtgtctttctgcccaatgtgtcaagctcatgaataaaagatcaagaggacagttaaggggttatgtgaggagttcaaagctcaaacaaagaacagcaacagacagcagacacacatcttgagatggagttggtgctgctcaggcgaacagtcccccaccctagattctgggtgtgcttggagcttctcaccctcgtggggtacacgcatctgcagatggcttcacctccaaaatgctgccctgccatccacattcatcgtttactccagcaatcagcaaacctagatacccacttctggaaaaaaaaaaaaaaacagaagtcagctcatcaagtagtctctctgtacctctaaaactgttcaatgaataaataccctcacaatctcaaaggaatattttctgtcctacttgtatccaagtaactgaatttacttccttcttccttttcaaaaatctctggagactgccccgtctaaatacagttaagtagctggttaccccagtcacctgtttaaaaacatctggagactgcccatctaaatacaggtaaataacgcgttaccccagtcacctgttctccatctacatatgcaaaagccctcgataactttggcccttttgatgctcaaatcagtgaccacattcacatgagttacaggtgattggaaaaagcctagttgtaagcattgagcacactcagtcaccgtagagagatacatctagaagggaatcgtgctggattatttaggtgtttgtcaacacagggccagaccatccacacagaaagagcgctggtcagattgttggtccctgccacacccgactgcacacattcatttattggttcgtcgttgacacaacttctgcaatctgatggagaatgcaaagatgaaccagacatagagctggccctcaaggaccccaagtctaagaggaaagatgagcagagaagtaactgagctaggagttaaaaatgccggggacatgaagagcaaagctgagagaggacagaagcccaggagatgccaggtgcagtgtccacaacatccttcttcccaagggccacagagactatggtttggccaaacagttgtccccttcttccctcatagcttagaggactccacgtacaaccagtaaaactgacctcccagagggaggagagccactgaatcgtgcatgggtcatgtggacgggtcttgcttcttcctgcaaatgtccagagagaggtgaggaagagagcgtctccggggagggttccaggagggactgattcttgaagtggttttgatggaggagaagcatcctagacaagatgaacagcgttagcaaacacacggggaagggatgatggggctctaggtgccgaagagccttcagtgggggactaagagcaggccgggcacccatgggagggaggtccacaggcaatgccttccttcaccaattctcagtcttgggcttgttggccggaaacagccagcagtagtaagacacacctttcattttacttactaaagatatgttgcaatcagtagtcattatcaattgataattgattggcaagtcattttaaaaagtgaggaaatcaagtcccaggaaaggtgctggagccaggctcttttccatagggctggtggacagggcctttgccgtcatggagcctgtggaaggaggcgtggggtggctccgactgtgagttagaagcacctttggcctccaaatcacatgagcatcatctccccccttcccttgttgctcgtttcagtagcatctgaaatggagagtttatttgattattttttcctctctgacaaagtaaatagggttttaacctgtggtacagagggaacaaagtggcccatgggttttccaataatattttggcccttgctcaggctaatgggaactttcaaaaaggcggggagagagagcggctctaattataatctgaagaacgaatctgcttacaaatccatcagaacttgattcctgggatcccgtgggccaggggcactgaggtgattccgaggcttgctggaaagaagccagtgcccatcgggatgggattctccaccctctcattagctcgtggattgtttaaaagaaaaagcattgattaggagcctctgagaagctcccgccactccttggagccctctctggggaaagacgacaatatttcagttgctctgtgtgtttcccctgccctgggcactacccacccccaacccaggtgatggccatggcagcatgaagtcaccccgtggacagagggagacagggttccggagctggtcaggctcccgcgttgccgtggacggagggagacggggttccggagctggtgaggctccccctgccttgccgtggatggagggagacgatgttccggagctggtcaggctcccgcgttgccgtggacggagggagacgatgttccggagctgaagccgaagcaatttgaccttgctggttctctggtggcttttctgagtctgggtcattgataggttagtgttctgtgccctacaggaacctgatccaccaaggaaagtgttaaatttaacaatgtatacataataacaaatctgcatctgggcaatggcattaaggtagctcaccatatacaaagcaaagtgggtgtatgtgtacaacacggttaaataaagtgataaaaggcatatggaggaaggggtcctgctggccgaatcagcaataaaaaagcacaatataatgtacagttaaacccatgtagatataaaaaaattaatgaaaagatccagctgtgctaaaagtggaaactccatacagtcccagtgattccgctctccctgaaccctggctggctctggcttctggaagaggaagaggtcagaggaaagctgctctgtcttgctggggagccatgcgtgagcacgcagagggggtggaatgagcggcccaggagctcaggcctccttgcggtcaccttgggaggtgtcctgttctctgccgtcagaaccaaagcacatccatcttggagtgtcccaaaaacacagtatggtgaccccagggctgatctgtgtgcaagatgactgaaattagcatctgccataatttggtatttgattccataacaaccttgtctggtcacacctggggagaaagagctctccaagagtcccagatggcagttggcattgagttgacctcggggcagctgaaggcacaggtgtcactctgcctgtatggtgaccgtcagaactcaggacggctcttctcacaacactccaagatactaccctcaatttcttgctggcactttaacattttttacaggagaccatcttttcctcccctcatagacgaataagctacaacgaaggtgcccctgggccgcaaacccatctccaaaggctgcgagactctggaggcagatgccggggtgagagagtagtcaggaagaagaggcattttaccagtttccctcggctgtcccagccaacatcacatctgctgctgcttatatttgtgtccagctgctgttatgtgggtaattcaggggcaattcagaggcatgaagtttcagacgagactgagagccatggagtttgctttaatctccggaacatggaggattaaccgtgtgaccttgggtgagtcccccccggctgtggctcttcatgtctgcagtgggttttagagaaaggcctgtctccctatgtcacagagatttgggaacaagaaatgaaaactgatgcagaaaccactcaaagctccttggaataaagatactatctgaattgcaggagcctatgaagaaaacccctaatgcgaagttaaatcttaaaatcaaatccttccaggtgctctgtctcctgggctgcacccctctctcctgactcttttccatcttcctccaaaccaaagtcgctggggatgtgtgggtggctggtgggacagccctaatttgacctgtgagcatcctaaggacatgatgcccctaccccttcatggaactagaaataatacatacaaaaccctaaaacacgtgtccagaaacagcacggagctctgaaataatacatacaaaaccctaaaacaagcacgtatccagaaacaacagcacagagctctgatttctcctgtgatgagccgtgatgacgacttcaatgcctaaaatgtcaaatatcgagtgattttattcaaaatgaaaaaacatggattttgtcctaagcgtcagctcagtctgcatgtgagtgaccagccgctggctgcaccacaaacaacccgggaccagcaccggcagcctgcgtccctcccacccacctctcggataaggctcccatcagagaggagcctccagaggctgagaaacttcacaggatgccaaatgcttccatgagtccctggtcttgaccctgccctcctcccttcgctcctctgctgatgaacttcacgccagtatcaggctctcaatcccgctccccagcacctccctcccctctggggcgcctccttcccggtggtgggagagatgtcgaattcagacgccaggaatgttgaaatgtcagccttcccagagcacacagatacgtccccctgggtcacgtggagcttattgtgtacggccacattcctgttgattctcagctgcctgtgagatccttattctaatagatgtttcaaaagaagtataataccgagaggccttaatagtgtttaaaagtgaaactttcatgacaagatataatttcaaaataacagctctccacaggaacagtgaggccctttggggcaccaggagatggatgagaagagaggaggggtgagtggcagagccctctcttctgacccaggcattcccgggagcctctgtccctgctgctgcaggtctggccaaggcagcaagagcccctcggagcctcctcccccgcccagacaccaggtcctccccgcatcgggggtggtatttgcagattaacgcacagcatcctaattcctagtcaggctcttccagaccttctaagccggccttgtggccttggtggctggcgccccagccggcacccacgatgctgtaaatgctcccgaggaccagggcccttcctctgtggaggggctgccacgcccaggccccattctggggaaagcaaacccctccctgtaggggaacactctggagctcaactcaggaccgtgagtacgaatgggagcgcctgggcccagagaagccaggccaggggatgggaacttgctgctgcgtcctcgcctcaggggataaccagggaagctcagccctcctgcctgcgccccctgcccgggcacaacgcttagcttccactggaggtgaggctgcccggccagagagcaccatgctcctgcatgtagggctcactcacagcacacgtgccctccaagcccagcgcactcagactcccagatcaggttgaggtcgtgctgaggctcagcgaacagagcctccaaaccacggacacaggaacactgctgggggccgcgtccacacaggccccagtctggggcgagcttgggcttctcagccctcagacaggagagtgagctcgccaggccgtctggtgaaggaagacgcatgaagataaaatcggggagcaacgtggcgtgtgtaccgaagcttcatgaaatacatgtcaaattaactttttaaatgaatgtgtgaaataaatacagctgcaaccaggacgtagttcacttctgtttatccaagacgcctggtgtgatttcttgctggggtttcttcttactgagaagatgcattgcccccgggagactcgggaagcctctgcaaagggcacctgaagcaggagcacatttactctaccctttaaaaatgtcatccccatcccaccaggacggagaggagcttttcatttgtagagggaaactgttaccccttggctccaaaaccaatatgtgtccagccgggcactggtgggattgtacctcctctgattttttcactcaacatggagggacctgcatgtaagatgtaggtgagcgccgtccacgaaagagcaggagacacgagactccgtggccaggggcggacaccaagcctcccacactaagacaagcactggccatgctccccaagccgtctgcgtgcatctgtgtgtaagtcatcacgggtggccgtgcccaggaccacagactgggtgcattaaactgcaggacacgtctgttctcacagctctgacagtcccagaccaagctgtggggggcggcgggggtgggggcggttcttcctgtgacctctctcccgggcttgtggacagcatcttctccccatgtcctcacacggcctttccctggtgcaggcacggggtgtctctcactcttcttgtaaggacaccagtcctgtaggatcggggccgcccttttggcctcattgaaccttaattagctccttggaggtcctgtctccaaatataggcacatggggatcagagcttcaatggatggatttggggggtcacaattcagcctataacaacctctaaaactgcaaggccagagttaaaccctgaatctcgcccagatttaagcctggaacacagaggccttctggctaagagcagcctcctttgaatggtggtgggaaagggaaggttctcgggctggtgtgatcgggtgatgtatccccagccagagatgcttggggctaccagtggtgaagctagggcagcgggtgccggcctcgcccaggcaggaccaggacacatgctctgctccagggcatgagatccaaggtgggtgtttgggaacggggcccacccaccggccgtctctgacccttctttgaagcctgtctgtcacgtcaccttcagctcagaaagggcctggagaatcttggggcagcttctcttccaggtggcttgaggcatgtgccgatcgctatcaacacaccgggaattcagagcccacccagcctcacgggggcctcctttcccgagaaggtactcagccactgcctgccaggaggacggggaccaaaggcgcccacctgctccccacatttgcggagcgtctcccacaaacaacactgagagtgtcactaaagaaagcgcctgccccgaggagtttagaatccagccaaggaggcgagtcatgttctgtcatttaatgtgttttgatgccattcaaccccttcatatttttaacaatatgttaagtagacttccatttattttagccccagctgccttttgagaaagctcaattacttttgaacaacctaatcatttccaaagggcagcttcaaaccctcattttctaaagcagctcagcagccctccaccttcctgggccgctgcacacagttgagtgtggacgcagataagatgcaggtcaccagcaaagtcagatgcactcctggccgctctctgatgacttggagctcaggatggacaccatacagtcagagatggctgcacccagctgggtccacaggcatagtcagtgggactgctttaccaaagggactcatcaggttagtccaaaaacaatacattcgatggatcttcccaccaaattcacgcaagagttgcttgagtgtctgttgggtcaaaatggccaatgtggctgtgcacatgaacacggagcttcgccggccgaaccacgggagcaacacaggactgtggccacaggagccgtgttcagctgagcacacggcgctccccagcaggtctgggagacaggtccaccaggccaggtgctctcggtgccagcggcaccactaaccgtcctgctgcagttggcatcacagccagaatttgtttggggagatgggactcctgcatcgaggcagttagcggctgctatttaataatctcagatgtgtgtgcgcgtttcctccatagcaacttgcctcccacgtcgacatcaatattggaaaacgcaggcacatggccgagcgccaggtcctggtgtgggtttgcctctggctggctgccctgctggtcccgggttcatccatgacacgggtgggactgaatgtgggatccccaggacccttacagttccaggttattgtaacagttttgtgttatcatttcgaagccaaatgagaatggcttgaccccagatgtaagtacagccttgtaacgcttcagtaagatgggagcagagttaagaatagagactgtttatttggggcgtctcggctgaatcaccatttagtcactgggatgttgctaaaatatttgtacatctctggggctggaagatgttgaaattgtttctttgcctgcctttttccatccattacaaacccaaagagctgaaatttaccttaaaggtagactcattatattcaagcatgcttgctcctgaaggtgtgtataaatcttgtttgaaaagctgaattgggttttcctggaacaaacattgacagtacctaccctggaagcctatgactgtgctgggtgcatggaatggaaaagagtaactgcgctgggtgcatgggacggaagagtaactgcactgggcgcatgggacggaagactgcactgggcacatgggacggaagagtgtgctgggagcatggggtggaagagtaactgtgctgggcgcatgggacggaaaagagtaactgtgctgggtgcatggggtggaaaagagtaactgtgctgggcgcctgggacgggaaagggtaactgtgctgggcgcatgggacgggaaagggtaactgtgctgggtgcatgggacggaaaagggtaactgtgctgggcgcatgggacgggaaagggtaactgtgctgggcgcatgggacggaaaagggtaactgtgctgggcgcatgggacgggaaagggtaactgtgctgggcgcatgggacgggaaagggtaactgtgctgggcgcctgggacggaaaagggtaactgtgctgggcgcatgggacggaaaagagtaactgtgctgggcgcatgggacggaagagtaactgtgctgggcgcgtgggacggaaaagagtaactgtgctgggcgcgtgggacgggaaagggtaactgtgctgggcgcctgggacgggaaagggtaactgtgctgggcgcatgggacgggaaagggtaactgtgctgggcgcatgggacgggaaagggtaactgtgctgggcgcatgggacgggaaagggtaactgtgctgggcgcatgggacgggaaagggtaactgtgctgggcgcatgggacgggaaagggtaactgtgctgggcgcatgggacggcaaagagtaactgtgctgggcgcatgggacggcaaagagtaactgtgctgggcgcatgggacggaaaagagtaactgtgctgggcgcatggggcggaaaagagtaactgtgctgggcgcatgggacggaaaagagtaactgtgctgggcgcatggggtggaagggtaactgtgctgggcgcatgggacggaaaagagtaactgtgctgggcgcatgggacggaaaagagtaactgtgctgggcgcgtgggacgggaaagggtaactgtgctgggcgcatgggacggaagagtaactgtgctgggcgcgtgggacggaaaagagtaactgtgctgggcgcgtgggacgggaaagggtaactgtgctgggcgcatgggacgggaaagggtaactgtgctgggcgcctgggacgggaaagagtaactgtgctgggcgcctgggacgggaaagagtaactgtgctgggcgcatgggacggaagagtaactgtgctgggcgcgtgggacggaaaagggtaactgtgctgggcgcgtgggacgggaaagggtaactgtgctgggcgcctgggacgggaaagggtaactgtgctgggcgcatgggacgggaaagggtaactgtgctgggcgcatgggacgggaaagggtaactgtgctgggcgcatgggacgggaaagagtaactgtgctgggcgcatgggacggaaaagagtaactgtgctgggcgcgtgggacgggaaagggtaactgtgctgggcgcgtgggacggaagagtaactgtgctgggcgcgtgggacggaaaagagtaactgtgctgggcgcgtgggacgggaaagggtaactgtgctgggcgcgtgggacgggaaagggtaactgtgctgggcgcgtgggacgggaaagggtaactgtgctgggcgcgtgggacgggaaagggtaactgtgctgggcgcgtgggacgggaaagggtaactgtgctgggcgcgtgggacgggaaagggtaactgtgctgggcgcgtgggacgggaaagggtaactgtgctgggcgcatgggacgggaaagggtaactgtgctgggcgcatgggacggaaaagggtaactgtgctgggcgcatggggcggaaaagggtaactgtgctgggcgcatggggcggaaaagggtaactgtgctgggcgcgtggggtggaaaagggtaactgtgctgggcgtgtgggacgggaaagggtaactgtgctgggcgcgtgggacgggaaagggtaactgtgctgggcgcgtgggacgggaaagggtaactgtgctgggcgcgtgggacgggaaagggtaactgtgctgggcgcgtgggacgggaaagagtaactgtgctgggcgcgtggggcggaaaagggtaactgtgctgggcgcatgggacgggaaagggtaactgtgctgggcgcatggggcggaaaagagtaactgtgctgggcgcgtgggacgggaaagggtaactgtgctgggcgcatggggtggaaaagagtaactgtgctgggccatggggcggaaaagggtaactgtgctgggccatgggacgggaaagggtaactgtgctgggcgcatgggacgggaaagggtaactgtgctgggcgcatgggacgggaaagggtaactgtgctgggcgcatgggacgggaaagagtaactgtgctgggcgcatggggcggaaaagagtaactgtgctgggcgcatggggcggaaaagggtaactgtgctgggcgcatggggcggaaaagggtaactgtgctgggcgcatggggtggaaaagagtaactgtgctgggcgcgtgggacgggaaagggtaactgtgctgggcgcgtgggacgggaaagggtaactgtgctgggcgcgtgggacgggaaagggtaactgtgctgggcgcgtgggacgggaaagggtaactgtgctgggcgcgtgggacgggaaagggtaactgtgctgggcgcatggggtggaaaagagtaactgtgctgggcgcatgggacgggaaagggtaactgtgctgggcgcatgggacgggaaagggtaactgtgctgggcgcatgggacgggaaagggtaactgtgctgggcgcgtgggaaggaagagtaacacaggccctgtccccagggagacctctggacttacttatttgttctgtccatgggttttgtactgaatgtctgccatatgccagatacggttctagtcaccgcagagttcacattatgagcaggcagttgtcacacgatgcaactaggctgtaacagggctttctgcctggtgcagaccttcaggaaggcacctcgattaccttcctcggaactcagggtgggcttggcagagcagctgatatgcgggcaaggttttgcatgctaagaagtgatttgacaactggacgaggttagcaggagcttctcagtgggggcagcgcagaggtgaagtcgtaaaggagcctgctgtcctaaggctgctgggaactgcagggggtttacttgaatgagacaggaccccctcgtccagggctgggagttcaggagaccacgtgtggcacctccattttctcttcagagcaggacgtgagctcacctgccacaaaagagggggcattgggtggggagttggggagaaggggaaagtcctagtgcagtccccatgaggaatgagagagagaacaagcggaagagctgccaggtccctggcgggagccacgccgaggtcagagccctcccctgtggcttgcatgtctccgccatgtgcccaggcggggagcagccccggggccacagaacgcctctgtagcggggaagtgttgggagggccggctctgtcccctaggcgggccgtgcactgttttaaagaccccactgtggtcatcatcacctcctaactataccgtgtacaattccacttggtcatacccttcatcgtgaagcaatctcactgcattttaagagaggttgaagcattttgacaacctcagtaatgggattttggcagatggagggggaaatggcccagcctttattttcagttgtgccatacaggagggcaaccgctgtcacccctggggcaccacctcggccaggcgtgcgacctcttgcccaggaaccccagaaagggggctcaggggcttaagctgctttcaaatgtctgccgcttgcgacaccctcctctgttttggctcctcatcctcgtttttctagaagaggaaaggacagtagccacatttcaaaaaacagttccaggaagtttactttgtctggcgtagaagacgagccttaaagccagacacagttaaagagcaactctgattccaggacatgtgtccagccacagtgacacagcttcaccccgagtgcccgggggggggcaggggtggtggcctgagtgggactcaggtgccatccccaggggtctcagaacccagaattgccaggctctgtccctacttggttaaaattttatgcgaatgtggactttaccctataagcccatatcgttattgtataaaaatcattttctctaaatcttccaatgaaagtgaccctcgagcacaatgggccatgtctatcttgtggtttctgctccctggagagaagaatgccctgttcctggcccactgaatccaatgctggactcctccgagtcacactcacagacacacgtggatcaggtttaatctaaacacctgtggcccagtcaaatggacggtccttccctcatccgcctgccgctccccgtcctccacgtggccagcaggtggcccttatgggtgtggtgcagtcactacctgggcaccatctctgccaggcgtgagacctcagccctcttcctgggtcctttccagcacatgggctctcagcgtcctcaccctagcgaccctcccaggacctccctgcaggactgggtcaggaccaggaagccctcggaccccaggatggccctttgcaggtctcaggcactgcagagctccttttgcaagctctgatgttgtttgatggtgtccggctcaccagaggctccactcggacagcaccagcacagtgcccacctgccttcggggaactttgcattttagcagcggaaacatttcctcaaagagaagtcttcccaggagtccctatgcacggagctgctgaagatggagctgtccacgggagcagagtggggggtccgggacctgaaggcatccagccctccagagcccagggttccagccaccgcacagactccagccactgtgctcaagacagctcatgggttcccacctgcctcccaaaacaaatctgggccaagtggattagagttttaaattcattcttttttaaaaatacatgaagattcaaagatgggcagatgcagaaaatgaaatactctatattgtatttaataggaattctgtccaaaaaaaaaaacagagatgggtatatcaaagcaattatcaacttctgcatcttttctgttttcctccccgactattttcaaaggcccggtatcagcccagattcccattgtctgtgtccagacaacgaccgacctctgtgtgactggatcacgtgagccaaactcccctggccccgggtcagcgccgtctccctcgaggctgtttcctggtctccttgggacatttatgaggagagctgattaaggtggtgccactcctggacccagagaaagagttcttcatgcctgggctcagtggggctcatggaagtctcttctgggggatttgaggttctggtctgggattgggaattcattcctttttgttccaatttcattaacctcatataagaagcaggtaaaagcaatttatgcaaatccttttttcaatagtctaagacattttaccttttgataatagcagccaggcaaaggaaggagccgcagacaggcaggttttgaggccccaatttaaaatctgagctacctttccccacctcttcaaaagcctttctgtggataagttaagagtgtaatcccttagtctggtacaaatgttttaagactttgtatttctaaaatccaatttgagttatccttgaactttaaagctgttttgtccactgagccaagggccccgggatgcagacaagtgtggcccagcccctcgcccccgtgaaaccccagccgccatgggcgccaggagccctgtcagaggcaggaggcaccgacgcagatgctgtgggcttgtcctttctgagaaagatcttcacgcgccttcttcccctagacggagaggcttggggtgcaacagcagcccttgctgctggccacatggggctgagggtggcctgtcaggaggctgtacaaggcatgattgcaggaagcacagtgaggagaccgcgcggcagagtcggccccatctgtgttctcctggcttcgtgggacccggacaccccaggcctccgggctgcatgtgtctgcccagctgagctgacctccttgccagaccctcgctgggtacccaccgggtaccaggtggccctcaggagcccctctgggcctccaggtgtagacgggagaggcagagcccacagacgtctgcagggtgggagctggggggcccacagatgccccatagcagaggggagggtgctcagctgggaggaggctctgagtgtggaaggatggagggtgggtttctgggcacagggcagccagagatgcagcagtgcaggccccacagactcaggggtccaagggcaggggctgctgcagcttcaggcagggccagcagcagagctggtcgcgggggtctgggctcaatcactgctcacggctcacgcctcacactttacgtgacacttctggttctctcaagcctttttctcagtaatacagaatctcatagttacgtaaacgacacaaaacagaaaatggatcgtcctaaccgtttttaggtgcacgcctcttagcattgtatgtgttcacaacgttgtgcgagcatctccaccacccatttccagaaccttccatcatcccaaactggaactctgtccccagtaaacactgacccctgttcctccccccaccccggcagcccactctaccctctgtctctgagtttgatgactccagggacctcacacaagtggaatcacacagtctgtgtcctctagtgatggcttctttcactgggcagtgtccccagggttccctgtgttgtgctgtatgtgtcctttggtgactggcttatttcactgggcacatgtcctcaggactccccatgttatgccatatgtctgcaccccctcctcttagggctggtgacatctgtcagtgtggatggaccacattttgctcctctgtccatccgtccacagatgctggccttgcatccaccctttggctgctgtcataaagttgctgtgaacctggcgtgcaaatacctcttcaagaccctgctttcagttgttctccatggacacccagacatagggctgccggctcctatgggaattccatttctaactctgaggaaccgccaccctgttctccctagctgctgcaatagcgcagtgttcccatctctctgccttctcaccagcacctgttactttctgtttttttcggtaagagtcacgcacatggcatgaggtggaattgcactgaggaatcatgcttccccaatgattttggtgacgccaagcgcctctgcctgtgcctgaggtcatttgtgtgtcttctttggagaaacatgtgttcaagtactttgtgttttctgaacgagatggttttccatcgttattgtagttgagttgtggaagtttcctacatgttctggatattaatcccccactgcaatttgattcgcaaatcttttccccctttatatgggttgtcttttcgctctctggatggtgcgctttgacgcacaaacgttttgagtgtcatcaaacccaatttatctatttttttcttttgtgcctgtgtttttggtgttatatccaggaaatcgtggccaaatccaatgtcataaaggtcttgccctgtatgttttaggtctcacatttagctctgagttcatgtatgttctggccaagtgtgcgtccagccactctgctattcgctgtgagtcagcgcacgctcgggtgggaggtgacggtctggctcactcctctgcgtgtggatatccagttttcctgggaggcgagggtctggccacactcctctgcgtgtggatatccagttctcctgggaggcgagggtatggccacactcctctgcgtgtggatatccagttctcctgggaggcgagggtctggctcattcctctgcatgtggatatccagttttcctgggaggtgagggtctggccacactcctctgcgtgtggatatccagttctcctgggaggcgagagtctggctcattcctctgcatgtggatatccagttttcctgggaggcgagagtctggctcattcctctgcatgtggatatccagttttcctgggaggtgagggtctggccacactcctctgcgtgtggatatccagttctcctgggaggcgagggtctggccacactcctctgcgtgtggatatccagttctcctgggaggcgagggtctggctcactcctctgcatgtggatatccagttctcctgggaggcgagggtctggctcactcctctgcgtgtggatatccagttctcctgggaggcgagggtctggttcactcctctgcgtgtggatatccagttctcctgggaggcgagggtctggctcactcctctgcgtgtggatatccagttctcctgggaggtgagggtctggccgcagtcctctgcgtgtggatatccagttctcctgggaggtgagggtctggctcactcctctgcatgtggatatccagttctcctgggaggcgagggtctggctcactcctctgtgtgtagatatccagttctcctgggaggcgagggtatggccacactcctctgggtgtaggtatccagttctcctgggaggcgagggtctggctcactcctctgcgtgtggatatccagttctcctgggaggtgagggtctggccgccgtcctctgcgtgtggatatccagttctcctgggaggtgagggtctggctcactcctctgcatgtggatatccagttctcctgggaggcgagggtctggctcactcctctgtgtgtagatatccagttctcctgggaggcgagggtctggccacactcctctgtgtgtagatatccagttctcctgggaggcgagggtctggccacactcctctgggtgtaggtatccagttctcctgggaggccagggtctggctcactcctctgcatgtggatatccagttctcctgggaggcgagggtctggccgcagtcctctgcgtgtggatatccagttctcctgggaggcgagggtctggctcactcctctgcgtgtagatatccagttctcccagaaccacctgttgaggaaaccgtcctttcccccacaggttttttaaaagtcagtttatttttgtttagtatgggaaaaagcaggttatttttaaggacacgagaattttatttcagatcagtacatttttaaggttataaaatttagttaatattatctttaaaatattgataatatttcaagccagatattgactctgtcccatttaacatgtaatgcatgccttttaatttactttaaatttatcatgtaagaagaagcatgattcatggaaagcagactcaacaatacacagatggtccccgcctcaggatggttggacttagtatttctcactttacagtggtgtgaaactgtactctgagtgctcacccaactacgctgttattcactttcagggcagtagtcaagaaatggcctgatatcttcagcactttatcataaacaggctttgtgagagatggtttcgcccagctgcaggcttgcatgagtgttctgagcacacgtaaggcaggctgggctgagctgtgatgctcagcaggttatatggatccagtacgtctctaacctagcacatttcgacttgcaccgggttcattgggatgtaaccccatgatgtaaccccatcatacactgaggaacctccatagtgtgtttatctgagaactgaatacatatcaaaatgtaaagtaaatttaaccaggaaattggctccaataatagacaaacaaagctttcagtgacctgatggctaatatccttacccgtttgattatagaagttttatgttcgtaattcctgttttatttgtgaattacaagagaaaatgaacagtttcaggctgctatttgtaagcaagcgtctgcaaataaatgtgtttcaggtgggggtagcctaaatgtcacgtaaaccagcgcaattcagacgggggaagcctaaattccacccacaccagcacaattcagacgagggaagcctaaattccagatacaccagcgcgattcagatgggggaagcctaaattccacccacaccagcacacttcagacgggggaagcctaaattccagatacaccagcacaattcagacgggggaagcctaaattccagatacaccagcgcgattcagacgggggaagcctaaattctacataaatcaacaggtctcaggtctctaaattccacataaattaaatcaaatttggatagattgattcccagacgttctgctctgagcgttgtgtgcagcgtggaagtctttctggcctgctgtgtatgagcgggaattggatggtggtggattcgctttggggcatggcttcattgctggcttacgtctctcacacttgctcagggtccgtgttccttccagagcttgcctttcatcagactccatctgagcaccaatttgactgcacatccctgagtaggaaaaagcctcacgtttaacatctgcagtgcatagaacttccacagtggctggcaggtcacttgggtgggatgacagcgtctccggggacaaggatggacaggtggatgggtgaagagcatgaggtgaggaaggcctgggctgtggtagagaaaggagaggagggagaaagtgcttgggaacacagccggcgagcgcagtgacatgctggtgtggggagaggggcacggggccgagagccacagtgtggagctggtttgggactggagtagaagctggttcagggagaagccgtgagctcagtgggggacaggtggccagccggggaaaggccaggggacaccaggggaggcattcagccagtgctgtgacaggagagcctgcagctcaggccaggccagaccagagctgtccccgtggacattctggtgccagagtgtgggggcagaggccaggagaggcgtcagggcaaggggacagtccgtcagggccccacattctatgttcaccacagagcagctccgctatcctcagatgctggctttctcagcttgactgtgtgagttcctctttgaaggagaatttctgaatgtgacttaattcaattttgtgcttccaacaaatcttccctcattaaaaatagctaggagaccatctgcattggtgagagtctgggtttccgggaaatggtaacgaaactctgcagttgagccagggacgcaaaatgcatcgccctgccctgctggcggtgggctgttgattcagtgacctaccaggtgccaggaacaggggtgacctcacaggtgacacagcctggccccaccaccaagcatggccccacatcgaacccgtgggagcagagccccaccctgcaccgcctcgctcacccctgccttctcccttgcctctctggatgacagactgggcccctgctgccctctactcctctctaggctgctctcccaggtgtggggaggctggcactcatgcctccttccctcctcacccctgtcccccccggctgcacctggatgctgcgataggcagtgccctgccgaggaatggagggccgcccaggcccacactcgggccacgcaggagttgcttctggcgtcaagtccacacatttcagtgcaaacgcaaagcctccaggatctgggccaagctgccactccagcttcatcttcattcactgctcgtctgcaccacccacgggagccacgcacctttcccaactgcaccgacatgggcgctgggtcccaggttctgcctcgagagcccctgcacccccgccctgcccctggccctggctccatctgacatgacatcaggaccccccctgagagaccatgtcttctgtcaggcctcccctccctggcgggatcactcccttcccaatgccaggctgcagtcagcattcgtgagcacccaaaatatgccaggcagcatatgaggcacatggcacacgtggtctcacccgtcttcccaccagccgtgaagtgggtgccacgagcctcctcgcaggtggggaggaccagggcgtggggagctgacctcacagacacgtgagggtgggggccaggggctcactgtaacctcatgacagggaccaaatgctgccagatacagacaatgtttcttggttggtggctgctccgggggtggggggcgagactgaagcgcttttgcggccgagcaccacatgtcaggctgcgcacagcacgtggtcttcgggaaaagtctgttgaatgaagtgttctcgtttgaagacacatatcccttaacccctgagcctctactctagaaggaaggaggtttagaatgctctgtaacacgatgaataaaatggaagggtctgcaaagccaccatcctccagcgggagccccaggcccctggggtgggagcaggagcacaggaggagccctaggcagaaacccggctctccagggcaggcaggtcctctcagcctctccccaaacatctgtgaggaaaccgtgctgcagccacagtgtcgagacacacacccttgccatcagccaccttcctcccatgcagcaagctcgggcacacccagtgtagaggggagctgcgactcagtggacgctgacactgggcatcggtgggaacagacagcggtgctgtggctcctgctggtgggacgctgggctcggctgacagtcaggaggcaacgcagctgtgcacatccgaagctctcgacgtgtggagatgctttggcatggacactcgtcccctgacacttcatcctaaggacacaattctttgagatgtgcaaagaatgaagtgcgtggctgttcattacaacattgctcatgatgcgaacatggcacatgaagggatgtggatgggagactttccgacgagggaagccccttgcagaccaggcacccctgacatttctgaagaagcaaatctcccttgtggatgcagcacccagagcaacactaatgggcctacaccgtgcccgttgtgtgttcttagcaggaattttctgtgccggggaacagctgtttctttctattcctttatatttttctaagacttccttttgccccgaagtcttctgttttatatctgtacctaaaataggccagagcacacacaccacggctgcatcctgagcggctgtgatagtcagctctgtggacccacgtccatcccgctgtcctgacacctccccgagcccccacacctacctccccaacatggggcctctgtcagaagtaatgagaccttcctcaactcgcgaggggctttcaccttgtcacacttaagaaacactcctgcgtcccgtgttttaggagagctagagccagtcacacggtgtcccctgcccagggctccgctgtcccagaaagactggaaatgagggtctcggctttgccacaggaatgggtgggattctgcctgtttctccatctttttgtaatttctattataaagagtgaggcacgctcaccatttgccgttatccttgaaggagtttctccccagaaagcgcttgatggagacgagggcacctgctcctggtgtgggaagaggtagctcgtggaagccacatgattcacgtgactccctcggtccccgcgtgcacacccatgcatcggtgcagccggggccgcagtgtccttggctcaggcctcctacgcagggaagcagggtcggccgctggatcacccggctgtgcagctgggatttgcccttgacccgggtgtgcaacaaggctttgtcctgtgggccgcacgcgttcccaaacacagagcaggagctgcaggaggcggagaagccagagtgacaaggtgggtttgggggtctgagggccccagaggtcggacattggaatgaccgattgcggcagccgagaaaccaagagtggctgcagtgtcaccgcggcatgatggggcgagggtagctaccaactgaacctaaggaaattcagttccatgataagccaagaagggtcaacagcgtctctcgctaacactgcagatatctggactggccccggggcctggtccctggtggtgccatgcagctgagaagaaattgctcctataagcgaatatctgacaccccagccaaaagtcttattctttcccctaaattccaaaggaatttcctctctattttccagtcgattggagtcgtttccatcggtggctgtcttaccagtgggtgatgagtctgagaaataggaaccatgtcttatttatctgtatgaccccacagcagtaactattataatgcctcagacttaaggactcaataaatattggatgactagacagaaattaattaatgaacatgctagcttcctggtaacatatgtaacatctctcttggtccacttagactgtaaattaatgagacctttgaggaatgaagaaagtacgcgggcaactgcgggaaggccggagattgcagaggctgtcttcagagaggggtctggggagctctttcagccttgtcccgcgggccgagcccactcccccggcatacagagctcctcttggaggggccctgctgatggtctggccctgctctccgggggcgctcatgccttccactgccactggctgttattctttctgccttcatgccagctggagctcccggatgccaagaactggacagcaggcacgaagttctccgcgttcccaggaggccgggatgtgcaaagggcatggccggagccgggctgtcctgacagacatgtaagcacacagaagggtggcaggtgacctttctctggagcgcatgacggcagtgctgtggccttggccttccactcccaatgggggacttcccacttctcagacctagagagaaggcctcagggtcccttgggaagcacgatctccgctccccctttaatgggtcgagaatggagacgtgagtcaggcacaaccttcagaagtcctggcacgaggggcctggaagctcaggtggggcttccgtgaccacctgcggccacacagggcccagggccagcctggacgaattgtaaagggaccctctcatggggcttcctgctcaggagaggcaggaatgggagatgtgggtttggctgcaggcctgagcaggtgttggaggacaggggccatgcactggggaacacgctcctggggagaccccctcctggagcccccagggccagagacgcctgcaggagggagaggtccagaagatggctgcccaagaaacagggcaatgtgtggggatggaggcaaggggtggggcatggcaggctacagtagcgctgccacctgcaggaggcggagaggccacagcgacaaggtgggtttgggggtctgagggccccagaggtcggacactggaaggaccgattgcggcagctgagaaaccaagagtggctgcagtgtcaccgcggacgcctggacgtgctgagactcaccccggggccatggagagtggctgcagtgtcaccgcggacgcctggacgtgctgagactcaccctggggccatggagagtggctgcagtgtcaccgcggatgcctggacatgctgagactcaccacggggccaccgagagaggctgcagtgtcacctcagatgcctggacatgctgagactcaccacagggccacggagagaggctgcagtgtcacctcagacgcctggacatgctgagactcacctcagggctgcggggcagacctggagccaggccggggactgcagggttgggaggaggaaggcgctctccaaacacgccctgtgaagccaccgtagaatcagactgtgcctccagcctgacctgtgctggccccttcctgtgagctccaggaaagtccgtgcttgaagagctcattcatgagtgccttgttttatttccttcacatgaaagcagagaacatgaattgttttaaaaatagcctctccttctacaagtcattatttgcagaaatagctgatagttcaaaaactctaaattcatttgccacgttcattcaaattgttctgatcttatcatctttcccaaatcccacatttattacagatgtatttattctttgtctcccctccctcctctatataatggtttaggagagattacaaaaggtaatttataacaggttaaaagagagacctcaccactcacagaaaaacgaagcattcccctccccagagtggagacgtggctttctggggaatgtggcccagggccctggccgcctgcccacacgcgtagaaatacatgaaatggctgcgcatgtttcagtcacttagagaaataccgaaaaatggcttcatataaacctctgaaaggtacgcggggtagcaattaatctccttccgtagtaaagagcccagctgctttggccatgatgaacatcagtctttgctcttgaaggcttcagaacaggtgtaacagggatggggcgcaggtgctggcccgcaggtcgggatgtgcctgctgcgtgccccggccaccccagccagcggtcctgcagcaaggagcagccggtgcccatacctggtgaagaggctgggttggccgctgcctggcctgagaggtgaggcgtggagctgtgtccacatgaggagacgcaagggagcgatttccatgaaggagtccatagacctccgagctctttctctgtagctcagctgaacaacgttgccaactagggagggcactggcttccgcggtcaattgcaggctcggacactcactgcaggcttagcctttgactaagtcagctgaccctgcagcacccaggtgcccacctgtgaccttgtggcgatgcatgtcccatgcaggtgctgagtgtccaagctgatgtttgcaggatacccacccgtggctcccacggcaccatcaggctgttgccccagatgtgcagttgttccctcactgggtcaccgacatgcctcttgcctccatgcactgagttcaggaccgtgaataagtgaggcttgttggacccaccaaatgtgctttttttagagatgcattttctcaaagcctcgtggatcgattttggtgatgctgtgaatgaccatctttgtgtctgtgagtccccgtgcagtgagaggtaacagcagtgttcctgcagagtctaagtggccaggcagtgttcctgcagagtctacgtggccaggcagtgttcccgcagagtctacgtggccaggcagtgttcccgcagagtctacgtggccaggcagtgttccctcagagtctacgtggccaggcagtgttcccgcagagtctacgtggccaggcagtgttcccgcagagtctacgtggccaggcagtgttcccgcagagtctacgtggccaggcagtgttcccgcagagtctacgtggccaggcagtgttcccgcagagtctacgtggccaggcagtgttcctgcagagtctacgtggccaggcagtgttcccgcagagtctgtgtgaccaggcagtgttcccgcagagtctacgtggccaggcagtgttcccgcagagtctgtgtgaccaggcagtgttcccgcagagtctacgtggccaggcagtgttccctcagagtctacgtggccaggcagtgttcctgcagagtctgtgtgaccaggcagtgttcccgcagagtctacgtggccaggcagtgttcctgcagagtctacgtggccaggcagtgttcctgcagagtctgtgtgaccaggcagtgttcccgcagagtctacgtggccaggcagtgttcctgcagagtctacgtggccaggcagtgttcctgcagagtctacgtggccaggcagtgttcctgcagagtctgtgtggccaggcagtgttcctgcagagtctgtgtgaccaggcagtgttcctgcagagtctatgtggccaggcagtgttcctgcagagtctacgtggccaggcagtgttcctgcagagtctgtgtgaccaggcagtgttcccgcagagtcttcgtggccatggcccacccaacaactgcgacttcttaggacgaggactcaggtgtatgagttcctcacagccccctttttcagcccaaggcgatgcccacagtgtcctggcaccacctcccacccccagcctgtggctgaacccaaagggatggcccgggagctgatgggtcacaggccatcccatgtcccacgtgggcttctcaaaggttttggttcccatccctagttttggggcagtggctgtctcacatggggttagggtggaaaacagctaagtcagatcagagcgtggaaccccagagctggtgtagctgtacctccaggccgcccgctgccctgctccttgccatctgtgtctccccggagcatgcagcctgcctggagtgctgccctgggtgtcttttcagagtgcaaccctgcaacctcagcacaggagtctgtctccatcttgacaggcattgctgaagatgtaagtgctcccccagaacatcggggtgtgtaggccctccacgatgtgctgcttggacggcggagaccgccgttttctcttggcagtctggcgctgagtggatttgcccaaagtcacagatcaacttgctgttgcagcaggggccggcctgtttctggagtggtttagatttgggatgatggagctatgatcagcttacaccagcgcagtgcctggcagctttagcagaagggtcattcactgaggtccagccagcagtcaacagcacttagaaaacaacaaccaagaagagtagccagcgccaagcagaaccgggggcctcccctcctctgcgagcacacagcagcctcctcatgcccttcatcccctatcactttgcctcattctgttttcctcttcttcctttatggtagcggggggactggcaccccagtgtccttgcatctgtgctggtaggttgctgaggggtttcccgcggccgccggcctgtctcccaacactccctgggcctcattcattcccaccacgaccctcctcttgggcgcacggcctggactcccgcctccagccctccccacctgtcggtatttctctcccaccctgcagggggtgcttttctcaaggccattttaagcacacatttcactcattcagagtgaagatgacacagaagccaccagattcaagtgctcagaaagcaggacaagcgcgtcgggctcagagctcttccccaggaagctggcctccaaaagcaggagacggagaatccattcaggaaaagcacatggggctgggcgccgttccctggggagctggcctcggaaagcgggagacccagaatacattcaggagaagtgatcgggcttggagccattccctggggaaatggcctcagaaagcgggagacctagaatctgctcaggagaagcgcctcaagctcagtgccgttccccagggagttggcttcagaaagcgggagacctagaatcctttcagaagcatgtcggactgggcgccgttccctggggagctggctttagaaaacgggaaacccaaaatcggctcaggagaagcacgtcggactgggcatcgttccccagggatccctgacttcagggccttttgtgccacctctgttagtgagtgtcgggattcctgcaaataccagatttctggagggtttggaatattgattttctgttgaagaaattagggtgagcattttactcaataaaaatcaggaatcacaattcctaaactcatagatttttctacagatcttaagcctccattgttattcctatagtagctcgccctggataaaatggagacatccctcaattctgccaagcagagctgccgggaaagactgaggtcgcaagcccagccctgcacagggcgaaaggaaggaccactcagactgtcctggcctgggtcaggtgccaccccacaggtagtaactcatcaaagatgcgcagtttaacggactgtactatactgacagtaaaacgaactaatctggcatccatacactgtgtctgtcaaactcagtgatgcacacaggtttaaacattgttttttatgtgttttaatttttcatagccttctaacgtgacctgtgagacgtctctgcagagttgatgccatgaggtagtgagctcacctaagaatgtcatcgtcatatagtcagcaagaataagatatagaagacgatgccttcgtggctttacacacctcaaaatgtggagctgtatcatttatgtgattcttttaagacataatcactcaattgaaagcttggagcagataatgcatcttagtagccagagcttcgcggctgccattgtatttccgctccttcgtgaaggggagcgaggcgtgctctgcagagcagcaggtgtgtgccatgtgagggctggagggcacagcccacgagagctgcttcgtggggctctcaccagttctgtggctccatgtccagaccagttctgtggctccgtgtccgtagcaaagctggatctggccacagctgtcgggaatgtctgagggattggcagagttgggaaagacgccggaataagagagttggacaaacattcagaaagggttacaggtagattgtgggaaccgcagaccagtgtgcttgccttggtccctggtgagatcctaggccgtatcagtgacggggagggagccgggcgtcacaccgtctctttgctgatggcatttcttgctgagagatggaggaacggctgttgacatcacaagtatagattttaatgatttttttttttacaaagtatccaaaagaaaagatagagacttggaacgatcatgccgttagataaatttctacctacgtacactattcttacaggctattaattaaataattacttaatgaggagaaaatagattaagtgcaaaggggttctctagaaacgtgccgtggggctattcctcaattctgttatattccacgatgttgtcaataatagaattaaagatgcgtcattgggttgagtaaacttttggaccatgcagtgctaggaggaggaggggtggatggagatgagggtctgagtaaggtctcccgctggcaccagaagagccctgcccaagtgcgaccatcagatggaaacgacctcaggggttttagagccagtgtgagtccactgtgttgctgatagcaggggatgcgcatggctcacccagaacaatcccgcccacagccacgttctgtgtggcccatgtgtgagctgcccgaggccgccctcaccaagtaccatgaacctaggggccttcaaacaacaggcgtttattctcccacagtgctgggagccagaagtctgagagcatgtctgaagctgtgctccctcctcctccagcctctgccagcacctgacagctcccagtgtccctcggcttgtggctgccccactccagtccctgcctctgtgtgtgacccgctccctgtgcacgtctgtctgtgtctgaatttccctttttttttttttttttttttttgagatggagtttcactctcacagcccaggctggagtgcaatggcgcaatcttgggtagccgcaacctccacctcctccgttcaagcaattctcctgcctcagcctcccaagtagctgagattacaggtgcccaccaccacgcctggctaatttttacattttaagtagagacggggtttcactatgttggtcaggctggtcttaaactcctgacctcaggtgatccgcccgcctcagcctcccaaagtgctgggattacaggcgtgagccaccctgcccagcctcaaatttccgtttttgatcaggacaccagtcctactggattcatggcctaccccagagacttcgtggtcacttgattacatctgtgaaggtcctttttccaagttacataacatgctgaggtcctggggttaagactcaacatatcctcttgaggggacacagtttgtactctaagagctcaatgagggttttcaaaattgagaaattttacataaataatacaaatgcctgatttctattttcttaatcaaagatctgagcaaccccagacccgcattcccagccagcagtacctgtgtgctctccccttggggtaggactggccgcccccagccacccagccccccttccacgacgcagcccctccccccactcatggtgcccccagctgcccggccccccttccaccacgcagcccctccccccactcatgtggcctgcccggccccccttccaccacgcagcccctccccccactcatggtgcccccagctgcccggccccccttccaccacgcagcccctccccccactcatgtggcctgcatggccccccagacactggaggctacagcccctgatgtctaccctgttgtggcccacgaaggatttagacacctcttaaaaggaatatatgcactaaatgaatgctgaaataacaaagtcggtagaaaatgacggccatgggagagacacatatgccccctgaggttaacccggcagaactgctgcgtcccagtgacggagaccagggtcccagggatgcagccagcttggccaccccgggggcttgtcctcaggcctaggccctgcattagacagctgcctgcaaggccagaagacaaagaggagagcaggaggtctgccggggtcaggtgggcctgaggaagggaaggagggcatggagtgtgggcggagtcctcaggtcccaggacagcctcccacgtggtgaagggccaggactcccccgggctgcaggggagcacagacaggacccgtgtgcaggtgcacaaaccggacctccggcgcgtggggctctcgcgtgtaacccggctgccccggaacctccggcgcgtggggctctcgcgtgtaacccggctgccccggaacctctggcgcgtggggctctcgcgtgtaacccggctgccccggaacctccggcgcgtggggctctcgcgtgtaacccggctgccccggaacctccggcgcgtggggctctgcgtgtaacccggctgccccggaacctccggcgcgtggggctctcgcgtgtaacccggctgccccggaacctccggcgcgtggggctctcgcgtgtaacccggctgccccggaacctccggcgcgtggggctctcgcgtgtaaccgggctgccccggaacctccggcgcgtggggctctcgcgtgtaacccggctgccccggaacctccggcgcgtggggctctcgcgtgtaacccggctgccccggaacctccggcgcgtggggctctcgcgtgtaacccggctgccccggaacctccggcgcgtggggctctcgcgtgtaacccggctgccccggaacctccggcgcgtggggctctcgcgtgtaacccggctgccccggaacctccggcgcgtggggctctcgcgtgtaacccggctgccccggaacctccggcgcgtggggctctcgcgtgtaacccggctgccccggaacccctcctgcacatgggcgggctgagggccaggcgcaagggcacctgtgcccaggcggcaggcagtaggcaccagtccatggtgggcgtacagatggcagggctgaaagggaccctaaagatcctccggaagagatgtccccccaggggacatctgggagctgtgcacggtcctgagcggcttggggtcccaggcctgtggccctcactgcacagggttcttctgcagcgggaccccgcagccatgtcactctctgccctgggaaacatcctgtgccacggggcgggggggtgggggcggttaggcagcttgggtgatttttttattgtttgtagagatggggtctcactgtgttggccacctggtctgaaactctaggcccaagtaatcctcccgcctcggcctcccaaagtgctgagattacagacatgagccaccacacctggccaagagtgagttttaatgagcacacagtcactgtcttctcacatcagaagtccgtgtgctgagaaatgaggattctctttattctggacgttccagaaagcctcgtccaaggggatcgaatggacgcaggagggagagagctcagattttagctctttgttaggttcgtataacccaagtgccctgtgggttccccttgtgtggatgcttcctgaaactgtgtcctcacggccgaccctgtgtctcaggcgagcacccttctgtgggtggtggggacacacccatgcgtccgacccccacagagccacctgggcctctgtatgcctcacgctcctctctccagcatccacggtttgcccccagctgagggctaagtgagggaaactccttcaggctcacgttgtaaggaaccactgctcccccaaaacatccctgccagagccttgtctgctcactgatgaggattctgtctctgggctttcattgtccatccttgaattccagctccccagaatatccgacttgtatgtgtaaatctctgtcccagccatccgtggatgggccgggctgagtgctctgggacttcagaagcccaggcacgccgggctgaatctgaaggcgggtgtgtggcgcagctcctggagcaggcgtgttaaaccctaagctccttcccatgtagcaggaccgcccattcctgtgggccatgtggctgcacaacgtggagcgaggtcgaagtccccatagaagacagagctggggggctcgcagggaatttctcagaggggtgcccacttgggagggaaggagggtccccggcctctgtgtcactcacttcgtgctctagatgtccgagtaacccagtggtaaatgtccactgccagtaatttcccagcacctcattctgtcccacacacctcacttaggctctcagctacccgcaggaggaccaggactgaaagaattgtcaggggtcaaaatcgtctttgtcattttcttggaaataaaagtaagcagctcatttcagacactatgcccaggaggagcttttgtccagagctgtgcatggaagggcatcgtattgatctgtggcacgtatggcctccatctcccctgatgggagtcagcagggccgctctgtgtgaccacctgtgagagcctagattaaaatcccacccagccatgggcagcacagcccccgacccaggccctctgaccaggggcctcactcccactgggagaggcagaagccacagttgtctctctcggctcgctcctctgccgcctgagggtccagactgtagtctccagccccaggtggcttcccctccccagcaggagtgtcggttcccaggtgacagttatctcttttcaaagtcggtggggtgcaggctctagtagagaagagtagctgggagagcacgttcagctctcactggtggctttcatggagccatacgtggcttgttattgaattgtgactatgaccatctcatgtttgatgtaaaggataaagaaatgatggacctgtgggtgattatagccattctttggtttatggacccgtaagtctcacggagagcattatcaatcacacagtgccgtcacggctgcgttttcatgtggaatgctgaattgctttagaatgcataaagcagggagccgcttgtgactatgcatgtgtggttttacggaagttggggcacacatgaggcctgccctggttctggtcatctcagacaggaacacggagctcatgaaccttctcagtctcaccgagagccctgggacggcccctccgtccaactctggagtaccttctgccacctgcaggtactcctgaatggccgagagccactcacaccactgcccaacctttaggatgatctggacagtccctgtggaaggaacgagtctctgtggccagctctgagtgctgcaggtcctggctgaagggtcgtgggcagatggtgatgcttgcacaagcagagagataatcgtaaggggacacagggtggcaccccgcctggaaggcagggaatggaagcaggagggaactggcaccagggagctggcagcagaggagaggatgtgcctgagcttcagaagggaaggcaacactcagaggcacacggcacggggcagaatcagagctaaaagaaagggtgcccatccgaggcaaagcacctttctccagcctcagccctggaaggccactgtcctgcttacagggacccttccttgcagagcagccagcggctggccccagcggcccaaggcagatgcacactgctaagggatgatagcatctccactttgcagtgacatttgctgaaatgagatcataaaatccacaaggactttatttttgagagttaaaactagaaatgttaactcttgtggctacttttgttttaaaagcagcataagaaatcttcctctggctgggcgcagtggctcacgcctgtaatcccagcactttgggggccaaggcgagtggatcacaaggtcaagaccatcctggctaacatggtgaaaccccgtctctactaaaaatacaaaaattagctgggcgtagtggtgcgtgcctgtaatcccaactgtaatcccaattgggattatgggaggctgaggcaggagaatcacttgaacccaggaggcggaggttgcagtgagcagagatcgtgtcactgcactccagtccagcctagtgacagagtgagactctgtctcaaaaaaaaagaaaaaaaaaggaaaaagaaatctgcctctgcctgtaatacctgccgagactgatcaagtcttccctgaagcttttaaactacagcgggttagcattgccatccctgaagggtacttagcgggcacgtatgttaactgagcttatgacatcaattcatgggaagctaatatagtgtcgactctatctccacgtgtgtggggggggtgtccatgcacgtgtgatgtgtgcttgagttggtgtttactatatgcctatgtgtgtgtgaatgtggttgtgtgtgtgctgtgtgtgtaagtatgctgggtatgtgtctgtgtgtatgtgtggtgtgtgtgtttctgtgtatgtgtgtgcgaggtacttgtctatgtgaatgtggttgtgtgtgtgcgtgtatgctgtatctgtgtgtgtttgtggtatgtgtgctgtgtataaaaggacaacccacagcactaaacctgaatctatagattcccaggtacctgcgtatcagaaaatatgttttactattaagttttctgtgtccttcatctgtctggcattctggagggatgtggtccaccttgatccggaaggcaccggggtcagattcactcagttcccggcattctggaaggatgtgttccaccttgatccagaaggcacctgggtcagatttgctcagttcccggcattctggagggatgtggtccacattgatctggaagatactggggtcagattcgctcatttgctggcaatcaggagggatgtggtcacgttgatctggaaggcactggggtcagattcacccagttcccagcattctggaaggatgtggtccacgtttatccagaaggcacctgggtcagattcactcaattcccagcattctgggggatgtgatccgcctttatccagaaggcacctgggtcagattcactcaattcccagcattctggaaggatgtggtcacgttgatctggaaggcactggggtcagattcacccagttcccagcattctggaaggatgtggtccacgtttatccagaaggcacctgggtcagattcgctcagttcccggcattctagagggatgtggtccctgttgatccggaaagcactggcatgagatttgctcagttcctaacattctggagggatgtggtccacattgatctggaaggcactggggtcacattcgcccagttcccacatcgtggagggatgtagtgcatgttgatccggaaggcactgggtcagattcactcagttcccgccatctggaggaatggggttcacgctaatccagacagcactgcgtcagattcacgcagttcccaccatctggaggaatggggttcccgctaatccagaaggcactggagtcagatttggtcagttcctggcattgggaggggtgtagtgcacattgatctggaaggtgctggggtcagatttgctcaattcccagcattctggaggaatgtggtccacgttaatccggaaggcacctgggacagattggctcagttcccggcattctagggggatgtggtccacgttgatttggaaggcactggggtgagattcactcagttcctggcattctggagggatgtggtcacattgatctggaaggcactggcgtcagattcacccagttcccagcattctggaaggatgtggtccgcctttatccagaaggcacctgggtcagattcactcaattcccagcattctgggggatgtgatccgcattgatctggaaggcacctgggtcagattcattcaattcccagcattctgggggatatggtccgcgtttatccggaaggcacctgggtcagattcactgaattcccagcattctgggggatgtgatccgcgtttatccagaaggcacctgggtcagattcactcaattcccagcattctgggggatgtgatccgcatttatctggaaggcactgaggtcagattcactcaattcccagcattctgggggatgtgatccgcattgatccggaaggcacctgggtcagattcactcaattcccagcattctgggggatgtgatccgcgttgatctggaaggcactggggtcacattcactcagttcctggcattctgggggaatgtggcccatgttgatccagaaggctctggcgtcagattcactcaattcataccctgcctcgcctcctgctgtgtgaccttaagcaggttaccttgtcactctgggcttcatttgcctgtctggaaaatggagggttttgttttgttgtgttttgttttgttttggagtctcactctgtcacccaggctggagtgcagtggtacaatctcggctcactgcaacctccacctcctgggttcaagcaattcttctgcctcagcctcctgagtagctgggactacaggcgcatgccaccatgcccagctaatttttttgtatttttagtagagacggggtttcaccatattggccaggctggtctcgaactcctgacctcgtgatccgccccctgggcctcccaaagtgctggattacaggcgtgagccaccacgcccggccaagtacaggttttaatggtgctcacctcacaggattattgtcagtttcacaaagagccttcctgcaagcatggaggttagtgctcgagcacagagttagacatttgataacagtcactgtcatttcatgagggttttttaattgtgaaaaaattgtccttagttacagacacacactctggggcttatgaagattactttaaatatttagtatatgtcaattctaagttaaaagtctgctttgcaagttacgagagcaatagaatggccgccgtaaactgcagtgaatacagatgcccctcattctgcttctgactccagtggttcctgttctgtcctggggcttcctcaggaggtgctgagaaggaaagaaagggaacacctgaggggcacctgccctccctccacgtgtgcccagaagcgaatgtggggagccaggaggtggtagggtgcccaggagagcgggagcagcatggggcagggcgggcccagccgagggtgggaccttcaggccctccattcccaagcacacacacgtggtctcttgcactcttcatcggtgatcatttttcctctttatatttgtgttacttaatcctattatctttaaggatgccttccacatttgtctgaaaacagaatttccattggcatccatgaaaaccaaggtcggagctcctagagtcaagatggtaataaaaagtagcagggcccctgagggtgtggatgccaccctgtcctgagcaccttacagccaagagctcccgggatcagttcattaagcccatgagtcaagtacattttattcccattttcagggagagaaactgaggcacagggcagtgaagccacttgcctcagtcacacagttagtggcagagcttcctctaaaccatggcagtgtatactgggcacccaatcgtgtgagtagaaacaggaatcttctaactcacagcatcagacaatctaaggaaagggattcctggtggcacctcaccccgcggaggatggcacccggagctgcagctggaaaaaacagaggccgtcagctttgggcgagtgagagcttcagagggccctgagccccacggtgatcacgcattcaaaatgtttgctgcactcagctacataaatattacagggaaagagaaagtggagggcaggggagaggcagcctcaccacagccccggagaaccagagtgaggcaaatgtagttttccgggcctcctgacctgccagtctcggaatcccaaatccagagcagcggcagaggacaagcggccgcggggagtgaggggagcgtgctgaggtgggggttggaccgcaggaaccccaccaggctggccgggaacttgcctttcacctcctgcaggtgcctctgcctggctgagaagaagttcttttgtggaagacccacgctgggtgttcccatctggttctctcctggacggcttgacgttgctagctccagtagttaccctccactgcacagcgagttatcccgaaacttagcttaacacaaccatgttttatcttacagtttctgtgggcctggggtcctggtgtggaccagctgggggttccagctgcgtccctataggctgtgctgagggtgtcctctcagctcagcagcggcagccccaggccctctgtgctgttagcccctgtccatgggccctgtccaccaggtttccccatcagccgccaccacctggcagcagacatccctcggagctcgaaagtcggtcggggaccccagtgtgcgtccttagcagccatctctgctgcctttgctgtcctccaggcatcggagtggagtcaccaggtccagtggcgctcaggaaagagaattccaggaggacggaggccctgggccgtctcagaggctgccggccacactgacatttcaagaatgagcccgttcaatttcaggatactccctttgccacaggctcagtttaggagctcttcttatttctctatttttccaaactttcgatacttccttttctccccttcatcttaatttaaggctttccacaaagagctctatcacagccccttcctaagaccggtctccaacagcagcagcttgaaaacagctattttggcccctcaggtatgaaggtcccctagtgtttcctggagacacctccttctgacctcagctccttctgagggacgcggggccagaggagagaggagcagattcggcagcgcggagcagcaggacggcgggtgtttgaaatggcacacacgcacttttctggtggcatatgttgtggtattcatttagcaaaaatccatttttaaaaccctggacctgtagactgatcaacagatgaaacagtgagctgagctgctgcctgcctttttgtgttgccagagattattatccaccatatgctggaagcctgatggtgagcctccgccccggggctctcaccaacgccgcagcacgcctgccggtggacaggagcctatggagggcactgagccagccagtgagcgtgggcaggcagccctgtgctccccactgggctgtgagaggtgcacacacctcagcttacttctctgaggggagacacccatgttcaccagcaccgaccaggctttctcataaactcagagcccgtgtcagttacaccagcacctaccaggctttctcatagttacaccagcaccgaccgggctttctcacaaaggcagagcccgcaacagttacaccaggaccgaccaggctttcttataaatgcacagcccacgtcagttacaccaggaccgaccaggctttctcataaatgcacagcccacgtcagttacaccagcacctacccggctctcttacaaacccacagcccgtgtcagttacaccaggaccgaccgggctttcacacaaaggcagagcccgcaacagttacaccaggaccgaccaggctttcttataaatgcacagcccacgtcagttacaccagcaccgaccgggctttcttataaatgcacagcccgcgtcagttacaccagcacctacccggctctcttacaaacccacagcccgcgtcagttacaccagcaccgaccgggctttcttataaatgcacagcccgcgtcagttacaccagcacctacccggctctcttacaaacccacagcccgtgtcagttacaccagcaccgaccgggctttcttataaatgcacagcccgcgtcagttacaccagcacctacccggctctcttacaaacccacagcccgtgtcagttacaccagcattgacccggctctcttataaacgcacagcccacgtcagttaagagtgagaagctttcatacctagaaccgcagtgctttgtgagtgggtcagagtgtaggataaagtctgcatggctgtggccacagaacttcgggtaggaagggtctgggggcagcgctgagtgacaggaggagacgcccctggaaggtgcatctggagctgccggagcagacaccccctggcctcttagagtgtgtgtggtagaagcacagaaatggcagtgctcacacgatgcctgtgaccacattctatggaaaatagagaataaagaccaccatctttttgaaagactgatactattattgaattactattcaaagaatagtaactattattaatattattactggggggaggcttggaggctctggcggagacccgcggagctcagactgcagagaggagtgactccaagcctgcctgagtctgtagctaagaacggagctctcccctgtgaaacatgccctcagtgtgtgggttcgcataggagcctgtgtgttgattgagattctgccactgaccagcttcggatacttcatttacctctcagtactttggttttctcatctgtaaaactggaaaaaaaaatgcatgaattccacggtttctctgggagtgaaaggaaataaaatatgggaaagtagcttgacaggatggagccgctgctgtcatgctgactagaaagtactcgcctgtctccacgtgtgcgaaagcgtgcgtgtgtgagagacagtgcatgtgcacatgcgtgaaatgatgagcagtccgtagcactcacatgttctgaaggtgagggactcagcattcgacctcaaacaaatgaaaggccccgagcccaccgctgagccagccagggttcctcgatggggagagagtgtgcaggagagggtgagggtgccctcgcggccgctgaccaggggctcctggtgtggggaaggcatgcaggggaggtctggaggcgcccctgtgtgtccttggttgatcagatgaaagggagccagcctctgatgggtgtgaggaagggttggtggaattttcagggagggacaggaagctgttccagtggacaaggtagagatggccgaggctgagggtggtggatggaggggaccagaccccaggactgcaggaggccagccgccatcagcatagggggatggggaataaggtcagataagggatgacccgaaaaaagtaatgggatctgattgtggggaggacaaaagacaaggaagcctcaagcctcaccccaaagatggacattcaggacaggctgtcgtcatggaaactgggaaacccagtggaggaaaagtaactgactctgttgcgaacgtgcttggacaagtgagcctggtttttccgcagtgtcactcagaggtgctgtctgtcttagtgctcaccatgtctggggcactactcttttgaaatggccttttcaaatgcactcttaatggtggaagtgatatttcagatttgtttcttttttaatactctaaagccatttggagacaaggacagtcaactggaggagtgatgaggttaaggtgtggagaatcacaagtgaaaaagcttagaaaacgtaagactagatttctggttttctttgggcatatttctgaagacaattccaaatgggaatttcagaaatgactgagcaaggtcgaagtaggtatatcacttcctaaagtgtgtgaatggaaacatattagggagacatatagttacatgtggcagattcatgagggttttaaaagtggtctcagtacctgacagcaccctgttgcagattatatgctaatgtgccagacttgctagaatgccagcgtgcatcccaccgcactgaccgaggacatgcggcggctccatgcagttggccacttggcagctgagggtgagtcacatggaatcctgcaccaccaatgctccgtctcagtgacagcttaccctgaacctgctccgcactgtgtcagaatgaaaagcaactgggcagggtgcggtggctcccgcctgtaattccagcactttgggaggctcaaggtgggcagaccacccgaggttgggagctcaagaacagcctggccaagatggcaaaaccctgtctttactaaaaatacaaaaaaaaattcactgggcctggtggcagacacctgtaatcccagctactggcagcagaatcatttgaacctgggtgtcggcggttggcagtgagccaggatcacgccactgcactccagcctgggtgacagagcaagactccgtctcagtaaaaagaaaaaaaagaaaagaaaagcaactggctgcttcctgaatttttgttcacattagatctaaatatgtatagacatatttgcaatataaaatcaaaaaatgtcacttgatggtgatcatttgattttccttctcagtagaatccaggtacaaaggtgagctttgtcaggctgttgctgttctttcatttaattggagcctattttcatacattaaaatatacataggcacttttcttaaagaatatgtgaacaggacatggctaagttatataattgtgaaacaaacatttacctgaattacctgaattattgttctacttttaattccaaagcaacccgaggaaaagtttccaaatattgtaatggatgtgtagtatgtaactgacaaaatatgtgaaagagattttaaacaaaaatagagatgacctggttattcttcacagaattatcttgtttcctttcatctgaacataatggcactatttagccattttcaaaaaagttagattcttgttcatgtggtaatgagtctttcttacaaacattcaatctaaggaattttagctcagttttgaaaagaatataatctagttatgaaaatacaatatatatactatactgaacatcaactattaaatacgtgccttatggcattattctgtaaataataaaatattagatctttacaaatacgttgattaaaagtaatagatcctctatactagaatctagacagtgaaaaccggattcacctctagggagactgcactgtttataagtacctgtgcttatgaacagtattttttcaaaatgctacttttaatggacaaaactaataatagtaataatgaagccttgaggctttttctattctttgaattataactttgaagtttggggaagaaaagtctaaacatcccgacatatttgtcagccaatccttcaagcagaaatgtttgctgaaacacatacttggtttataagcacgtggtttcatgtaagcatgtcaagccattggtgggatatcaagtctatctcatcattgagttcctatttttggatttcaaaagcttcagattcatcggcatatgagccagcatgagaattaataataaaagctgagttgtgttggtgatttatttttcaaaacaaaaaatgacttgcattgttctgctttaagtaaagaattcatatttttcttgaaataaagtgaaataatttgaaaaaataattttagcatttctcaattttaaaataagggcattgattttatagctatatcttacatttgcactgcttacatttgcattgcttatgttatatctaacataagcaatgtggcaaaatcttatcttaaaaatcttcccagttcatgaatttgtcctgtgggataaactctgcttccagtatgcatgggtagatggtgagggctctgccaagacccagtatgcatgggtagatggtgagggctctgctaagatccagtatgcatgggtagatggtgagggctctgccaagacccagtatgcatgagtagatggtgagggctctgccaagacccagtatgcatgagtagatggtgagggctctgccaagatccagtatgcatgggtagacagtgagggctctgcgaagacccagtatgcatgggtagatggtgagggctctgccaagatccagtatgcatgggtagacggtgagggctctgccaagatccagtatgcatgggtagacggtgagggctctgctaagacccagtatgcatgggtagacggtgagggctctgccgagatccagtatgcatgggtagacggtgagggctctactaagacccagtatgcatgggtagatggtgagggctctgccaagacccagtatgcatgggtagatggtgagggctctgccaagatccagtatgcatgggtagatggtgagggctctactaagatccagtatgcatgagtagatggtgagggctctactaagacccagtatgcatgggtagatggtgagggctctactaagatccagtatgcatgggtagatggtgagggctctactaagacccagtatgcatgggtagatggtgagggctctactaagatccagtatgcatgggtagatggtgagggctctgccaagacccagtatgcatgggtagatggtgaggaatctgccaagacacagtatgcatgggtagatggtgagggctctgccaagacccagtatgcatgggtagatggtgagggctctgccaagacccagtatgcatgggtagatggtgagggctctgccaagacccagtatgcatgggtagatggtgagggctctgccaagacccagtatgcatgggtagatggtgagggctctgccaagacccagtatgcatgggtagatggtgagggctctgccaagaaccagtatgcatgggtagatggtgagggctctgccaagacccagtatgcatgggtagacggtgagggctctgccaagacccagtatgcatgagtagacggtgagggctctgccaagacccagtatgcatgggtagacggtgagggctctgccaagacccagtatgcatgtgtagacggtgagggctctgccaagacccagtatgcatgtgtagatggtgagggctctgccaagatccagtatgcatgggtagatggtgagggctctgccaagatccagtatgcatgggtagacggtgagggctctgctaagacccagtatgcatgggtagacggtgagggctctgccaagatccagtatgcataggtagatggtgagggctctactaagacccagtatgcatgggtagatggtgagggctctactaagatccagtatgcatgggtagatggtgagggctctactaagatccagtatgcatgggtagatggtgagggctctgccaagacccagtatgcatgggtagatggtgagggctctgccaagatccagtatgcatgggtagatggtgagggctctactaagatccagtatgcatgggtagatggtgagggctctactaagacccagtatgcatgggtagatggtgagggctctactaagatccagtatgcatgagtagatggtgagggctctactaagacccagtatgcatgggtagatggtgagggctctactaagatccagtatgcatgggtagatggtgagggctctactaagatccagtatgcatgggtagatggtgagggctctgccaagacccagtgtgcatgggtagatggtgagggctctcccaagacccagtatgcatgggtagatggtgagggctctgccaagacccagtatgcatgggtagatggtgagggctctgccaagacccagtatgcatgggtagatggtgagggctcttccaagacccagtatgcatgggtagatggtgagggctctgccaagacccagtatgcatgggtagatggtgagggctctgccaagacccagtatgcatgggtagatggtgagggctctactaagatccagtatgcatgggtagatggtgagggctctgccaagacccagtatgcatgggtagatggtgagggctctactaagatccagtatgcacgggtagacggtgagggctctactaagatgcagttgtttcactgccctattgttgcaatggacttaccttcttttatgatgaataaggacttctcactagtgtctgatgctcttccaaatattgtccttgaaaaaataactactggtggttaatacatttcaactcagagtcatccatatttgtctgtggaagtgtctttgttcttaaattatctcaatgccaactactatgctttactaggaggctgacctctcaaaacatcttgttttcaaaatgcactcattgttactttaaaatgttgttttctttaaatatatgcatgaagaaatgccttatacacatacctacaatatttttaaggatctatttttatttttatattataatagtaaatactttttaaaaatggatttagaaatcaaaagtattttaaatactatttgtgtactgtaaaattataaattactgtcttagtttaaaaaacaaaattgatttagacttctgaaatcaagagtctcaggtgttttttaaatcattttctaccttaccatattattttaaattcctgaaatatgtgttttgctttataataatcatgtttcccataacagtctttctctattttgtttaaaaatacattttctttgataatttagtgcatgggatatttattctaatcacttaaatgtgtaatctataacaatttggtgttccttaaattgaaaatgagattcttatcacagaacattaggttttacacataacaaatgtgaaatgcactttaaaagaagtattggcaggatcaacaaatcatttttaaactatttatattgtgtagctattttgtaggtcttggagaattttacatatattatattttttattcatcagccaaacaaccctaacttctatatgaataatgtactcatttgtcatatataaatgatttcaatcaacatgtctctcaaaaatattttgtgtcatgtttaaaagttttctctgaaaatgttattgaaatcatgtaaattgaaatttattattaaatgaagtctaagatctcatgaccaaaaaaaaaagaaaaaagaaaaaatcctcacatcattattcattcttcaaattagctgaatctagtctcacattattgccgagacacttttctaaagtattttcaagaattagaagatacattttcctgccctggaaataaaaagggaatttaaaataaagaaaaatagaatggaaatctggcgagtaacttaccagtttctgaagcaatagactaaaagaaccagcacctcaaatacaaacgcgttcttctcatgacccccctagactctagggcttagagtgtgggtccgccttcagctttggcgaggccagttctgcagccccactgaggtcaggccgcaccttagaggaggggtggtgggaggaaggggagtgagttggaggctctcagacataaataaccgtctgccacccagaatatattgccgcaggtgcaccaaggcgtggacgaggaagtgtgctgttctgctggtgaacccgcatggaacctttcaggccctctcacgatttttaaagtgacccaaattgaactgaattggtgccacctcccacccatctttcctcaaagcactagaaagacaggtcattaaattaagatcaaatcaggaatgcggtgctttgatgttggaagtgaaacactgagacaacggaagaagggactaacgaaaagaattgtatttatttgtgtattcactgtcaggtcatgtctgtgaagaaagcaaaaccagctctctggcctgtactaggctccgccttgctctggggtcgccggccccgtggccgccccaggacccccagacggcagggtctgcgtccccctagccctgtccgaggcccagggtggccgcgtgcggtctgcgccgccgtggagactgaggggctggacacggcctggccgagggagacggctaccggccactcctggccacctcggagagctcccggccgcctgctggagaccccagcctggatgaggctccggcgatccagggcgaggagagccgcgggctggcggggaaggtggtgcgaggtcgccgcgggcggggagggtgcgccagggcccctctggcctctgcccggagccggcctggccgggagctccccgaggcgacgcgcggttccccagctgctccccggcccagacctcaggtgcgccgggcgctcgggccgggcagggccatggtgggggcgccgtcgcccgcccctgtgctccgggtcgctgggaagacccgcccactccccggtgccccaaggccctgcgaccgcagcgggagggtcggggcagcgagggcaggatgccccaatgccccagcggccgatcccggggcctgcgcgcgttccccgagcctaccccgtcgccagcgcggcgcagccagaccctagggcgctcccagcaccgcggaggtcgggcctccagtcctggaggggtttgctctgtcgccaccctagggttctgcgatcccctcccagcccccgcggggagtcccgggaacaccacgggcacacacacatcagacacgcgcgcacacacagacgcgcgcgctggccgttgctatggagaggccggttaccagccaggctgagggcagcaggtcccctcctccgagccccctcccctccccgtcccttctctccgctgtcttcccctcttcccgccccggctcccgagtcctcctcccgccgtctccggccccccgccccccagcgccacctcccctcccctcctctgtctctgcccagggccgggcctggggtcgccctggagcctggctggggacgccgaggcaccggaggagggtggcggggagggacaggaaccgctaccactcgactctttgcccgagaaggtccctgggagggcatcccgggcgctgggggaacccgagtaccgcttctctctgacctgcccgccgccgcgccgcccccgagccagggtgcgggggtttttgcgggccttgccctgggcaggggggacgagagggccaaggtgatgtaccccgtccccgcctactggaggggttcactcatgggcagaggacgccagtgacgccgcagtttctcgcctctcgcgcccccgccgagccgcaccgggcctcctgcagcccgctcaggcctgcgggaaccatggcccgatgcgaggccacttctttgccctggagctttatgaagcgctctggccttgccctataaatacaaaaataaatgcggaactcagcctgggcctgcagtcagaggaaacggggtccttcggccacttttagacaggggcctgcagcggacggcaccgtactcatatctgtggacaacccccgcctctgagccctgccccctggggctcgcccccaggttttacagaactaggtttgtgagagaaaagcgccaggcaaggccctctgcaccgagcaggtctaggggcagcgccagagtgcaagggaggggaggggagactgtggaagcgccgcctgggcctggcctggggaggtggggggtgtggaggagttggccccggaggggccgggagcgggcgccgcgggcagccgggtgtgcggcgggaggggcgtcgagtggcgcgggccgccgtctccagctgtcccgggcgcagggaacaatggccaggcggtgggagaggggggcctaggagggggccgctggggtttccagaaaaggagaaactaaagagccctccgcagactgtcatctgcgtgtgacaagatctgcgcccccctcttcctttcttctccttgttcctgcagctgtgggcctcggagagcgcattgtacacacagatgttgggtttcagctctccggctctcgccagctccgcgggggcgccgcgcaccggggtgccccaacctgtggctgtggcccggggtccagggcctggggagagagagcatgggcgggaggcgcgggggggaggtgctcagtggtcctagtcgccccgagaccctagctcttctcgcccgctgcgggcctgactgcgccaggggccgggggttatgtgggcaggctcgaacgactgggagcgtggcctgtgattctgctccactcctttcgcccgcagagcggtggtctaggccagaccattgacctgggtagggggaagggcaaggacgcagctcgcacgcctgggttttcaccgccgtctcccttcggcgttttgggctggcggccgacattggcctggaccaaatggtggcaaagtctcaccagttccgcgtctcgcaagacactttctacgcgcatcgggacctaaacactcgggaggaccctggtaaagtgagcagaggggctctcgtctactcgccctgaatcattggcctgcttccatttggaaagggagcaaaaaggcccgaacggcaacactggaaaaggtaactgggaagaacgatatgccgtgcaattttctcttgccaagagtggcgacgcaccccacccacccctcccaggacaaaggtcacagcagagccgcgcgccttgacttttctggccgaggtctctctcccctcggtgctaccctgaacttgcccagtatgaacgatgaaagggagaaacactgaaaagaaagaaaaggcgaaggccctggcttcggcgttgtaccaatgactgacaaagctgatgtccattcatagtctcgggcgggagagggtgtttggagagccgcggccccttagccaattgctgtcagcaacatgtggggggggggggggacatcgctatagcaaccggtggctgggccgcgagccgcgccgccgccggccgggtgcgcgccgggccggatataaggcggggcgcggcggccgcgctggttggtgctacgcgcgcggccggcggccctaccgggaccgtccggagcccgccctgagcccgcccgcgccgcgccccggcccagcgtgcctagcccgggggccgggccggggcggagcacgcggagctgggccgagcggccgcgcagagctccggcgcctgcgggctccgagcccgtgccgccgcgcagccgctgctgctggagcagcgacgcgcggcacctttgtctcctccggccgccctagaagtttgtggtcagaagcggatgaccccgctagtctgtggctccagcgcagggaagcagctggctgtgatgatggcgctgccgctacccgcagctgctgcgccccgaggccgctcggcccggcgcacgcccccacctcctcccgcgcgggcgctgggcgccggcccagctgcaggtaaccaggggtgccgggcggggcgcgggcgctcgtagtgcggttgggtgggccctggaagaggcgagagaggctgggatgggggcggagggagcaggaagggcccacgagagcatcaccaggcgcgtaggtggtggggcgaggaagagagctttcgaaggctggagggcgcgcatgggggctctaacgggcaactagggcgtcggagagctcagttcagggggtctctgcctcgccgcaggactcctgtcaaaggcttgggccggcaggggagagctgcgcctgggatcatccccaagtgggtctagggtgggcctgtgaggaggagcgggcaaagggcagctccttctgagcgcacagatttggagggttggcagctgtcctggcccagcgccccgcagagaccgccccaaggagtctaggacctccgggacttctccccagcgctcttctctcggcctttcgcgttgctccccactccctgcagttccgaccattgcagggtgctgggggtgggggggtgcaggcacggagatgggaggcgtgtgggaaaggaggagggaaggggcgagcagccaggatggagaggcgccagtgtgggcgcattttcctctcagcccattttggggcgctcttcaccctcctcaccagggtccgggagcgcgcctccgagccatgggagtatcccagcgggcggcgaattgcagggaaccgagggggcctgcagggagaggcgttccagaggcaggtggggacgcctctgagaggccatctctcctcccccaaagagaactgcgctttctcagcgcctcccccaccccaggtgaggcggccgcgtgctcgccagagagaaacttgtgactggacccgaagctgttggaacgagggacttcatttccttccttcgtaactacctgtgcagttccgaacactggcctgctccgtggttttagagaagcgttgctccagggaatcgggcgaacccccaagttagagttaaaatctcagcacaattgccttttagggccggagagagtctcccgccctttttggtcctcagtgcgctgagctgggcgctgcgggctggacggctgggagaggggccccgccacagccctgaggacgacgcggttcaagtcaccgacctccgtcctcggacagcggccccggggtcccggacgtggtcccgccccccgagctgcgcgtcccggccggcaccgtggagccacccgcctggagtccggagcgcagggtgtccgaggggtcttcgccaaaccaggctgtccttgcgtcgccgatcccagattttaggacgcgatcgaacaagagaggaagtgaaggtttgtgcggaggagggagctggaagctcttcctttcaccgacacagaggaaagtgccctcccgccccctcccaagcacacccctctgcgctccagagaagacggcggcggtggcggctgcgccgcccgggggctgcgagcgccgggattcacgggtggacgcgggcgtggttggggaccttggtcctccctcgcggccggcgcgctctgtggccaggaggctgggccgcagcaccctccgcgccgggacccctctcctggctctgaatacccgcggctcccgggaacccttggcctttgtgtccggcgctggggcctgatctttatgactcctgtggggatgcggtgaaccggcgaggggggagggacggggaagcgggggagaaagcccaggcaggggacggggccgaacgctgaccctcctttccctcgccctctgctcaaagtcgtgccacagaggggttctgacaagcgacgctaggcgggtcttgggttggggcttctgagtccgggtagaggaggcgaagcggtaacccccccagtcctgaagagggtctggttcttgcggggtggggaggccaggccccgtcccgagaagcacctggtgtggaaggcgcgcgtgcgtccaggcaggcctggggaccaggcgggcgggccaaaaataggggtcaggagccggtgccttaagtgtgatccgctgagtctgagtttgggtgtcatgaaaacgccagcggagagtctgaaagaggctgggggcggctttctcaggggcatccttcccctgctcagcctctgggtccctctctcccaccggaggcaatctgctggttagaattagtttgcacaagggtgcttccccctttggacatcagtatcataaatcttccctgatgtcttaaaacacagtatttctttaaaactgatgttttaggagtgcttaaagatggcaaatagacaatttattgcctttcttgtatattcacttttaagtgtatgcctggaaaaactcaacaaatagcccattttaaaacagtatatcccaacttattttcattaaagtttacatttaagaataatttttccttgaagattcttttcttttgcttttttgggttttttggccacttgaatggcagatttgcaagtacaatttcatctgcacggaggaacaatagctttcagttgcacaaagggcttctcccaccctgaattcagaccgcagtgcctcttgctctgataatagcttctgaaaagattttgtaatgcagagaattaatacatgattatttccgcctgacttctctcatttattagaattctgtggcaaattccaaattaaaagtagttccgttaacagctttaaaaaatacttttaaaatattttaagacaccccttcccccgtgttttcaagttggatcacttgctatggcctgaaaacttaaaatgttcatcagccctaaagtgagtattatattttagtaatgccttttagtaaatttagaatgaaatttcctaataattctaagaggattcatccagcaaaccaaagataaacttgttacagcaactcattaatggtctctaaaactgacttctaagttttaagagaaaaaggtatttataatttagtaatttaaatgcacacaaagataggatgaggctgggactgaaatctgattccttagaaatgatacaaatgaaagcatcaacaatgttagaagtttaacattaactggcaccgagcacctgtatccctacgtctttatgatgcaagcatattttaatactgcacatcgtgactcagagaatgaactgctcctgttaactggttatatcacacaaccttggaaaaggactaaatctggctacccgtcaacacatatttaccataaagttttgtatttgtgtggctgtatcagctctcacaattgagtttgggcataacatgtccttttttcttttcttttaagcttaccacatggacagctaaaaaagttctgaaggcattttcccgtaaatggctcacaagggcatggggtggaagcctcatgcacctccactcaggggcacggtcaaaataatttaaattggtcaggacagtgtctgcagatgctaagttctaagacagctccacaaattgtctctgtggtcatacacttattttgaatcacaacttttgcaatactgtctattctaaatttgaggagttgcaggtgcagacggttgagaggaagaaatatgcgatattgtacttcatcttattctcaagatagatctaacctgggataaaattaacttaatcattcctgattatttttttaaattatactattcctgcctctgagaactcagcactgaagtgtgcctatctgtgcatctcccccacccgggacgcacccctgccgctgtgttaccaggcctccttctccctcctcctcctcctcacttcttctctgttccaaactttcagtcattgagctgccgctgtacagaagggggtgttccgcttttcaaaaacgcctgactgtaaatgtcaaagtcataaatatttaaacataattttctttcaatttcaagtcaagactgataagatgcctctaattagtctgggctctctttggggtccacccgccgtggtgcagccttggggggtcggtgcccatgggggagatggcgctgaggaccaccaaagccacacctgggtcaagactgtgcctcaaactcacttttaaactcatttctttctcttaaaggccatggctagcaggagtttgaagattttttttaactccacaaaaagggagtcaagtcattgtaaagttattggaactcaatcacttagaaaaaaattctttaaatcttcgtttcttccgggattcctaagacctgacttgcagccaacagtttttccctccgcatcaccctcctgctcagcgctgggtgggacacttgaaaccgtcctgggcgtggagggaagacctctttcttcggtttcttctgcggcgcccgcgggcgggtaggaagcgggtttcccagccgggccctgggatccagcgacttctgtgtcaggccggtggaccccagtcggtccctctgtccagcgtcccgcccttccctgcagtaagaccctcctcgccctcagccccggcgctgcccgcggtcacgactccccggctgtccaggtcccgcggccccgcgcggtcgccctccgggcctcccccggcctctcccaggttgcaggaggggcctccttgtggaccggcgcggggaggtgggcctggggcggctcccacccctcctctgctgggacagcgcgggcctaggcagcagggagccgggcgaggttggtggagacaggactccagggcactggggctccttgcttcccctccggggactcctgggacccagcggggacccgggaggagagccaggagctctccaggcaatcgctctccttgacatttttctttgacctttgagtaaatccaagcgcgccaagggaggcctccaaagcaggcccggttccgctcccgcgcgtgcggagcgtgtcgagggtcccggcgacagcaggtgtctgcctccctgggaacagcctcggctggccccgggtccctcctgccgcccgcagaccaggcctcctcctccggcccccgcgcgtcccctgccctcacctggcccgagtgaccgcgggcagcgcctgtgccccttcctcggggagccggagccggcggtcgccctgcgcctcggaaccccacacacccgcgcgcacagcctgggtgccactgccgggtccgccacacgccgtggccccgccgccccctcagaaccagggtggtcaccgcgcgcgtgtgggcctcacggcgcggggcaggaaggttcgggaagtccctgttcccgggcgcagtcatccacgtgagcgcgcggtgtcctcccgacgccggggcagcggggccggggtcgcctccgcgctggggcggatggaggcgcgcgggggccatcggcccggccgggatgaggggtgggagggcggcgggcgccccctccgccggtcgcgccgcttcctttgttgttcttgttccgtcggccaaggccaggcgggacccgcgggaggcgagaggcgaggggcgaggggcggcgaggggcgcaggccgggcccccgggaaaagccctcccgcccaggtatggctccgggggacgcggccccgcaggcgaacatggaccctggggtgggcagaggacccggcccctgtcccggcgccgcttggacccacacgcctctcgcatccggggtcgcggccgctcctccccgcctggggccccccgcgcgctctagggtccctcgcgccggcccaggagggcacagggcggggctgccgcccacccgggagaaccagcgcccgcgcggggaccgaggagaccccggcccgggggaggtggcgcgtggccggcgccttaggtttcgtgaacgggctgtgcccggggaggggcggggaggggcgcgcaggagacccggtgggcggaccccggcggactctggggctgggtcgcgcggctctagagtgacttctttctggaagaggctgtgtgggccggagggaggggggcggaggggaggggaggggaggagaccggggagggggcgcggaccggatctccacgcgaagggcgacccggcggcgagacccagcggtggctgcggggtccggaccaaacggggttcgggccgctcccctggttcccgcccctcctccctctcccggctccctgctcactcccctcccccaccccgcgcctcctctccctctcccccctttccctctccctccccctttccttccctccctctccaaagcctccctccctctccgcggcggctccaccgcctcccgccgctggagaacctcgcggtcctcctccgagccgcgcatccaggcaggaaaatccgggcgtcttttctcatttaacccgcgtttccattaactcagtcccggcaccagctaatccgctgcaccgaaggcaaaaggaggctaattaatgaccagcttttccagtcaagaccggcgataattgctttggtggcctttatgattacaagataaaaacgggcccggcctgacataagaggcactgtgtacgctgggagacgggaggaaatgaagagttgggaggctgaatacggagcagaaaattactaatagaagagagataatgaataggccggccaggcattcatggggaaaaatccattttgttaccacgcgaaattaggtggtggaaaggggtttgctaattgttctcatcttgtagcagccaggaccaaggccgggcgtgctcccccattcactccccgagtcattgtgcagggcgcgcggtctgcggggcggccttcccattttcctgtggcgtccttaattgttgctaatataccttctaatgaagttaatgaggggagagccgtgcaactatttgcacgtggagacaagtgaaatgcaccgaaagggctttctcatattttcaccagccctacccccgccctccaagaagcagtgagaatctgaagggttttcctcgctgagaagtgaagttccaaaggctctgcagctcctttcaaggaaaaatacgtaggtgcataggtggcaagtgttgtggtctgcaccaggccactcctggagagtgactggagtcaggtgggattcgaccagcgctcgcctttcaagacaggtggatccaaatcccctgacctgggagggagaatgttctgtgaagatgcacagagccagtcccacgttcctttgttgctgaagatgtgctggacttggtggctacttgaagctgcagaaggctccgggcctgcccaccctcctccaccgccaagcctggcctccccccagcacccccgacaatcattgtgcaagctctggacaaactgctgtgcccggttagaagaagggatggatactttacttaaggcagcaaattagctgccaaatacgttacataaatttgaaaaacagccaccactgaaggaaaaagtgatgcctctgactgtcctcttgagcacgctgcaatctgcgatgtgctattttcaaatgatttctgcttctcctttgacgggggttgttccgcagggccctcccgttgtggctccagggccagcacagcgtcctgtggggctgagctttccactttcaagttgcatttggagacgtgtgtttttaggaggtcatgctttgtcaggagctaacacacccctctctccttgttctgcagaaaagcaaactcaagttcctgcctcctcaggcggagcaagaagactccaccaagttcatcgcgctcaccctggtctccctcgcctgcatcctgggcgtcctcctggcctctggcctcatctactgcctccgccatagctctcagcacaggctgaaggagaagctctcgggactagggggcgacccaggtgcagatgccactgccgcctaccaggtaagaggagactttttaaaaagtggtatatcggatttatctgttgaacaggcagatgatggcgttcctctctggcccctcctccattcccagcagttgttcctgtatcatagtttggggtcttttatgaggacagtttggaacttctcatcagcattcgtgcaaatacgttgcagccacagttgtgcagctctgtatccgtctgctcttcttggatagcctcgtgttaactctggaagaatgttgttaattagaagtgtggaaaaagtacagtacatgaatgatgtattatctgttatcttagtttggccactactactgaaaagtgccagagttgcgagatcatttggcgtgtaggtgtttgaagatgtctcaaaaatcatcggcttcctcggggtcttctgtgaaaagatcctttgacctgcccagttgccaccctgtgctgttgtccggtccagtgaagcctaacgctgaccaggggaaggtgacccacacgcgtccccatgagggacaccttctctagaggcaccacagacacccctggaaatgagctggaaaccggggaggatgcgaggaaggcaagttcagaccaagtcgggcatttttaaaaaaccacagagtttctggaagttctatggcgcacatttcgtatttagtattgtcctgtaatgaacataggccttcggttttaacagcagcataagcccagaatacttacaccagtcaaggcgtttgattcctttgcatataaaatatcatttaattccgagaagatattcccatctgggaaggtaggatgactccttaaccactgttttaaaagtttggtcagtacatgtgtaagatttcctcattggactggatcctttgttttctctagtcacatgattacagtgtgcaatacgtcttgtaaataattcatcatttttacagtcgtatgtaaagtaaatattattattccatcatcagagttacatgggtgggctctcaagctctctccacaaagcgccctccagcaccataccctcctgctgcctgagctccttggagctagcttttctatactctgtgagctctcaggaccctcccccacataaggaatttacacaatctctatgcttaaaagagattgaccacaagacagcttttcctcccatttcaaaattcctggtattgccattgaatggaggaagcctccagttttctggagagggtcaccagcccggtcaggacgatctttttcttacaaagaaatggcaacttcaaatgtgttgaggctggcatttcagttgcagtgcatagctttgcttcaaagcaaaaggaaaatcacgtttgaagaagcagcctgaaaaaaatgtcacataaactagtaagaatttatccagaaattccattgagcaagaccttcaatgtaggatgccaggtcttcaggccaagtctgtgtcagtacataaataaattatcacaccagttctgttccatgcgtgagagacggaagatcatacaggcagagatttttagaaagcgtggcgccctttgatatactttgaaattcaaatataaaatattgatagaatggaaaggttggacttgcatgcagaaatgactaatttgaaaaaaaaactgcaggttgaaaatgcatacttaggactgagtttgtgataattaacagaaaaaaaaaagccttcccagtgacagctctaattaatagtatctgtaattaaaatcatgcccttccagcaggaaaattgtttgaatttcttggagtgacctttttgctgttcctcctgagggcatggtggttaagttgatattgattttataatgagctccggtttgtttaataagaatctgtaatccagacaataaatgaaatgtgtgcttttcttcaatccagattaataaaaaggaaaaaaaactttttttctttaaaaatgtgatctaggaaaatttggaaatgaaatgagtgtaaagactttctggttggtttagctttgaaatcaccacaaaatgccctttagggaagtactttgattaaagtgggggtttgccccatcacggtggattgtttcccggtgagaaagttctaggtgccgaaccattgtgttgttgtgatttgtgttttggcggagcaggacgcagtagtgaggatgggactgtatgattgttcactttgaagttagctgagtaacgtgtcaaggactcagacaattgcggttacaaggaaaggatatttactttggtaaatgaagcaggtattaattcattaacgtatccatatctcacttgggttttctatcacagccatgagtcccctgtgaagtgtaaaaatctgtttgaaaagttttttaaaatattgcaaacataaaacaaatttcaggaaaggtgtcttctcgcattaatgtatttatttctggctcactgaacctgtgtactttgctgattctataatcacagtgaggttgtggatgataactctcatcactgggttacaaggaaaatggaacaatttgatcttatgctttatttcatggggacatgctggaactactcaattcattgtcttaaagcttctgaaaaataaaaagattattgtgcaaggtaggtgagaggtaggtaacctcggagagagagaatggtaggtggcaatatcataagttttattaatatcagaatatgaagttacactttaaacaaaagaacttgtgttcttacctggggaaaggaaggtcaggagcagaggtgttctgatggagtggaggagacgggtgcgtggaggtggtatcctggggggcactggtggcctcagggtgtagagctgcgtcctccctggggttccaaaaggtgaatcctcatgtcctctgttaaacagcagctgggttagtgtcctggcaaggcacttcccgcgtgacctggggggccctcatgttgccaacctctgctaaagcatttgtccgcctcagccctgataatgcacgcacatcattagtgcttgtacagaaccccccagccccgacccctgtgtgtgtgagtcagagcctgggcttgggaccacagggggcccacgttgtgctcctggggagtaagagagcttttcttaaaatagttttgaagcagtaaggagattgaattactagcttctaatgcaaacaccttcaaacatgtttacctgtttttcctcaaaatagaactatttcatggacagggtcaggatgttagagctttcttcatttacatgagtgtgatatttttgtttgccttacctattggaaaagcaaatcttttttgacagactctcatatttttgacacttaccaggatatcaaccccatcagataatccagccaagtttaatttgctcagactggagcaaaaattgggtgtattaactttcagaataactgaaatatattcttaaaggtcatttgtttaacagactactcgcaccaaacttctccccattgttttagtaaatgttgttttttcttctaaatagataaaacatgatatatttggattaattctgtacttcatgatgtaaaaatccaattttattgacttttattcttttttttcaaattggcatagcctgtcatatatgcatatatgtgtgtatatatatatttatacacacatgtacacacacacacactaaggataatgtgaagacatggaagaattgtgatttttggtaccagtatactttatgcattcttttttcatgtaggtgtcctatttctatggaaggtgattgggtaaaaactgtgccaaaaataagttgttagatgattagaagacattctcctccttttctctcggagtctctttgaatgttgcatccatttccttgaggctttgatcatctttgagcagcaagtttagtattctgccagcccactctcccttccccgacatgagggcagagactcctgcagaattttcagcaagttctcttttgatggtttatttcacaatacccagcaggtttccttgtgtacttggaggcctttggaaccaaacccagaggaaagcatgcatccgggccacggggacctcctgtaaacacagcggctaagtgcacgtctcggtcgctgctgctgctcccattagcaagtgattacaaaggcagtgacagtgtggtggcaattgctgcgatctgagggtgctcagttgactggggctggcgtgtctgcaagtcccaaatgcaccctgacttcttacccccggtgcagaaagctgagttctgacaaagagcacaggtcacgccttggttcattctctggggctttaagagaccgttctttctctaggtgagtttaatcttcaggcattggtgtaatcacgagtaatagaagtaggatgttcacaattaaattggaaaacagtgacttttactgaggtttacttgaccccaccagaagtttttaacaaagccttttcaatcagctctgtatcttagaatggctttcctcactatatatttaaatttccaggtcaaaataatatattttttgcaaaactcaaataagcaaaacctatgctgcttcaaaaatgaagggcaccctgtgaaaactgtgccaaatagtttacaagtataaaaatacaacattaaagatcatttgttatgaaataattatgattagagaacattttattgtaaagtcaagcctgaaaatggaaatttttctaattttataatcctttccaaatgtagctgatagtacagatgtctacagtagaattctcttgaaactttcgagacgtggattcggttttgcagattgtccgggaacagactccaggccccgggagggcaaggccgtgcctccctcctcccatactccatggcggcacagaacttccctggactaactaggaatcagcaaatgctaaatggttgtcacgctggtgccaaatcccatggtttctgatgtgaaggaaatcggaaggaaacctgcagaatttagccaggatgatgagggtaaagggtacgtgtcgtccccagtgtgggaagaacctgtttttgtttgcctgtgtgttcagtatagatcatcagtatgtggggtcagccggcttggtttctgcaggctccatggaatcttctagataccttttcaccatgagtctgaacgtttttctggaaagtgcccctttgaagtgcatttttctcataaatctgaagtgttcacagatgcagtttccaaaagcagtgtacatcctgccgttttgcccaaaatgcttcctcagatacagctcctgagagatagagctcgatcttcagagaacaatgaagtctcgaaaggtggccagagaaacctctaaacataaaacagaagcatgctgctcgttggggtacagcaagccactccccccatcagacagtagtcattagatcagacttaattaaaatcacagagaccacgcagtgagatatttggaaataaaaaaaaaattggaaagtctgagacataaaatgtggagggctgaattctgtggcttcattttggcactaggccattcctatgtttgccttgaccttggtagcttttcacacctgggtatgactcgaataactgcttcctaaggaagccacttcctgctacacacaaggaggggcgcaggaaaggaggtgggggctgcaggcttcttccagacgtgctcaccctgcactccagcagccaaggaagagggctgggccccgggaggaggatgggtgctcacacagcaccaggggaggggcggtgtgcgtggtgtctgtggagcgggtgctgcttcccttaggcttgtgttgtgtaccagtccgcctcacacatttctctgccagaaccagagaacacttccttctcgtcaaagccagggtcgctcctggggtgacccctgcatgcacagcaggtccttccgagcccctgttcctaggcaccccctgtcctcatcagtcacccaccccgtggaaagggaccctgtggaaagggacccaggacaccttccccaggcatctcattatctcccaaccctgttttacaagggggcaaagtcagcagcagataaactgagaggcgccccagcccacagggccagtggcagagctgcactgggcggtccccagctgcgctgtccccactgcagggtgttgaggggctggcccgggcttttctgtcccgtgggtctggacagctcctccaccatcttccctcgtagtgtgaggcactgtgggagatttgggaaaaggtgacatcctttcttttctcggttgatgatttcttggagatgaggagtttgcaatgaaagtgaaccggcggtaaacagcattagtccacgcatcactaggaggtgattcgtgtgaaactgaaatcaaatccttggagatgacagaggaggggctgggccaggtggtgggtggagctcttggcggctggcgggagatggaggcgtggctggggcaggtgctggagccatctgcagggtagggacagacccaagagggtgggcatttgcagggctgccaggaggaactgggctagagggaagaggtcctcccagtcaggccaagagtttagacagggagctggggtgtcgtggaaaggactcggctgcaagttgtgtgccggcccagagaggtcagctctttgagttcgtgacaaggacaaaccctgcagtctgtggcgctccaagggacggtccatggctcggtgtggctgagtgaccccaagaggatcagaagaggcacattctgcctgctttcacccccctccgtttcttccttcttatcttattcccctcttgccacacttttcatcttttaactttttctccaatggtgaaattcatggaagaaaggtgccattgcccttccattccctggggtgcgaggcccagcccctccctcccgaaggccgccttcctcatctatgaactggggcctcctcttgggccgccatgcggatgagggcagccctgtgggtgcgggtgccacgtcagctctgaagcgctgcccgagggtgacttgcccggtctgcagcgactgtcagtgcccgcggggctgggatgggtgttggattcctgcctgctcctcccgtttccagggtacccgtttccgcacacttcctcctcggcatgagctgctcccctcccttagacctgattagagaggcgggacacattttctgaactaaaactgaggacattggtgtctgcaaagcatgcacttccagagaagaaaacagaagcaaagccctgaaacctgggctgctctgcagaattcaagacacttgatggaaggtgttcggagaaggcgcccgggtgagccaacacccgggtgagcccctgtgtggtccggggccctggggggtaaggtcaggtcttggtgcaggtgcagcctcgggcatctgtgctctgaacacctcacctcccagcccaaggggcttcagggctcacatcgaggtgagggctcggcaggagggaagccctggtcaggtgggcccagctcagcgggaaccctgctgcccatggcgggaggcaggctctccgaaggacgcgagccgctgtgaaataaagtgggtgttgggaggagacacttgagggagtaaagggaagtgtaaaaaagtggattaaactgggatttcaaaagaaacagtaggcggtggggaggagattccagcaggcgggtaccaggaggtaggagtgggtgtgagcaagaggcaagtcccacccaaggggcgctgtgcttgaaggctgggtctccccactccctgcctgtagcctctgctctcccggctccccttggggccaccgtccctcgggaggagggcatcgttgttggcaaggagaagaagcctcgggtagctcctggagcctcccccacccagaactgtgcagacccccccggcaggaggagctcggcgtgggaggagacgcccggcagggccggaatctccaggtgacagcctcgtgcacacgacagggtgggactccacaggcgtgtacagaggtacctgcgcggggcctcaccttggggccgagggtcctcaggccgttgctgtaaagcagaccttcttctcagcctctgccttgatgggcacgagagagaatgcgcctctgtggtgaatggcattatctgtggtgaaatgcattagcctgtcaaaaatggcaaagcccagctcttaacacaacacgtacaccggcataaaaggaggcaagacgctgcgcggggtggtgggatgaggaatgatggctggagccgccacggcatgcaggagctgggtgttacaagaggagaaagcttcgggaaaagcaattgcacgtcaaaccgaggaggacccagcagatgaaagtcatttccaaatgtcaaacggggatcacttcgaggacgtggataaggaaggctgatctgccggccgcctccagcaggagtccccccaccctcgcctcctggggaggcctccacaggacaagtccctcgccgcctggctgtctcttctctcccaggcccaagtccccttcggcccggagctctccatggctctctgctctgtgagccccgcctcctccttccctcccctgctgtgttgggggttcattttgccatggctgacacgtgggggtccccagagctgtgattggtgttggcccgagggtcacccctaaggattggacaccttgggtctgggtgggcagacagccttggaacctcgggatagctgaacttggagctgacccagaaggcgttttctcagaaagcttatcgcttctaagggtagaatcccatattctggaacaacggggacagcagagaacttgatcttacatcagagtcggcccagtctgcctttgtgaaggactccccagtgtgaacccggaaacagacaacactgtgaccctaggggagccctgggtgccgggtggggcgggcatggggctcagagaacgcggggagccctgggtgccgcgtggggttcagagtacgtgagaacagaacgtgggagaggaagaaaaaggcaacggcagagggggcctctgtggggcgggagaggagcatggaagggcctgagctcagagagagaggggccaggacagagggggcctctgtggggcgggagaggagcatggaagggcctgagctcagagagagaggggccaggatgcacaagggaaatggaggggcttccaggggcagacagctagctactcctctcccattttttcaggtttatgtggacgtgaggtgggcagagtcaggcatttctgcaggtgtctgaacagcggcttttcctgttccatgggggctgcagaatagtgctcccttcttcatccagccagctgttctgaaactttgttgctcaaaatgtaacgtctccgtggcttttctgctttgggagaattactgatggttaagaatgaaatcttgggactggcacaggggctcacctgtaatcccagcactttgggaggccgaggcaggcagatcacctgaggtcaggaatttgagaccagcctggccaacatggcgaaaccccgtctctattaaaaatacaaaaattagccaggtgtggtggcgtgcacgtgtcatcccagctactcgggaggctgaggcaggaaaattgcttgaacctgggaggcagacgttgcggtgagccgaaatcaaaacttcatctcaaaaaaaaaggatggaacctgggtatgttatttctctattagcaagtacaagagactcactagaaaggtggcaggtgtgaacaagcaccctttcaagattttttaatgtacaggataataatgcagccccagaattgagtgtctgggtctgtgctagtgtgcgcctccaggtacagtgacttgaagaacagatgggaagattcgcagacgattacattagccagtaaagctacatgttttaaaatacataattcactacagagtttgtggaatgtggatttgatatacaggtttaaacttggattgatcttatgccatttaatagctaatcaattaaaagagtttacaagtgataagtgctgggactattctcacattgatgtataactggactgagtacctctgaggagagcggaagctggatttgccctctgggtaggcgtttcgtcgctttcagcttttttggtgaagacgatgatgcaggagagtggacaataacgcaatcttcctggaatggcctttcccgacctggaatcacctttcctggcctgtaaaacgcaccctgaaaccagagatcggatgttcctgagtgggaggaaatacaatgcagattttttttgcaaaacaaaatactaaattggatggaaactggagctggtgtgtgagtttcagaattatttctgtccccatcccagggatttcttattctctaccagattcaaggagaacaaatatacaaattgttaagtgagccccaaacgtgaagctgaaatgtgaaggggaaagtctagaaaacgtgtctgattcttctgagggtggatttccaggctccccttcctcgccccgggcatgcgtctgtcttgctcaggccttcccgttcccagtgggcccctcgcttctccagggggggttttcagacacatcttgagatttcaaatcaaccccaagtgaggcggcagagctgacaccccacgtgcgacccgtggcccctgtaccccagtcagcggtgtcctcgggccggctgctcccagcaccctctgcaaagttcactccccaaaaaccctcacactccctccacgactcgctcacgggttttcctccagggctgctgccccacccgtccccttcttggggtacagcgtagacttttagaaactccccgtacagaccttagggctcagcacccttcggtcagagctgagacctctgagaccgggattcccagcaggcccccagaccctggccttcgggggtctggtaggaagaagctcttcagggcgtccttcaggccttgtgcagttcaggtgtcactcagatcagttttaggtagaataattgggccccagaacgacgtgcagttccgaaaatggagaagcagctgctccagtagccgctccgcccccagcccgcatgcccctgcccttcctttggcttaattaagctgtggtggccaccgaatggaaggatgtgaataccttttgtgtccctgggctgggctcctctgcttctgagcctttgtttgcccggctccctccgttgcaccgccccccctcccactttatccctgcagaccctcccatctgtccagccctgtgcagacccccgtcccctgagcttccatctcagcccggggtggcccgtcccatcccgaacaccagggccctattcatccctacctcccctttatcccttctgccgcctctgcggtgacgtctcgtcaccatccctccagtgtagggtgacttcctcattgtgttggatggaggcaggcctgggtgcagagcgggccttgttgcccacaccagaccagcccgtgtggggacagccttggcttcccaaaggccaggtctgtccaatagacccacagcacccaccggggacctttacatgctcgataagaatgaatcgatacattgaactaagatcttgatgtggtaagagcaggtctgtgggcaggggacggggggcgggggagcatgtaaaccctcttggaaaccatcctgtgcaattctcaggtccagagtcctgcccgcccatggggagtcctccctacgcgctgcaggctgaagatgcgggtgatgacagggatggcacatgaaaatcagcccttattctgagcaaaaagaaaattaggaaggtgcaaaagtttcttgtaaaaaaaacagctgcccgttctctacttccacgtcaggcctgggctgctctgaaggcggatgacttgtttcttactgactggctattttaaattgtctgactatgaaactgaaaagcaaggttcagcctgtggggcctctcaaggctggctttgctcacagaggtcgtgttggatctgtgaactttgaaggcaccactgacttttttggaagcccttagaacttaattgcccggtgagtcatcctccgtgggagccgggaagggagggatttgtctcaccaacggcagtctggctggaggggctttgctgcggtgtgactggggtctcccatgacaacgggaagggttgcaggcatcgtgggttaaaggtgctccctctcacatctaagatgccacctttatggaagcattaaagaccatcacagaagccggtcttagacatgggctgttccagagagaagatgctcattaaaattctgtgtttccttccaatgtctttattttcacaactgtttcctggtttcaatctgatgttatcaggagcagagcaaatgaagaaaatgaatgtctttagtcttaggggagaggcagtccctaagaaaaagggaggcaggaggtcgggtttcagcacgtcggtcactctcggatgcagctgaccgcgggtcccgtgagcccgtacgtgccttctgtgcttcacgtggagcacctgcgtttcccagccacccaccaggggcttcaggagattcaaacacagccctcacctccccagagcaggaagccgcagctgtcggccggcgggggctcgatgcagctgctccagccgtgccccttgctgctcccccagggctgccttggtgtgggacactcggtccctgagcgagccgtgatctggaggccagggatgctgaccagtgtgcaggggctcagcgagggcccctctgcaccacgtagatgctgtgggtacagaaagcagacagaaggacttctgctcttgagtgtgggaggcaggggtatggacgtgaaaataactaggaaacagcacacgcctggatgcccggagcccggcctcgaggttgtgtggggactcgagaaagggctggtgctctgggcgccgcagggatgggggctgagcgagcggagaggccgcttttttcctactgatcttaggctgttccaagactgttccacatttagaagagtgttgaaaattatttttcacttacatgaaacatgtctatatctttaatttttgttttgagaaaacatcttgcgaaatgggaagaactcactccatattgcttggccaacatcgctcatcgtgggctgactcggcttgtttgcccgtgcgtggaaccccttcctgcaggagctgtgcttacagcccctgactgggtgtcgtcgtgtgtcaggagcggggaggggcctgcagagctctgtggccctggcttgggcgctgctgtcaggggcatcctcccctgggtgtgtgtgtgtgtgcgcgtgcaaacacgtgtgtgggttgttcttggtccaagtgtaaaagttacctggacaccaaggagaagccactggaggcggtgggactgtgtcaccagagcagcgttggccacgtgggccatgagccgaggacgtccccggcttagatcacggacaggctcggctgccggggccctgactccgtggcagaagaagggaggctcccctggcattcaggggcggccgtgggccatttgctctccagaagtgagcgtggccctgtgttccctgaggtctcacagggctgccccagatgcacccagaccccggagcaccttgtagcggtgccgatcagagacctagcatggtggagtgtttgtgtaaagtcgctctcctcaacgaaatcattggttactgctcctctgctcccagctggccttgctggcctagcatgtgaggcggttccttctgagtccctctgagttttatgatgaaataaaatcaagtaaaactgtgtcatgatcggggagaggtgattatacaagaaacctttttttctttttttccccactatgacacatgaccccgtttaacaacctggaatatttttccccggccttttccctgcacacgctttctcaacatttcaccttcctgtttagatttcctgtcgtcacgtgccctgcagcctcagtgtcaaactgacagagcgcaggctttttccttaaccgttttacattcgagccacctgtggttgcaccgggccccgcggcttctgctgtgtgttgccctctgagctgaaggccagggccctccccaaacagagccggttcccgttcaccacgttctcttggtgccacgtccagtctggagagtggcctttattcctccccagcagagcccagtgaacccactttttcctgcccagctttgtacgtttaattccttagtgttgtcctgttactagtgattacactctcgaaataaccctaaaaacccaaggctctctgtgcgcacactcgggcaacacggcttcattcagttggctcccggaagcgtgcagagaggttttcctgaaacctttgttgtcctggtcttcttttggcagaattcaagaatgacaggtctcttctctgagtgatttccactctgtaattttctccatcagatgctgagttaagagatgagacatttgccttgtgatgtgtatggatgaatttctgcccccagaatcctcttcagcttattttgcacattgtgttatagagaagtataagatactttgaggactctgcggacacgcccagggccccggcctgggcacagcagaggagcaggcggctctacggcgagcgaggactgtggtgtccgaatgtgccgtgctgaccatggcctcctctgtttgtgtgctcacacctgaggagctgctcagagcacgggaagctttcagggtgggggctctgggtgcagcactgtcctgcggggatggtcccacgtgactctgcccagggcagggtgctggtgtgggcgcttgcagtgccactgggctcacactcacagttccagttggctctggatgtgttggaggcagcaccgagctgcaaaaagatcaatttttcacatttccctgatggagagtttctgcgcctgggtgcggacgcgctgggtttaccgttcctgacaaacgctgccccgtggggagggtgttaggtcgtgaggcactagcatcacattgagttttgcggtggagcatttccatttagggcaacagtggaagacgccaccatcttctttaaaaatgcctagttactctagttttactgagagggaggaggcagggagagggtctcatcagcaggacagagtggccagagggtcatccagtgcggacagccctgggggtctggcctccttggtattgtgtcctggaaggaggccctgccagaggcccccagctcccgtgaggctgtgtggcttctctgtgcccaaatgtagatgcgggcactggcagggggatgcccacacccgtgtaagatcagtgtcccacgggccgagtgtgcaagtcaggctgtgtactcgttgcacccacctgagatcagtgtcccacgggccgagtgtgcaagccaggctgtgtactcgttgcacccacctgagatcagtgtcccacgggccgagtgtgcaagccaggctgtgtactcattgcacacaccagagatcagtgtcccacaggctgagcgtgcaagccaggctgtgtactcattgcacacaccagagatcagtgtcccacaggctgagcgtgcaagccaggctgtgtactcattgcacccaccagagatcagtgtcccacaggctgagcgtgcaagccaggctgtgtactcgttgcacccacctgagatcagtgtcccacgggccgagtgtgcaagtcaggctgtgtactcattgcacacaccagagatcagtgtcccacaggctgagcgtgcaagccaggctgtgtactcattgcacccaccagagatcagtgtcccacaggctgagtgtgcaagccagggctcgtactcatcacacccacctgagatcagtgccgcatgggccaagtgtgcaagtcaggctgtgtacttgttgcacccacctgagatcagtgtcacacgggccgagtctgcaagccaggccttgtactctgtgctccacacacatccaccctcagagtcctcccaacaactctgtggagctgctctgccttcatccccatttcacagattaaaaacacacacgcagcttttggcagcctgtccagtggcacacagccccgggtgatctggacccagagtcctggtcctcagcctctgccttacacggccacaccgtgcagatctcagctctgtcttggcttgctttttttgccaataatggatttcattttctactgtggggttttttttttttctaacacactaatggctctggaatactttcttctcaagaatagaggcacattataatcattgatattttactatggagatgacctgcaaaaccgtgccctttttccattattgcaaatgcgtccttctcactgggaatttgacatgctatccttaataattttcttaataactttctcaacacctaagaggggccagacagctaaaaagctacagagcagctatactgagacgcagggaccttcagagctttccggaaagatgtgagctccatctccagggacaggcattccaaaaatgcaaggcagcatggcacaaaaataaatgacttcccctttgtacctggaattttttttctttttttttttttaattatactttaagttctagggtacatgtgcacaacgtgcaggtttgttacatatgtatacatgtgccatgttggattgctgcacccaccaactcgtcatttacattaggtatttctcctaatgctacccctccccctggcccccagcccctgacaggctgtggtgtgtgatggtccccgccttgtgtccaagtgttctcattgttcacttcccaccgatgagtgagaacatgtggtgtttgattttctgtctttgtgatattttgctgagaatgatggtttccagcttcatccatgtccctgcaaagaacatgaactcatccttttttatggctgcatagtattccatggtgtatatgtgccacattttcttaatccagtctatcattgatggacatttgggttggttccaagtctttactattgtgaatagtgccacaataaacatatgtgtgcatgtgtccttatggtagcatgatttatagtccttttcttagttcacatatatattgttttttcttcgctgctaaagagtatgaattgggaagagaaaagaaaacaggtttcatccacaccctggtgggagtggccccgtgggtgccttcagggccaggcaggcccatgcccagccctcagtgggatggagcctccgtccagctcctcagagtggggagggaattcgcaagtgccgccgacatcgcagctaaatctacaatcaaaagagttatgtggttacatctacctttcttcttcattcatatttaattacctgttggttattgagtcacgcaaatgccacaaggtcttactcatccttacaaactcaaggtcgccaagctgcacacactgggccgctgtggctgaaggtgcatagtcgcggatcataaacagagccatcttcgtgattgttaggctgagtctggatcttaaatagaagattttcctttaagtgaagtggctggaaggattggaccttctgtccggccaagatctgtttgccaaaaatgtgtcagtgcccccaggccaggctgtgcaggggaggcccttgggcccctgcaagcaggcgctgtggaggggcaggtctcggggcttcctgcttggcaccactgccggttaaccccttcagcaggctcgtgtggcccacaggcctcactctggggtgttcaccgtctgaccaggagagttttgttccgggtgaggatgcaccctttgtgtttaccgaggattataaatcagggaaatttcaaaacatgatggggctggcctccagctttctctcagaggaggctcatgttgttgattttgctttataaattatcttttgctcaaataaaatgctctcgagatcatagctctgtatttttggcgggtgtaggcggacagggtcttgctctgtcaccagggttggagtgcattggtgcaatcatagctcactgcagcctcatcctcctgggctcaagtgatcctcccacctcggcctctcaagtagctgggagtacaggtgcacgccaccacacctagctaattatttttttggagatggggtctcactatgttgcccaggctggtctcaaactcctgggctcaagggatcctcccacctacttcccaaagtgctgggattacaggcgtgagccaccacgcccgactaccgttctgtattttaaactcaccacacagaatggtacttagagtattcgtagtggcgatggccatttctgtcactggctgacaggagcccccgctctgtgccctgggcccccacagaagtctgataatgaacgcaggtgatacgggcagcggctgctctcgtctgatggcagttctggtgtgatggcagctgatgctgtaaccttcaactgaggttttaaagaagtatgtgtgccacgctgtccattcagtcatcgcctcagcggtcagcaagctcacgcctccgttcagcaccgtggatgcgactgccttttcaggtgtggatgctacttttcaatgaagagtgaggagtgtggccccctcccccgctgtagccagtcactttctagtcttgggaggggaaaaacagctcccagtggcatctccagtgagcccacactggcagccttgcttagagggttagagtcacctcatgcagggtggaaatgtcccaaattataacctagagcgatttcaaatgctgtgaggtttgtctcgttggcactggctaaaccattactaagtcaagtagcgttctacatttcttattccattctagtaagaagtgtgtttttccttacaaaatttttaaatgttaaggtaaaggactgagaatggacagactatagaatttccattatgaatttggaaactataatcagcctaaaggaccagtgaatgagaccacatgagatgcccctcagtgctttctccagcaagccatgaggcagaatccaggctccttcctggcttcccccacgtctggagattcccaagagtgtccagggaagggtggagagggaggggccggtccccactgtgaggagctctggcaggtggcccagaaaggggccacacagcaaggggaagggacgctggcaggggcaggccacagtgagtgggagaggcagcggccaaacgtcccagcccccgtccttggagggagctggcccgaccccgttccccgtgagcgcagcagactggcgcatttccagctcacttgtgaggaatttctgtttctgtctccagtagatagatgtggctttcttgtgtttatcgccaagggagacaccaggagttgggcctgcagccacgtcttcccaggggcacgtgcaggacggccgacagccagtgccgctgggactccagggtttaacttgtcagtgtgatgtcatcacggtttccacgcgcacagcccttgctcagtgacctcctcgcgggcctggtgcgctgttcgccccttgccacccctgccgtacctgcagggagtcgccgatgcccggggaacttcttcccagcctgggttatggccgggggtggagctcgggctgcagaaagtggcttcgcggccaagcagaatgtggcaaaagcaatgctttgtggatgtcctgagatacggcgtgaggcaggacactcttcagttggtcccatgacagccacactgacttagcaacagctgggttgaatgaggtgtgaacttctgactgaaccgtgctgcgtgaacgtggctgagccgtgaggttaggtgggcggtggatgcaaggccttcccttcagaccctgcatgcacaagaagcacacggtcggcaatgttacttcaagcttgtagacatcgggtacatcccatgtccaaaaagaaggctcgccctggaaaagcacattccgaaagcagtcgcggcatggatgcagagcgctgtgcccgcagcactgcccacccaggaggctgtagggagtggcggccccttctctctcctcctcctccttcctcgccccgtggaagctcttacgcacctccaggccccatgcctgctcacacctccccatctctgcaggtgccattgcggcctagccttggggcctgagcctctcctgcctaaagctttctttgacctcaagttcagggagggtcccctcctcccggccccacggcaccccttcccacgaacgcccaacacgtgctgttgctgtcattcccatcgcttcttgcggtcactcgtgcccagctctgggtggcgtgggagtgctcgggggtcagggcccggcgagtctgacccagcctggctcagcctggtgttcctggcaccctgtgcagtgctgactcggcaagggaccatagcaaacctgattttgaataaactaataatcatcgtagtaggaacagcaaataatcacctggtgtgtgtcaggcacaggcccaaagcctcactctaagcatgttatcttatttaatcctcccagcggtgaagtcggtaccattatcaccacttcacagatggggaaactgaggcacacagagattagtgttttcccaaggccacacagtcagtaagacctgaagcccagattcaaaatcaggccctctgactgcaggtgctatgagtgaatgagtcaatgactgccctggacgtcaaggaaaagaaccaaagttaggtctgtttttgcagttctcatcctgctcctctgaagacatacctgttttctgggtcctggtttctaggaggcgtccatggtggccccgttgcctctgtctcagggcagctttgtggaggtgcagagactctcctaagtggcaggttcccccagagccttcagaaaagcctgcgctggtgatgtgagggaaacatggctggtgcctccggggagccacgtcctgcccatcgtagtgtccagggaagtaggacgcgtctctcacctgcccccaggctcaggggcagcatggggggcttcagccccagacacctcctccacccaggacccggcttccccaccatcccgttcctccctgcaggccattcctggccttatcactgccaacctcctccacccaggacccggcttccccatcatcccattcctccctgcaggccattcccggccttatcgctgctcagatgtttgcctgagccacttgctgaatagaaacttggtagcggtgggttcagagcggagcagcgccgggctagagcacccgcccccgttcccaggcggaagcccgcagggagagcgccttcgggcaagagcagcgtccccggccgcgcgttgccttgctgtgggcacacccttctcccacggcagcgtctccctctgcacaggcgaagagctgccgccacgggtctccagcattctgcgccaagctttcgggggcttcctctctgccagggacatttttcttggatctttatcgcagtttccctcctttgaaaaagttaagaccttcaagaagaccctgcgctgcgcagtgacgcgagaccactggtgagagccgcgggtccccgctgagaggcaccgaaccctgggtctccctcaccgtgcaccagcactgagccactgggcactgagccacccgccggaggaggcgatgtcggcttgtccagctctaaattctgcgactttggcccggtgcagtggctcacgcctgtaatcccaacactttgcgaggccaaggcgggtggatcacctaaggtcaggagttcaagatcagcctggccaacgtggtgaagcccgtctctactaaaaatacaaaaattagctgggtgtggtggtgcacgcctataattccagctactcgggaggctgaggcagcagaatcgcttgaacccgggaggcggaggctgcagtgagctgagattacaccactgcactccagcctgggcgacagagcgagactctgtctcataataatagtaataataaattctgtaacttcttcagaaatatctttacatttgccaagccgtcaagagtttggctctggcttagagaacggccctaacttctattcactaatacgtctctcttactcatgaatgcttgaggctttctctgtagctgcctccatgctaagcactgaatatacaggaaaccatctattttaatcttcacagtaactataggattatctccatttataaagtgaaaaaataggcttagagacctttagaggttttcccaagttcacatgaaaagtttgtggttgtttgctattggtgactttgggagaaaaataaatacaataaaaacggaagtttgtggtgcagcagggacctcagtcctgtggggcctcttggtggcttcaccctccatggcactcaggaaataacagagctcagacctcactgtagctctcccatgggtggcaaatcacaggatgggcatggaactagcttgattttttatttttatgtgagtaaatctccagcgtttcaaatcctcttccccagagggtcacattctcggaccctctgggttccctgagctgtagctgttctcatgctttggttggacgttatttttctggagaaattgtgtgaagagatagaagttacttcagaaacatttctcagtgtgcttttcccccacgtcaagcaaaattcatgtgcacaattgagaaataaatgagatgtatactcaggttggttactggtatcatctaccttattaaaatcatccctcattgggtggatcacctcaggtcaggagttcgagaccagcctggccaatatggtgaaaccctgtctctactaaaaatagaaaaattagccgggcgtggtggcaggcgcctgtaatcccagctaatcaggggagtgaggcaggagaatcgtttgaacccaggaggtggaggctgcagtgagccgagatcgtgcctctccactccagcctgggagacagagtgaggctccatatcaaaaataaaaataaaaataaaaaataaagaattatcctttgtggggttttttttgtttgtttattttgctttgtttttgagattctgagaaaacgtgggtggatttttttaaacacactcactattttaaaactgtctataaactaacaagtacctgaagatgtatgggaaagaaggaactggaactctcccttttcttagagaccccttaccctcaccagaggcccttggtaaagtccaccttcccctgtgcgtctctgcccggtccccatagtcatcccccccgccccccccatccctgtgaccatcctcccacccctgtccctgcggctatccacctcccgcccagtccccccagccatcccccccatccccgcggccgtcccccccttccccacagtcgtccccccccatccccgcagtcgtccccccccagtccccggggtcatccccccccgtccccgcagtcatcctcccagtccccgcggtcatcctccttgtccccagctgctctcacaggggctgcaggctcctggagagtgggggccgcagggccccttcccacagcacctgtatctcgctatgagtccgaagcagagagcccgggagcatgaattgctcatcccagagagccaggtggagggaaatgttttctagatggtgtggtgccggtgggcttggcagacatctttaaagccaaggaagccggcagcccggggtgaagggagaatggacacaaggaagccggcaccccggggtgaagggagaagggacacatggagtgtttcctgagctttggcgattgccttggggagtgcaaggcctttgacgcacacggctgtggggagcgagtgggtggcttggcctcccccggacaccaccaaaatgaaaccaaggcagcagcagcccacgaggttccccggagcctttctttttctcacgaatgcattttcacctcttctgttgagctccagttctcttataaactttttctgggtatcatttcactttgcagactcagggtacaggtatattttcatcaggcaataggacgggctatcctaacacagtggttagaacactttcaaaacgagattgttggtcagacgtcaggggggcacccaggctgcaccctgaaggtgagcggcagcagcggggtcccggcgtgttctgagcacctgaggctgcgtggccgtgtcctgcctgcaggcgggtcccatacggccgggcaggtgctcgggatgcccaccgcgtgtgtggttgagctttgcctggggaaggagggtcgaagaccctgcagtgatccctcagaagctgtcttggggtgtaatgttgagagtttcctttaaatacgggaacttctgctttggtgtctactcagcagcacaggcctttctccctcccctgtgccttctgtctcccgcacggctccatttgccttctcttgcatgggctcttggacattgctttggaaagagaaagaaacgtcagaatgaggttcttcttttttctgcagactctttgattgtggtaccagtttctgtatctcagtccacagtgcaaaccgcccccggcctcccctgtggcttatattctgatagaatgagaagccacccaacgaaggctactgtggcgttatcccagaatattccacgttgatgacagaggaggatccagtggatgctttcttgaatctataggagtgagtgtttgtggcgtgtgcagtgtgtgtgtgtctgtgatgtgtgtatgtgtgtgtggtgtgtgtgtctgtgacgtgtgtgtggtgtgtgtgtgtctgttacatatgtgtgtggtgtgtgtgtgtggtgtgtctgcgatgtgtgtggtgtgtgtgtgtctgtgatgtgtgtggtgtgtgtgtgtggtgtgtgtgtatatgtgtgatgtgtgtggtgtgtgtggtgtatgtgtgtgtatatgtgtgatgtgtgtggtgtgtgtggcgtttgtgtgtgtatatgtgtgatgtgtgtggtgtgtgtggtgtatgtgtgtgtatatgtgtgatgtgtgtggtgtgtgtgtggggtgtatgtgtgtgtatatgtgtgatgtgtgtggtgtgtgtgtggggtgtatgtgtgtgtatatgtgtgatgtgtgtggtgtgtgtgtgtatatgtgtgatgtgtgtggtgtgtgtgtggtgtatgtgtgtgtatatgtgtgatgtgtgtggtgtgtgtgtggtgtgtgtgtatatgtgtgatgtgtgtggtttgtgtggtgtatgtgtgtgtatatgtgatgtgtgtggtgtgtgtggtgtatgtgtgtgtatatgtgtgatgtgtgtggtgtgtgtgtgtggcgtatgtgtgtgtatatgtgtgatgtgtgtggtgtgtgtgtggcgtttgtgtgtgtatatgtgtgatgtgtgtggtgtgtgtggtgtatgtgtgtgtatatgtgtgatgtgtgtggtgtgtgtgtgtatatgtgtgatgtgtgtggtgtgtgtgtggtgtatgtgtgtgtatatgtgtgatgtgtgtggtgtgtgtgtgtggcgtatgtgtgtgtatatgtgtgatgtgtgtggtgtgtgtgtggcatatgtgtgtgtatatgtgatgtgtgtggtgtgtgtgtgtggcgtatgtgtgtgtatatgtgtgatgtgtgtggtgtgtgtgtgtggcgtatgtgtgtgtatatgtgtgacgtgtgtggtgtgtgtggtgtatgtgtgtgtatatgtgtgatgtgtgtggtgtgtgtgtggcgtatgtgtgtgtatatgtgtgatgtgtgtggtgtgtgtggtgtatgtgtgtgtatatgtgtgatgtgtgtggtgtgtgtgtgtggcgtgtgtgtgtgtatatgtgtgatgtgtgtggtgtgtgtggtgtatgtgtgtatatatgtgtgatgtgtgtgtgtgtgtggtgtgtgtgtgtatatgtgtgtgtgtatgtgtgtttgtattctcagattctgagagcaaggcctctcttttcctgcacaagcctgaagtcttctcgggtcaccgtgctgggcgcgtgctttggggtgcgttgaccgtcatgttgcgctggcctgccctggggtaaactctcgcctgcctgaaccttggatcttagcaggagaaggggttgtgccacgtgggtgccgtggccctcgtcctgctgggtgtccccaatgccactaaccccctgctcttcctccccctgtcctgcaggagctgtgccgccagcgtatggccacgcggccaccagaccgacctgagggcccgcacacgtcacgcatcagcagcgtctcatcccagttcagcgacgggccgatccccagcccctccgcacgcagcagcgcctcatcctggtccgaggagcctgtgcagtccaacatggacatctccaccggccacatgatcctggtaagcccagtctttgcactccctgccacacaaacaccagggccctccttcctcggcccctgcaacacccagcatctgcgcccgctgaccctcggggactgggcgatgatggctgcaccctgcccgctgcagaggctgacaggcagggctctttctgcagggagtcttcttaatttagataaacaagaatatttacttcctgagatctttgccgtgcttctgcctggaacgtgcagcccccacacacagtccctggtgtgtaagagtgagcacccgctatttagttttcagtggaatacacgtctgttagtgcctaccatgtgcgctgccgttttgggcctctgactcggaagcagctgctgtctccttggcactcaaggccagcaagcgtcatttgggtaaataaatgtcactgctgtgacagcaaggcaggaggaggtgtgggctgggtgctcggctcttcacaggagccttcctggtggcgccggccagaggctcacggcgacgcggcttcagcggccttttccagggtcctcgctggagtgatcacgcgtgtgtggccgtgcattgccactccatacataatgaatgtccgggtgttattaggacagctgtcaatagcgcagcacgtcctgctggctgcctcctggatctccaggccgtaggcgtcgtcctggtgggtgaccgtgcctggctgtgctgtttcccgcactggagacggagcctctggggtgaaagggcagagcctgttacgctgcttggccgaagcagcggctgcacttacgggtcagggaaacattcttcgccgtacca[450 bp omitted]acccgggagcagacagctcgtggagttcactcggcagacctgtcatcgactttggcagaacctcctcccttgatggactgtggttttgttactttagatctgacttttctgaggctgttttgacatttgtcccttttagaaaaggagcagagaccaggagttcatatttgtgatgagatttggtattagggccaaacccatcagccaaagacattcatctgacaggtcagccaagaggagagccgcttagcgagctctcattgtgttctgatatttccacatttcaaggtgcttgagtaacaatttgatgatatctcaagctctattggtacctggaaatactgtatttctcagagaattgtgtttggcattcacatatgtaatggcagctctgacagcaagcaccacttctgctggaatgcctaaaccgcaaggacagactcagcctccacctggcggaaaccctgcaaagcctgactccagacaccctgttggggggtcatcgagggccacacaccgtgacggggtcctgtttcggaacgcgtctcaccaccgcccacaactgcagggccgaaacgagaaacacactcaggccaagtatgagtccggctgacttagactctgtgcgtacagattgtaaactcagggaaactggatcttcctcatcaaccaatgctgttttgaaaatgaatgttactgagatatttccctgactccacgatgccagcaggtgctggtgggagtcagggtgggtgtggggagcggcgggcacagtgtggagttggggagggtgtggggagcggcgggcatggtgtggaattggggtgggtgtggggagtggtgggcatcgtgcggagtcggggtgggagtgggaagcggcaggcgtcgtgtggagttggggtgggtgtggggagaggtgggcatcgtgcggagtcggggtgggtgtggggagtggcgggcagtgtggagttggggtgggtgtggggagcggcgggcatggtgtggagtcggggtgggtgtggggagcggcgggcatcgtgtggagttggggtgggtgtggggagaggcgggcgtcgtgtggagtcggggtgggtgtggggagcggcgggcatggtgtggagtcggggtgggtgtggggagcagcgggcatcgtgtgcagttggggtgggtgtggggagagacgggcgtcatgtggagttggggtgggtgtggggatcagcgggcatcgtgtggagtcggggtgggtgtggggagtggcgggcgtcgtgtgcagttggggtgggtgtggggagcagcgggcatcgtgtggagtccagcaaccaagtgggccagacgtgggccttggaccctggcgtctcctctcactcagcagttctgattttccttcctctgagctcactttacaagtgcattcccgtgccctctcagccatgcggggtctcctggtgggcatgtccctggtacaggagcagagaggcacagactcacgccacaggtgagctccaggtagacctcttcccaggactcacacaggtagccttttaggctcggaagctacagccaatctcggggcactgaccgccaccctccctggcacacacaggctgtagaaagcacatgcaggttggtgccgcaggaacgcatcagagtcgccgaccttccgactcatcacagctacaaggcagccaattccgtggtgatccagcagcccagccctctgtgcgcaaagcctcgtttccgccagacacccaaccggccacctcagtgcccctcacctgaggatggcaggatggtcagataagccacagagattcccagcgacatgttcctgacatgcagccactcctggggcacgttggacaaaacgtggcatctgaaccccacgatccgatgaaataaacagcagaggttggtgatgtctggaggccaagctagatgtgaggagccccagcaggtgggagaggccggctgcaccgtctggggggcaggctcagcaccaagagcggagactttctgtgacaaaggacacatgtggcagggtggaggctgcacactgccccggagcccagaccttcaggcggggctggcctggctgtggccccacaggaagggcctcctggccccgagagccccctcccgccctggggcactctacccactggagctcacgctgctgctttctgcacagaggctgggattccgtgctggagacccggagtaacagaactctagaaatgagcactccatctagagaggggagcatacaacactcttataaaggagacaggccagggtgtgagagaaggaggcttccctgggagacaggaggcggcaggtgcctgccccgatggggggatccatggggctgtgcagccactgggtgtcaccaggaagaggctggtgtctcaggactgcagggagggacttagttacctggtcaaggtgtcccagcaggtggaacaagagggagagcacacgtctcagggacccccggggaaggggccacatgaaagcctgatgggaaggggcaggggtgggcaggtcattggggcagccgctgggtcccccgctctgccatgacagcaggtggtcaggtctagatgtggagcacagattctgggctccatcagcaaggtgtcagagctgagacgctttgctgttgcaggtgctgtgtcccaggacagacctccaaccttcttctcccctgtgagacgggcttgatggcagtgcctttcccctggggttcctgtgagggtaaaaccgggtgagcatctgagatgccgcccatcctgagacctcacctgtgccgaaggtgcgtcgggctggagaggaaggggttgtgctgaaggaacagagcccggcggggcctttgcttggtagggtttgggcctctgggcctgcattctctacactctgcctgatccctgtctctgggctttgattctggtttttgtgttgctttgccttcattttcttagaaaggtcctttaaaaattccagttttcttctgggatgaactaaggagaaagggctttatttgcagggaaaacccagcccagaatgtcacttgttcctggaaaatgggcctcccaggcgcagggaaggtgcagtccgtgcccctgccttggactgtctggaagaagctgagtcgaggctcacctgcgggtgaatggagcactcagaggagggagaggcaggaaggaaacacttccatcaagaaaccggtacatttctctggaaacggccgaaaggcaacacggagatgctcactcagagcaaggctcgggactctgaaaagcaaggacgtgatgaaggcgacttcgcaggacggttatcaaagcggctgcgtgttaatcatctgcggggacgtggcttctcaagaaatcctgtcacatccttttgtaagataaagaatcatcgagttttttcaagatctgtttccctatcactttgctttcagaagggtgacatttctgcctggctggctctgagtgaggaggtggagaagagtgtcaccgtcccgatgtgactaattacgcctgagtcggccgggagccaccgcgtccacctttaaaggctagagaacgttttttggagagtggggatgttaagaaaaaagttggcttcatacttctccattcgacttaaataatatagaacttaacttgggaaagccgtgctgagtaagtgcttttcagaatccatcctcttgagtgttgaagatgaggatatggacagtgatctttgagttcgctcatccttggagagtcctgaggcactgagggcacaggagctgtgagtaggcccatttcacagatgacgacattaaaaccaagcgcagtgacagagacgtgaaaaacgaaaagttaggcattgcaggaagtgaccaaagatttcccatgatcacagaaaacaggaaagttcatgaattttgctgaggagggagggggtgctgccagcctgtggagtcgcgccgcaccttccgcagatttgcctgtggggtttctgaactcccagcgtgagacgcgtgatgcgtgtctgtgctggcgaccaacagatgccggcacaagctgtgacctcctcagacccacacggctcacggcctctgaacttcggccctcctgcctgcctggagtcttccctgggcccgtcgtgtctctgcctgtgcaccttgagagatctctgtctctcattgtttgatcttgtcaggctccaggcttcttagttcttagcgataagtcaccgaaccaggagggcctcgcgaaaccatgccagatgtccctgcccaaggctgcaagtcaccagctgcagcagaaaggggctggggtcccctgcaccccacgccaccagtgccggggccttggcaggcgctcccctggccccagtccctccaccttcagacccagtgccctgtatttctggaagattccattccatcgttcccacgtggttgacgggcacagatggctgctctcccaggatgaggggcactgggccaccgagaatttcactctggggccacgcggctgggctggccgttctcgctctggctcgggtgctggcgcggaggcctgatgagtaaaccaggccgcagggcgaactctccagctttgtggggcctgcgttcacagacacggcaggccgttgctgctgtctggacgatgccggctttgtggcgcacatttggaggagcctatttttgcaggaaagctgtttctcaccattgaggactgcgtggcataggcaaggcctgcacatggaggggtacatagtccccccttcccagcacggcgggtgggggtgtgccctgccctgatggggagcccctgcgggggatgtctctctccggcgggcaggtttgggaagccttcacgccacacaggaccaggcacggagccccatgaccagagacggcattaaaccagcagggaaggggaaagctggggcaagaggcagagccaggagaggaggagcgtccaggtgccatagtagccggctctggagaccccgagacttcccagcctcactcctgcgggcctggggagctcctttgagagccatttacgcgtccaccgagttcagtgcacagtgaatgggtccgacccaccgagttcagtgcacgctggatgggtccaacccaccgagttcagtgcacactggatgggtccgacccaccgagttcagtgcacgctggatgggtccgacccaccgagttcagtgcaccctgggtgggtccaacccaccgagttcagtgcacagtgaatgggtccgacccaccgagttcagtgcacgctggatgggtccgacccaccaagttcagtgcacactggatgggtctgacccaccgagttcagtgcacagtgaatgggtccgacccaccgagttcagtgcacagtgaatgggtccgacccaccgagttcagtgcacgctggatgggtccgacccaccgagttcagtgcacagtgaatggatcggacccaccgagttcagtgcacagtgaatgggtccgacccaccgagttcagtgcacgctggatgggtccgacccaccgagttcagtgcacagtgaatgggtccgacccaccgagttcagtgcacagtggatgggtccgacccaccgagttcagtgcacgctagatgggtctgacccaccgagttcagtgcacagtgaaagggtctgacccaccgagttcagtgcacgctggatgggtccgacccaccgagttcagtgcacgctggatgggtctgacccactgagttcagtgcacagtgaatgggtccgacccaccaagttcagtgcacgctggatgggtccgacccaccgagttcagtgcacagtgaatgggtccaacccaccgagttcagtgcacgctggatgggtctgacccaccgagttcagtgcacagcgaatgggtccgacccaccgagttcagtgcacgctggatgggtccgacccaccgagttcagtgcacagtgaatgggtccgacccaccgagttcagtgcacagtgaatgggtctgacccaccgagttcagtgcacgctggatgggtccaacccaccgagttcagtgcacagtgaatggatccgacccaccgagttcagtgcacagtggatgggtccgacccaccgagttcagtgcacactggatgggtctgacccaccaagttcagtgcacagtgaaagggtccaacccaccgagttcagtgcacgctggatgggtccgacccaccgagttcagtgcacgctggatgggtccgacccaccgagttcagtgcacgctggatgggtctgacccaccgagttcagtgcacagtgaatgggtccgacccaccgagttcagtgcacactggatgggtccgacccaccgagttcagtgcacagtgaatgggtctgacccaccgagttcagtgcacagtgaaagggtctgacccaccgagttcagtgcatgctggatgggtccaacccaccgagttcagtgcacgctggatgggtccgacccaccgagttcagtgcatgctggatgggtctgacccaccgagttcagtgcacagtgaaagggtctgacccaccgagttcagtgcacgctggatgggtccgacccaccgagttcagtgcacgctggatgggtccgacccaccgagttcagtgcacagtgaatgggtccgacccaccgagttcagtgcacagtgaatgggtccgacccaccgagttcagtgcacactggatgggtctgacccaccgagttcagtgcacagtgaatgggtccgacccaccgagttcagtgcacgctggatgggtccaacccaccgagttcagtgcatgctggatgggtccgacccaccgagttcagtgcacgctggatgggtccgacccaccgagttcagtgcacagtgaatgggtccaacccaccgagttcagtgcacgctggatgggtccgacccaccgagttcagtgcacagcgaatgggtccgacccaccgagttcagtgcacgctggatgggtctgacccaccgagttcagtgcacagcgaatgggtccgacccaccgagttcagtgcacactggatgggtctgacccaccgagttcagtgcacgctgcatgggtctgacccaccgagttcagtgcacgctggatgggtctgacccaccgagttcagtgcacagtgaatgggtccgacccaccaagttcagtgcatgctggatgggtctgacccaccgagttcagtgcacagtgaatgggtccgacccaccaagttcagtgcatgctggatgggtctgacccaccgagttcagtgcacagtgaatgggtccgacccaccgagttcagtgcacgctggatgggtccgacccactgagttcagtgcacagtgaatgggtccgacccaccgagttcagtgcacagtgaatgggtccgacccaccgagttcagtgcacactggatgggtctgacccaccgagttcagtgcacagtgaatgggtccgacccaccgagttcagtgcacgctggatgggtccaacccaccgagttcagtgcatgctggatgggtccgacccaccgagttcagtgcacgctggatgggtccgacccaccgagttcagtgcacagtgaatgggtccaacccaccgagttcagtgcacgctggatgggtccgacccaccgagttcagtgcacagcgaatgggtccgacccaccgagttcagtgcacgctggatgggtccgacccaccgagttcagtgcacagcgaatgggtccgacccaccgagttcagtgcacactggatgggtctgacccaccgagttcagtgcacgctgcatgggtctgacccaccgagttcagtgcacgctggatgggtctgacccaccgagttcagtgcacagtgaatgggtccgacccaccaagttcagtgcatgctggatgggtctgacccaccgagttcagtgcacagtgaatgggtccgacccaccaagttcagtgcatgctggatgggtctgacccaccgagttcagtgcacagtgaatgggtccgacccaccgagttcagtgcacgctggatgggtccgacccaccgagttcagtgcacagtgaatgggtccgacccaccgagttcagtgcacagtgaatgggtccaacccaccgagttcagtgcaccctggatgggtctgacccaccgagttcagtgcacactggatgggtctgacccaccgagttcggtgcacagtgaatgggtccgacccactgagttcggtgcacgctggatgggtctgacctcccagtggctgccatggcctttgggcccggtgcagacccaagtatccgtcctcacaccctaacttgcttgaggggacgttctagagcctcccgtgtccatgcagccacccaagccacagctcctgcttgacgctcctgggactctgttctgtacctgagactctcacagggcccggtaccagtgggacccagcctcccctgtgcaagggcctcccctgggtgggaggacatgggctgttaattagacccgggttcattagacaggtgtgttaggctgttgtcacactgctatacagaaatacctgaggctgggtaattcataaagaaaagaggttgaattggctcagggttctgtaggctgtacaggaagcatggtggcctctgctcctggggaggcctcaggaagtatccagtcatggcggaaggcaaaggggagccaagacgtcacatggcaggtgcaggagggagagaacagatggggagtgccgcacacttttaacaacaccatctcaggaaagcctgctcactatcctgaggacagcgccaaggggatggtctaaaccacccatgagaaaccaccctgtgacccagccacttcccaccaggccccacctccagccctggggctacatttcaacatgagactggccaggacacagatccaaaccacatcacaaggccatgcggaggcagcgcctactgtgtgcctggcaaacagttggcattcagtcagtgatcagcaggatccctggttctgctactttggggttttggggtacaggctccactctcttccctgaaaggaggcccttcatctgctaatctctaaactgaaagattttagcccttacgtcttgcacctttttcaaaagcagctttacagtgacctaagctctaaactcgtggttttctttgtcatattgtaccaaggggtgggactgtgtcccagcaagcaagtcccgggctggtttggtctgggacgtgcttcatgaagacattacagccactcggcatcattgtggggaaggtaaccacggcaggggtgcccacccacaccgggactctggggcccagccccctccccagggccagccggtgctgctgtggtcatgtggtgcgtaaacagcagctcctcacatgacgccgctctcaggagagggccctgcatgagtgtgtacagcccggccccaccctcctaacagccatatgttctcctgttattggacgcacagaaatttactgtctcctagtaagggcaatgtaggcaatttcaaacttttgccactccagactacacggaccatgtgaaatgtgagtttttagaagccagatcctgagtcatcgcggatgcttattgtttattttgatagatactgccacattccctgcaataatctttgccaagatggcgtccccctagtgccatagacatggtacctctgtcccaggtctcccagcctcaggtatcagcgaacctttgaactttgccgctggtaggtgggaagggctgcatccaagtggttttcacttctgtttctctggcttgcgtgagactgagcatactttctcatgtttgggagccgtttatggttccttccaagagtggttttggacacagtcctcatggcagcaaggccagcagcctcgaaagcctgccaagtgcaagtgtggcacgtccacgcaacatcaatcacaggtgctgtcacggaaatggacgtggcagtgaaactgttctgctcctgttcgtctcctccgtgtccgtcatcacagccacagtcacctctgagagaggcagtgatatcgattaattagggcaaagtttaggaagaccaaggagaaagagaaagccctctgagagttcttgtcctgtccagatgtatgtgaccaggtgagaaaggagccggctgggtagctcgggcccgtgtggttcccacgggtggaaatcgtgcataggattgtagctcagagcagacagtgctgctgcttttgttttgttttcttttgttttttgtttttttttttttgttttttgagatggagtttcactcttgttgcccaggctggagtgcaatggtgtgatctcggctcactgcaacctctgcctctcgggttcaagtgattctcctgcctcagccttccgagtaactggaattataggcgttagccaccacgcctggctaattttgtatttttagtagagtcggggtttctccatgttggtcaggctgatctcaaactcctgacctcgtgatccgcctgcctcagcctcccaaagtgctgggattacaggcatgagccaccgcgcccagccagagtgctgctttaattgatgaagcaagaatggggctcctgggagaggcgtatgctggctatgtgaggtctgtggacctccaggggcctgccctggcctgctggggctgccgtgacgacatccctcaggctgggcagctgaaaccacagcagtgtcttcctcacagtttcggaggccagaagtctacaatgcaggcagggcttgttcctcctgaggtctctctccgtggctggcagatgacatctttttcctgtgtcctcccagaacctttcgtctgtgggagcacatcctgctctgtcttctcaggacctcactcagattggtctggggccaaccccagtggcctcattttaactccatcatctctgtaaaggccccacctgcaaatgaggttatgttgcggggtaacctggaggggattagggaggcagcacatggattctagggaatggttcagcccgtaacagggaccgacgcctgatgcacaccagtgttttctggtagcttgtagcgcatgagaggcccctggtcttccagccacagtcccacgggggaagctccagtctccccgcactggtgagctgagcgtgcggcgagcactatgaggctggccggtgtctgggccctgggctgtcacctgccacagcccggactgccgtctatctgctgcacgagttggtgacgaaccttcgaggcctgacggagaggctggtgagccactttagacaccaccactttctagagctcagctcacacttcctggctggagcctggccgcctgctcccacctcctttactgtgggtgcgggtgtctgcagggggtccttgggaagggcgcagacagaggctggaggcagcagcggctgtgcaaggaacaggggctccgtcgggggagcagtcacagccactggttctggatttccctgggatgcccgggccgtgggtgtgcccgtcctgcagcagctgtgccttggtcagcggccatcacggccttcccctgcagcccccacacctccgccacagtgccccttgcagcgctctgtggatagttgggttgtgacacaggcagagagtgtcccttccatgatccgcctttattgagggtgtggaactctatttttttgtgggagggggagtgatttgactttttattttttaaaaatctgatttgctgcttaaaatgctagagccatgctagtgctttatttttcagtctctccaagttttcaatatgttgtcttttctgccttgagcacttaatgtttaaaggaaaaattctctgaccccaatctgaccagtccctgctgccatgctggccccagcgagacaagtggctgagtctataggaagagtttgtaccatctttagtatgacagatggtgggttatgtcccaacaaacccatcgtaagttgaaagtgcatttttgacttaatgatattttcaactccaaagaggtttatcctgccatagccccatcataagcggggactacctgtatatttacgacctggtttgattggatgtttgggctccagagaaggtgggtgatggtccagagagtctgcgggagaaagaggtaagctgctgtgatgcagcttggcctttggctgccggggcgattggcttaggtaaatggcacccactgtcccgcagccctgcgttttagctgcttttttttttttttttttttttttttttttgctgtttcttgacttggtagacccttcttatagtgtgtgaatggggcatgatagaagaagtggaatcaagcatccaactcatacttgttgaattaaattgggtaaccaaacattaaacttggtaaaagttaacaggtccacgaattaacggttgtgggaggaaacacttgaagctggtgcataaagtcaggtctggaaagtgctcattcgtgcagcgttttctgagcacccagtgacggacggagacgtccacaggctgctcgggaactcatggaaacttcctggagaaacccgaggcgaggaggcgagaccagaggccgcctccatctggtctgtccagtgactcctgcatctgcaggtttatagacagcatcagaggaattgaatcacagcagttcagggcctggatggagttatctgattctttgtgtaaatgtgtaaacctaacacgagtttaataaaatgcagcttttgaaattccacaagcagttcagaaatgagctggcgtcaggtgggctctgcttaccttcatgtcctcagcacggctcctgggcagaggaccatggggatgctgggtgtgaaggaggccagcagtctggctcctaagaggcttacagccaatttggggcaaaagggggtgaagggctggagaaacactagacattgccacacaccaagctgcattcttttgctagaagacgtctctgtccttgacgggagtgtcgggcgtggcaggggggctacagaggagacttgaggtggacatttgagaccaggttttggtcggtgaagacagctgtgttgggcaggtggcatgcagaggagggaacagcacagctccatcaggaagcagagggcagttcacagaattggagttcacggtggaaggagcagaagatgagctcagcctggactcgagtgaacaccttgagccagacgtcaggtagctttgtgcgtccacatgtggagtggtgcttgactccacatgtaattgttgtgacttcttgaacccgaaaagtcgacattattcacttatttgtgtacgtttgcagaaggtgggagcacttaggatgcatgagccagggactgagtgggtcctgacttgtcactagtgttttctcttctggagcaagaggacagtgatcttggaaagacaggaagatttggtgctgcagtgaaaagatggtgccacgtccagagtctggcttcccagtgtgacatctgggccagcattacatcctgtgaactctggcttccccttccacaaaatatggctggttacaaaactcatgcaaccatactgccgtaaagaaaaataatgacgcccactgtgggaaaatctcctaacatactgcagagtattgcagtgacgtttctaaaattatagaaaccatgttgccaagtaagtttttctttaaaaaagctaatctctcactcactcagtgtttggcctgtgtacatctcattctttgccttacatatgccctgcattttctgagttgtattttgttgcagcatcctctcctgccttctgtgggaatgaatgggttttctttattccctctctcccccttggctagttcagcagttatactttagtaattatcctgatacttttaataaccatgcttggcttaacaatatctggagttcacatttctgccctcctcacaaataaacccaggacctgagacacagacctcagctacctccctctgacacatacagtattgttcagtatttcagttgtgccttgtctttgtatcctgaaatcaaccgtttgttttactagctttcatagtcagcatttgttcagaccgactctcattttatgaggttcccctctccccccatcaccattccttttactgctcaattcttcattttgggtaaaactaccttttttctgaaagatatccttctttcagtcttttattgggaaagtttccttctctttgtctgaaaatgtctttgatcctcacacttgcataacagattagccaagggtcaagttctatttctttttcttttattaccttgaaaccctgttctcttgtctctggtgcccctgcacttgagaagactgtctgttgctggtcggatggtggttcctttgtgtgccagctctagctccttcctgatcgctatgtctgatggtggttcctttgtgggccgctccttcctgattaacctttactgttttggagtttccttgtgtcctgtcttggtaaggacttattttatttttaatttttgctccaaacttactgtgattcctgaatctgagaattcctttctccagctaatcctaaaaaattataaaccatatataatttacatttgactctcttccattctcccctctaatggaaataagttgtaccttcttattcccatgtcccttaaatccctttcctattttctctatctttctgtcctgcattccagggaatttcctcagatctgtcttccaacatacagtgtttctcttcagcagtgtctaacctgtaatccatgcattgtagttataatgttaaagagtatggttttcacttgaagttctattttgttctttttcagatcaacctgctgggttgttcttttcttaaattgttggttcctactttaacaccttcaatcatgatcaatgcattatccgatggtttctaacacgtttattaaggtctcatgggtctaagcctgctctttgatgtttgctgatttgctcatggtagtttgttgtctggtgggttctataattccagattataagctcctcattggtggggctttagttctagttttgtatggccctgttctgagagtattaacctcaagagagcttttgccagacacactaggctgtcattaaactgagactatcttcatgtcaattcctcacccagatcactcatgtgtttgagcctcaattctggatgaggcccatgtttcaagcgtcttcccattttgagtccatatggtgacagacgagattcctgtggtgtgagcacacccatttgctaagggtgtggttgttgagggtcctgtgttatgtggggggctcgggtccagctctctacctccagcaaggcagggttttccctgctggccccacatgggcagcaaagtccaagaccctgattttagatgtagggaatcctgtcgcctgccttccacccagggcttgagcggcttcaggccgcacatcccccattccagtttcactttctccttcagcttggattcctggggatttcccttaattctgtgaaaggctgactgtgccatttgtccagcattctacgtgtctgtggaggaagacacttcaggttatctccttcttcatatcactggaaacacacatgccatgcaaattacacaaaggaaaacagtgcagaggccgcactgtgcttcatctcacatcacattgacaattgcctccaagaaccaactgtgtgttctccctaataaagaaagatagctgggcacagtggcttacacctgtaaccccaacactttgggaggccaaggcgggcagatcacttgaggtcaggagttcaagaccagcctggccaacaggcgaaaccccatctctaccagaaatacaaaacttagctagatttggtggcgcatgcctataatcccagctactcaggaggctgaggcaggagaatcacttgaacccaggaggcagaggttgcagtgagccgagatcacaccactgcactccagcatgggccacagagcaagactctgtcaaaaaaaaaaaaagaaagaaagaaggaaagaaagacatcctaccgatggctgtctagagtcaaagatgagcaggtaatgatcacattccgccgggtttccacactcacctttctgtaagcagtcaaagggatcgctgtgtccagaatgctctgcctctgggagtgctgatgggccaaggtctgcagcaggtgagcagcgagtgggccctgacggctaatgctgatggccttagggaagtccaggtggtccacgtggctgagtgacgacaaggcagctgcagggagggacagatgagaagtcccagcaagaagagtgaccccgatcatccactcccacctcaccctccaaaccctgggaatgccagcgggcatgtcatttggtccccatgccgtgtgactggcactgagctgggaaaagatgtaaaatatctctgatagtctcacctctaactcttcaccctgaaaagtgaaaacactgtttgacatatcagctctctgttctcttctcctccaaactcctcgtttcaaagcaattggaagaggagtggtgaccagtcaacacttggtaattgtggttgactatggaagcctgaatgttctcttcccttcaccaacattttagaaatttcactgctcacaggaaggtctggaaggtggaggaggtagactgagccctccaggctcagttccttgtgagcacgtttggttggtgaagagctggatattaactttgtctcgcacatagactgacccctccaagctccgttccttgtgagcacgtttggttggtgaagagctggacaataactttgtctcgcacatagactgaccccttcaagatccattccttgtgatcacgtttggttggtgaagagctggatattaactttgtctcagacaagcaagtctttctggtatttttggtgccatcaccttgtcagttgttttgttccccttttcttgtattattgctcatgtgcatatagcctgtgggttttaggaagtgaagcatcaaaacattctactttcagtgagcacctttagaacttcggcattttcaaataaggtgctatagaattcagtgtttctcctctgcttatggaagaagacatgcatgtctccatcactgtcctaagtaacctttacagcacttgctggaactctttattcttcctaaaaacttcatcagaaaatcgtaatgagtacatcgttggcacagaatagagaatgctgctgctaagaaaagacctgctacttgggagcgggagaagctgtctatgcgttgcctggcaaccgcccctcctcatccttcttctgaaaggtctccctgttagaaccactgtcgtcatcagtggagtaaaaatggtcccctctgggctgcttctcctgggtcgggtgccagcaaaggagtctggtctctgagagaatctgatcataccgttttggccatatgggctttgtaggtgaccatcagggtggggagaggtgggtgcatgaccacttaaacaaatgggtctgctgccacacaaagcatagaaatcgtgatacgaaacggcttttgaagggatcttacggaaaccgccactccccaggctgctggaggctggtgtggatgttgctgctgagccaccccgattcccccacccagggctgcttgtcacagagctgggatgacaggggctgctgttcactttagagattctgctcttctcctagaatatgttagtgtggtaggagacctcttcagggcttagttacgtaaaggttgcatttcatgaactgttttctttctcttgcaccctcttttcctatgatctgtttggaatccaaggttggttttcagctgaattttgcacactaatggaatttttaagtaactcatggcttaaactatatttcatatgtcaaagggatatgttcgaagctagagtcaaattcttttctcattgaataaggaatgtgtattgatttatattaataaaaaaatgttgtagaacaaatatttgcaaatacatttgttcatattgttcaaataagttataaaaagtaaacagaaatatagttttttccaacttcctttttctggttataatattccgatttctcttcctcatcaaaggcttagaagatatttactttctttgtaaaggttagcattggtttctgtgttaaactatctatagttaaactttgattatccaaatggaatgagaggatttaattattgctaagcagagaggtttaaaatggacgggaaaagaattgggggagtttaatctgtttagaatgattgagcattatctcttcatcttccacgccatttctccaaagttctccagtgttttccattcatctataaaggtgatgaccgcagatcctggtataaagaagacacctgaatagtaaactttgtgtttgataaatagccatttcaggaatttgaaataccatgggtaaatatttgaaacttctaaaaggcagaaatcagtagaaatatatgggtagacattttaaacttctaaaaggcagaaatcagtagaaatattataagactgaattaatttttcattagacttgttttaatcgaagtagctgcagtctggtattaaaatcatcacactgtcaattgttgttgttgttttttttaactgtctgtagaccaaaattacaagaagaagagaaacacacaaaggatatttggtaaaggcaggtggtcttgatgaataatgttcctttcattaacatatttcccttattaactgtgtaattaattgtacatagccaagggaagctatggaaattgcattttgagatgtatcaaagctgacttatgcttcagacttccatgcaatttaccattaatgaagccagagatggaagcctcaaatctataattattacttactgtttgaatgacaagcaaagaattttatcagcagagttttaaatgaaaggggattagcagctaatgttgaaattgttaatctttcttatgaaaataattttgaagaaaatgttttagtggaaagagagggttggggaagtatttgccattaaaatagcgatttcctgatacttcatgtgactttgtctacatttgacagcagggtgcaaatatttttgaaagtgaatgaatattttatagggtccagagctgctcatgcattctgggaatggattatgcaatagttccaaatgtcctggctggggtgagagactgtaagctagccagaggaaagagctgaggctaagaaaataaaatataggagaaaattatagaaaatccaaatatcctggctggggtgagagtctgtaagctagccagagaaaacagctaaggctaagaaaataaaatataggagaaaattctagaaaatccagatatcctggctggggtgagagtctgtaagctagccagagaaaagagctgaggcgaagacaataaaatataggagaaaattctagaaaaatgaaaattggtttattgtcccagatctgtacccttctccccctctgattgttcacttgattttagatggtgaatgacaaatattggtgaagaaaatcattccatgaaacactggtaaccatttgtccgaaacgccttcatggcagcactgccgtggctcagtacattgcacctgcacttccaaagtgaaggtgactgttacctgaaacccatgtgcctggcacacatgaccagccttggacacaagaggcctttgatcagaaactgggaggcactcccacattcccacaatgaaattccgtgggtgcctgtaccctgagttcatccaacacatggttactgatcatgtagggtgtaccaggctatgtcagacgttagagacaccatgaagagcaaacagttagcttatggggagtgcctaacgcacacctgccatttacatctttgtcctcatgattcttcccactgaaccaatggcactgactcaatatacgtggcgttggctggttagagcccgtgtcgctgtggacaggagaaaggacgtccagggagatggaccagtgtgccgtccttcacgtgtgttctggacttaacgtcacactcgagacatgctggctggtcagaacatctgggacctggaggcctgttaggttctttagaaagttctgggctcctcccacacgcggtgtccaaggacaacaggcaggtgaccacgtccactgcagatgtgcagttttcatctcttaaaaattctggttttctcaaacttgctgtctccctggtttcagtttgaaatggatttaatgggctagaacccctgtcagcctacgtcagcctgtgaatctttcacagaattgttttgtgttctttggaaagcagttcatgattgcaggagtcatttaataactggagcccggggggtctggaagaggtcgtacggcccctctgacctgtgggggataattcactcccaggaccatgcccggtcgcgatgcattgacaacgcagccctgtgtgcacacaggcacccggatgccttggtctgtgtttcaggagttgcctcatctgtggacaagcacatcacggcgtcccaggttaggttagtgattcggttgtctttacattttaaatttggggtttagctatgggcagttaattttctatggtactttgagcaaacttactttgacgaaagctgaatagtgccattcaatatctgaatgtcttgcccatgtaacaaaagcatgaaggctattggaaatatcagagttgtggatagaatttttcaggtttttatccagactgttaacttcaggtaacttaagggtaggtatgaccttgcttctcagatcaaatcattagggtctttccttgctgtggttctgtgaggggtgaagagtttaaacaatgacaaaatattttgcaagctaaagagctgaagacaacttaggtgtgtgaggaagggcaggtcagatgagcagacgggaatcctaggacgtgttgcctgcaggacgcggtgcaccctgcccagttctctcattcgcccgcctccactgctgttccccacgcgctgttccccatgccacagccactgcctgctcttccatggtgggctgcagcagtcctgacttgcatcctgcactgccacctgggaaccagggtggtcttccaaaagcgccaccatcaaccaccatcacaagcatctttggcttaaaactcatgaaagcttcccgtggctcttaaaataaactgctgagtccttgcaggccaacagctcctggtctgccggacaccgttgccctcacatccattccttctctgcagccccgaccttccctcctcccggagtggccacgccctcctgccctgggctccagccttcactgcccttccctgtaggaccccacccccactcaggccctgcccaggtccttagcatcggggactcggcccatggctctgagagtttacccttcagaggggccccctcagtgccatcccaggtgcaccccgtccccacacccaggctctgcgtcgtgactcttgtccgcatcttcttactactcactgttgtctgaaatcactttttaaagctgtgtttatctacttgcagatggtctgccctccagctaaagaaattaatgaggccaggcgttgtagctcatgcctataatcccagtactgtgggaggccaaggcaggcagatcacccgaggtcaggagtttgagcccagcccggccaacatggtaaaaccctgtctctactaaaaatacaaaaatttcgttttcgtatgatggtttgcacctgtagtcctagctacttgggaggctgaggcaggaggattgcttgaacccaggaggtggaggttacagtgagctgagatcataccactgcactccagcctgggcaacagagtgagactctgtctcaaaaaaaaaaaaaagaaaagaaaagaaactaaagaaatgagccacatgaggacagggtctttggccagctaactactgtgctcccgaacctaggtcatccctggcttataggacgtgcttaatcaaactggatgactgaagggacagatgactagaccaccacaacatcggcaggaatccgacagaaatgacagcagctcttagccctctgtcccaaaaccagatgaggcattcacatttcacttagaatgccaagcagacctcttttgccctaaatttaaatattaatagctgtacatttatggaaaacatagtataattctctgaattattttccattgcttataagcattcatctctgtattttacctatgttcacataaccttaatttttaagatgttaaataagataataagattcataaaattgttcatttaaaattctttgcgcttctctgagaatgacagcctgaaatacaaagtgatgcctctgtcatcatccccattattaaacagcttctttcttagtctttctgcaggtgacccctgtcaccccctcctacgcacactccctaatatgatatcttgctaaaaaatgcccaacgtaaaacaatccatcaatcgtatgaaagaacaagactttcccctacttagtaagagtaggtggtaaggaaaaaattacttatctttttaagtttattaattagaacatttctagaacacaatgtgttcactattaacatcttccattggggtttttgttgttaagtctttatcaaattgtcatatttttctgtaaatgtgtaacagaagtttagtggaagtcataaactgaaatcgaggatcaccaggcgttggtgcaccaggccacctttccacgcatcgcaggtcttcatgcagtccttctagaggtgaggcagagactgggccggctgtggactccaggaagtaccctgcaggtcacctgggcattgtgtaagaactcctttgtcagtgtgatttcttacaactctggactttgttatcgatttggaacatcaaaagccaaattataataaaaatacactaattaaagtttctactcaatcaagatagagccagttttcatgtcctcttaacacaccactttgcaaagagttaaccttcctttccctttgctcttcggaaagtacgtaaggtctgtgatcatgtcccagtgcctctattagaggcaaggaatctgtcctcttacagtgtttttctaacaggactttgaaaaaagcatgtcattttcttgacagccttatctgaagggcattcttaattctctctttttttttttttttttgagacggagtctcgctctgtcgcccaggctggagtgcagtggcacaatctcggctcactgcaagctccgcctcccgggttcacgccgttctcctgcctcagcctcctgtgtagctgggactacaggtgcccaccaccacgcctggctaattttttgtatttttagcagagacggggtttcaccgtgttagccaggatggactcgatctcctgacctcgtgatccacccgcctcggcctcccaaagtgctgggattacaggcgcccgccaccacgcctggctaattttttgtatttttagtagagacagggtttcaccgtgttagccaggatggtctcgatctcctgacctcgtgatccgcccgcctcagcctcccaaagtgctgggattcttaattctcagtgagtgaatttatttttcaatgatgaaaaagttttaaataaagcagatagttcagtagcgttcccggtctcaaaaccaacacgcaccacacgttgtttccccttctacgctttgttcctgccgctgctacttcaccttctccacccgaactgcataccaactggggactttctccggaagattccattttgaagtatttgaacttttctccactaccttaatggtttataattttctgttactccacagtttgattggtaacaaggcaaagaatggaaatggatttctaagtcacattaagacgcagggagaacagttttcaagggtctctgggcttgccagagattctaggtggtcctcagaataggtcagctggagacaaaactctcagagaaagagcttggaataaatggcattaattcacatccatcagggaagccagttgtggtgcccacaggaggaggcttttgccagtttcatctgtgttgaccacttcccagttccctgcggtaagggaagcatatgacttactgcagatacgtgtgggaatgcctcctccttacaaacaagttgtcaggaaagcagtttttaaaatgtgatcaaaagcgagaagaccccatgaatggtctttcacacactcttgttaattccttgggtcccatttctacttctttttggctttgtacggatgacccagaggctgaattccaaaaccgtgtgtttgcttctcccgagcaaactccaccctggcatgcaggcacacttcgagttggctgccatgggcctgtgccttttggtaatgtgtgcatatctgccctgcatctcaagttgcttgtttggagagccggaacaatgcctgtttcagctgttgagtaagacccgtaattccatggcaagtcaaaggtgctgccgtgacgggcacacggtgtgttagaggagcgggatggtgaagaagccggttcactccctgccgcctcacgttgtgggcattgctttctgagagtgagatggcaagttgaatatggtcgtatgggtcgggattcctgtttcaggaagagctttcttaaactaagaaatagtgaaactatcttctgatcctttaaccattatctgttcttctttgtgttcacatgtactactttgaatttctaattttaaatattttaacattcctgctgcataatattaacaaataatatttaaaatatgccagatgcagcaatctacagacaataaaataccttctcatcaagggtttgctgctcccgaagcccccatagctgtgtgtgctgagccaggacaatcaacctcatcgaacttctcctttcatcttttcacagttttgcttggaattcaattgtcctacttttggaattcaaaaatttaacatgaatatttcccgttcatgtattaatgaagacaggtgactgtgtttatttttaaagaaagaaaaggtcatcatttccccaagtggcagtggaagcagcttagtccttgcttttaaaagcattactctaacttgtgacttcaacacacaaacctgtggtctcgtcacaagaaggaaaatgtaaagggattctattattcgttttaacaaaaggtttgattgtaatgttcagtaaattaaagggcattgtgctgcaataggcgccattgtagaaaagagaagtatagccttcccagtaatgactgggttccccaaagcccagctttctttaacacgccttgttctacagtgggaagaagtctccactgctggcagcatcgttgtaggaacgaagtttcaccaggacagtttccactcgtcccatatccgaagacccacggagtgatgatgggcgcctccagtcatccgtggggactcactttccactgcacgagtggtttgattgatgagaaataatgccagatggaccggcttttgctcatttttaaatagtccactgagttttaggagtccttaggactccttaggagttttagtattgcatggtgggagtttattctcattattatttttaataataataataaatcatcttgcacctctcagtatctcacttcttcattgttacagccaacagatagatgccaaaataacctaatttctgtgactctgaatggagctgaaatagcactgacctgctccagcctttcttctgcctccccatgggttctgcggtgtctttggcagcagggtctgcaggaacaggtgaatcagcattggctgacccaggatcccagtgcctgtggacgggattcacatggaaccacatctggaccctttacaagtctccagatgcactaccccagtactcagaggtggcagctgcacttcctcctggtgccaacaggaaggcgagcatgtttcgtgtgagcgggtcctgcatcagatgcacacgggatgctggtgtgctcttcccaccggagaaattgtccttgttaactagcagtttagtgtcacatagtctcttaaacaggcatttcctaggatttcctctcctgaagacaggccatgaaatatttccctcttcaaaaaagaagtgaacagaagagagtggacatgttgtatttccttaaacaagaggataagagtctccccagaaccgcagtgcagccacagagcgtgggagggaactcaggagtctttccagtaccctcttcctctactgaaacactgagaccgtcccgcaccccatccccgggcacacaccttctactgtgtctcccatattcacgcatcacccctcaaaacctccttgggaacatagactctggctctcccctgtgagctgtgatgaccaggttacgaaggggtgcacccgtggggctcagtcagatggcctgacttgccggaaggctccacgccaaaaagtagctgtgggagggacccacaccgttctgtgtaagactgttaagaactctatcaacacaaagtccagtgccttcccagtgtgttcatgtgcgttcctgttccacagaagctcctttccatgttcatctctgcgagtgacagggtggttcctctcctgaagagaaggtgctcttgcaatcgttaacagacactgttgtgttctggactgtctgtgctccgtgttcctagaaatcagccccttgacctcaaggtgttgaccatttgaccggaagacggtgctgacgacatttgtgctatgtaatacattgtgaacacattctccctcaaagtgttcatggcaatcacacttttgttacacaaattttggggttctgtgtataatgattccattaaatgtggaagccagttggtttgcctgacacatggaggctgtttcctccaaaacccgtctagcagcacccagtcttgtgacccagtgactgtccttaatgctccaaccctaaatggtctcgtaggatgagctagaaaacaccatgagacagggactggcaggatggattcagaaacgggagaaggatgacaggggaaaccttagattgagttcatatctctaacaaagtagattatgtgagcgctgatggtgtcattctcaaagggtgagaacgcgaaaaagaatgcagccacatcttcagctgctgtggtgtggatgtcgtgtgctctgggatctacgtcagatagtgaatgttggcaacacccttgggaaacccacttcctgagtccccgtagctttctccatgaatggtttgatctaggaattcactcttccacaagcacatcatgtctaggccctcaggaagtatgagaatttgagaaggttggagacaccttttcactcagggcttatctagaaacagcttaagtaaaattcccttaatggagtttaaaaatatgaaaatgtcagactgagttctcccagccaagagcccttcaaaacccaaaattatagagcaagcagctctaaaagacgaaagacacacctccaaacgcttcctaaggatcagggaacagacagcaactccaacttccctaagcacttcagcctgcatcgactgagattcaccaccaattcttcgctccctgttttcactcttcatggatttcctgatgtgagcacgcattgtggtgcaatcccgccttcactggctcactccctctggtattgtcagcctcagtcagctcattctagagctttcttcataaagcttcaactcagaggcactgacggagagcccagagcaaggagctgtgtgaagtgggacacggtgtgagaaggggtccctgaccaccaggagctcacgccccggaggagacccagctgcaggtgcggtgcacactggtgcctggaggccactgagaaggctccaggggagatggagcaccccacctgggacctggactgtggagaatgagggagatgtgaaaaaaggagaagagttgtggaggagacttgtagagaagagctctctgaactgttgcccttccaaatttatacgactgctgttaggttcaggttgttacaggaacactcaatgagctgacacctgtctgtcatgagttacagtgatgtttgctgggcaaccccagaaaggaagatggcagcaaggtcatgtatagtaaaacattccaagttccttatgctcctttttggagaagttcttccaagtttcagaagattcaaaggcagtgttttggatgcccatcatcaaaataaaatgtttacctataatataaatcacttgtagagatttccagattatgcattattattccacagatattggctgagtgcttgctgcctgtgctgagcagctgaaacacagtccctgccctaaaaaaattaatctcatgagaagaatcagagcttgaaacccacagttaaagcaacaggaagaatgtgacgaatgccacagagacgtatgtttgaagtagtaactgtttgatgtggggggtgggttatagggaagaaagatcatggggtggggtaggtaatgggcatgtcctgaccggactcctggaggaggaagtgttgtctgaactgcaccttgaagtctgggtcggttcattacagaaaaatcagcacaaaatgtagagaaggatggcggtggggacggggcaaaggctgagaagcagtcttatgggatagaaagtatcagattagtaaaaggaaattcagaaaaaggacaatgctagtctaggcacccttggtaatttttttaaataggttatattttgcaccagaaacgccaacctggtcgttcagtgaaaaagcaactggaaaggggaagcgatggtaagaagatcagcgagaaggctgcagtgacgggccaggagaaaacccacagggcatttcagaggccaggctcaggctttggtgctgccactggctgctgggggctgtggaccaattgcttaccttctctaggccttggtttccttatctgtaagatgtgagcctcatctctgcattttttcactttaaagcagtaaattgtattctgttgaggatgtccaaagctgaaatgaaggtactcagcactgggggaaaaggttgccttacagtttgctgtgggccctggggttattcgttgccattctgcttatcttcattttcttttcttttctacatatgctatttatgtaacaaaagttgcagtgccttaagaaactaagccgtcccaccaccacactctctcacacatgcactcatctataaaataaaagaatttaaatgtcaaggttttttttctgagctaacttttttatgatttttttccatttattggggtacaggtggtatttagttacatgaataagttctttagtggtgatttgtgagattttggtgacatatcacctgagcagtatacactgcaccatatttgttaatcttttatccctcgcccccctccttctcctcccctcaagtccccaaagtccattgtatctttcttatgcctctgcatcctcatagcttagctcccacatattagtgagaacatatggttgggttttccattcctgagttacttaacttggaagaatagtctccagtctcatccgggtcactgcaaatgctgttaattcattcctttttatggctgtgtagtattccatcatatgtatgtaccacagtttccttatcctctcattgattgataagcatttgggtttgttccacaattttatagctgtgaattgtgctgctataaacatgcatgtgcaagtatatttttcgtataatgacatcttttcctctaggtaaatacccagtagtgggattgccggatcatatggtatttctacttttagttctttaacaaatctccacactgttttctatagtggctgtactagtttacattcccatcagcagcgaagaagtgttccctgttcactgcatccacaccaacatctactgtttattgattttttggttatggccattcttgcaggaggaaggtggtattgcattgtggttttgatatgcatttccctgatcattagtgatgttgagcattttttcatatgtctgttggtcatttgtatatcttcttttgagaattgtctattcatgtccttagcccactttttgataggattgtgtttttttttcttactgatttgtttgcttaaatgtcagttttaaaaacacctatagctaaatgcccactaccagggaaaagccacaaatactgtttaaattacatgttaatttcctaataattccagaagacgtctgagtagagttgctatacttgtccaagttcacatgcaggatgaccacagtatagacggcccccaacttatgatggtttgactttacagtgcagaagcaacacgcattaaatagaaactgaacttcaagtacccatgcaaccattctgttactcactttcagttcagtgttcaatgaatcatgtaagatattcaacactttatcctcagtaggctttgtgtgagatgggtttgcccagcagcagaggaaggtaggtattctgagcatgtgtaaggcaggctaggctcagctgtgacactcagtaggttacctgtgttcaatgcactttttttttttttgagacggagtttcactctggtcacccagactggagtgcaatgatgcgatctcggttcactgcaacatccgcttcccaggttcaagcgattctcctgcctcagtctcccgagtagttgggcttagaggcgcccgccaccatgcccgactaatttttgtatttttagtagagacaaggtttcaccatgttggccaggctggtctcgaactcctggcctcaggtgatccacccgcctcagccttccaaagtgctaggattataggcgtgagccaccgagcccggcctcaatgcactttcaacttaagaagttcttgggccataacccatcataagtaggggagcatctgtactaagctcccgtggtaccttttggttttgctttcattgtttaaaacattactttgctatgaaggcctagcttccccacagactcacagatgaaaagcatcttatctacaagccatgaaagagaaaaaagactcctaagatgtagttgggggatatttcatcagtttaatatcacaaaggatgtttcataaaaaatattgatagaagaatacagaacagatcaaattgaaatgagcagaacgggacaaacacagcccactggagtggcgtgtgcagagagatgtcagctctatctcagttttaatagagtcacgtgcctctgcagatgacttcattctccgtgaaaaaacatcgcgtcagtatctacctcttcctccctcctaccacccaaccttgggccacacaggctcagtttatatttttgccataaatttagaaattcaagagaacttagagtgtaattttgcttcctatagttaagataaatgtgagaatttaaatagctgtagtttatacgaattaagataatatccagtgcctcttttgcagataatattttcgattggattaaacctgctagggttcatcattttagaacccatcatgttttactgaaggaagcccatttgtttgtgatggattttatgaaaagagcatttttcaaagaaaagctaggacccagaatgattttgccaggaaccattttcgacctacctatttgtagaactctacgtaagcccaacttgagaaaagtagccacagaaacagactgggactatcctttcaccataactatcaacctcccagcttccctcacacaccagatttgggctagatgagctggtcagtattttcacaaaacttaaatattatatcatccaaaaatgtttttcctattagggtaactttggtacaaaaatatgaatttgatgttccataatgattgtctcaaaagaaagaatgtgtagcatttcctagattgagccatttgaattttgcctaatttcacaactcgagacatctctgtggggtgcttcttccatgcacaaggaaaccacgaggcttcctgggtgtcggggctggtgacgggagtagatgaactcgttcgctttggctcagagcagccctgatgtttctgttcctggcgcaggtgtgctcccaaggctcaaggtgtggtgggggaaaagcgttcgctgcgtggagcaggcagtcggtgcggcttctcaacggcactggagtccctctgcttttcccaactagctcaagcagggccatggtgggggtgacagtgacaacctgggacctcccaacagacggccttagagtgcccaccctgagccaggcgattgtccctcaccaccacacccacccagatgcgggggtgtcgcgcaaacagcacaggtgcccgatgcacctgctcccgtgtgagctgggccagcacagcagggtgtgtgtttgctgcatgggttcaggttggctgtggtcaaaacttccactagacggcacgatgacctgagattcccgcctcgccgtgtccagccctccctccctctgtgtctctttctctacctgtctcctggaacgggccccagtgggcagggagggaccatcccagctcctcggatcaatcgaaggggatgtcagggggtgggcagaaggtgagaagggcttggaccccgggcctgacattggaatgcgtggccgctttgcagcaaaggaccatgtgtacacatgcatgctttattttctcgtgtggacacacttggaacctgtgtctacacatgacacacagtaccttgcaaatccacaagcagagtgacagcagacgaggccgtcacttcctgtggtgccatagtgcagctgggtttggtcctttgaaatgttctttcttaaaatcagggcttgttctcaacggtacagatgaataagaaccgagtgggctgtgctggcggcatgggggtttttgtggaagggaattttcaggaggcctttgtttccttgtctactcatagtaatgctcaacgacaagcaccagaaaaattaagatcgaaacagccaagggttaaaatatttgcttccatccatttgtgtttgtttcatgctagaagctgtcccgcattttgcacagatcagagcagcccagtctctcaactgcatcacacccagtgggttcagaaacgtgcgccggttttaagaaaaatgacttccatgcaagcagaaatgggcacgcggagcagccccaccgagagcttggtctgagctccctggccctgtcgttaaagcatgtgataattgttgtcatctcagcggtaaactgattcccaaacaccggagtttatatttacatatgtaaaatgtgtgttaacaatgcacatatttcacttaacggttgcatggtatgatatgcattgtgcaccgtagcacaacgtcgcaccatggcccaggctcgtgagcaaggtgggcatggcccacgcggcgagtgcaaaggcctccgctgccttttgtgcatctgccggtctgggctcaccacctaggtgcgctcctgaccctgtgtttccctttcagtcctacatggaggaccacctgaagaacaagaaccggctggagaaggagtgggaagcgctgtgcgcctaccaggcggagcccaacagctcgttcgtggcccagagggaggagaacgtgcccaagaaccgctccctggccgtgctgacctgtacgtaccagccccgggggcaggaagcctgggttacgggcggtggaaactggccgtgctgacctgtacataccaggcccgagggcaggaggccagggttccgggcggaggaaactggccgtgctgacctgtgtgtaccagccccggggacgggaggcctgggttacaggcagtggaaactagccgtgctgacctgtacataccagcaccgggggcgggaggactgggttacaggagggggaaactggccgtgctgacctgtacataccagccccgggggcaggtggccagggtgacaggagggggaaactggccatgctgacctgtacataccagtcccgggggcaggaggcctgggttacaggcgggggaaactggccatgctgacctgtacataccagtcccgggggcaggaggcctgggttacaggcgggggaaactggccatgctgacctgtgtgtaccagtccccggggagggaggcctgggttacaggcgggggaaacagccccatcctgagggtctgcaaagccctccgcttctccttcccggcaccccccgcctgcagcagacttgccccctctgggaaggccctcctgggaatctcccctctgcgatgccatccccagcccaaccaacaaggaaccagtgtcttcctttcctccagcacgggcctggggacatctgcaccccagtgagcatcagctctattgttctctgtcaccgagtgacttgagacatgttcctgaacctcttggagcctccacgtcacatctgtaattggggtcacgctgtcgtccttgaagtattactgctgtaagggttagacgaggtcattagcatagcaccggtacgtcgcaggcacacaatcaacagtggttgcttttacagcatctttaactttacaattatttccacaaactgagcacctactacctagctagggatcactgccagaaaatggaaatataagccagcagttctccgagtgactctcgtggactggaagagacaccgcctcgtgttcccacagcacgggaggcactaagctgcttacaagatgaggagggcaaggactgcccggcgctggcgtccacctcactcatcctctatgtgtatagcaggttccaatgaaggttccacactttgattggttataaacccacccgccaggaggaagggggtcctagatatgttcctgaccagagtttcagggggaagtagatactcacaacgttgagtgatgaatgataaatgacagtgtgggtagagtttcttagttactctcctgaggaccctaagacaaggcccttgcgcatgtctctgatgcaacagagggagcttcgtcagctcacacttcgagagcaccactcggccacactcactttcagctcagcatcaggcgggaccagtgtcccctgtggccgaggccgtctctccgtcactgtgtccctgcctcaacccttcggagccggtcaagggatcagactggtgtccctgagacaccgcctgtccccgtaccagcagcacagccccccacgccagggagaggcactgcccttgccctccttccagccctcaggaagtgttacaggtcagaacagtgagaagctggaatcttgttttgcttcagaaactaacctggggcactgcagacctgtgtaaaatcccattcacccagctgggtgcacgcttcttgctacccatttagtgttcagaccagtttctatgaggtctgagggttttaaccctaaagagatctaaaaacagaagctgtgtgatttataaattttatatttagaagaaaagcaaaatacaatacatcccattagccaactaacagatatttactaagcaccggccctgtgtcgggggctactaacaggctctgggggcctggccactgtcctcagagaggagcagcctgggggaggagagggcggggagtgaagccggtgtggtaggacaagtgagggtggtggtgagcgggtatcctgctgagtcctgagtggagaatggttcgtggtaaatagccatgcagtaagcgtgcattatatgtctctgtgtgtctggtcatttacttagattgtgaggtgtttcatggtaaatattcatctgacagcacgccctccccaaagacagcccggagcgtggcagaaacgacctgccgatggggttttcctcccgtgtgccctgcagccttctgggctctgtctgtacagtgtggatgggggggttgggggcgagggacctagtgatggtgaagtggtccgtgctcagatgggacacaggcagcctccccaggtagcagccggtgccaacagggtggccacatgtggatgggcgcctgatgttctcatggggatcaggacagccctgcccattctgagccaggtgacgggtgagggggaaagcacctccctcccgagactcgcactggagccagaaagaagctgcctgcacctcctcccagggttctcccgacccatgtgccagggtgtgaagacacagcactgcccttcagggttgagaggccaccagggaagacagagaacggcaagttcacctcctgggagaaccctagatagaaatattttcatgaacacataggtttattctgagcaaacttgtattacctactttcttctccatactcttggccatcttgcttttgggaaggagatcttgtcctccgggagacagtggcttggcaaaagctctcgctgttgccaggccccagagagatggccgcctcctccatcttcactcctgcctcacctgcggccgctgcgctcttcacaggacacaactggctccaaaacagccacacacggtccaggaggactggcttccctgtggctctgtggcttggaaggcccatgctgcgctgtcatggtggggggacggcactcgagctgggctccatgctgtcctctgtgtcgcgatggaagcgagtctgcatgctgggcatgcactatcctctgtgcagggttggaagcatgagtactcggccacgctgtcctctgttagggatggaaccttcaagtcctccctctgcacctgccgctcccaccgcgtcctttccgcgtgctcaccgggaactcccaggtctatggaaagggtcctcgggaccacccctcccttctctcatgccccgccttccccatggagcacttccctgggtcattcttccacccaggagatggacacagtcgcccgacttcccagatgcaccctgatcggaatgagcccccaaaggagaaggaaacacacattatgcaatgcttggctggcaccatgctaggtctagttgtattatctcagaagtttaaagaacttaacatgcattttctgttttttgaatgtttaaaaaagaattatgcagcatttcgcttgtctgcatttcagatgaagaacagggatatgatactattttggtgccatatcctaaacaaaaaagtatttttggctctatgttgtaataacgagagagagagagagaaccaggacaaacaatgcagagagacaagacagagacaacgaagagctgaaggctcagggacaggaagacagcaaggaggagagtcatgtggggttcacatctcccagcttctgagggcattgctgctggaggaccacagctgcctcacagccagaggcgcggctgtgggcatctcccaggcccttgccttgcagcgtggtccagtgaggcagaggcccagctgatcaccgttcccaggagtcagggtcaccacactggccctgcgctgcagctgcttgagcagcatcctaaccatggcatcactggggcatcgtgagccagcatcccccgtgctctgcgctgcagctgcgtgaacagcgtcctaaccacagcatcactggggcatcgtgagccagcgtcgcccgtgctctgcgctgcagctgcgtgaacggcgtcctaaccacggcatcactggggcatcgtgagccagcgtcgcccgtgctctgcgctgcagctgcgtgaacggcgtcctaaccacggcatcactggggcatcgtgagccagcgtcccccgtgctctgcgctgcagctgcgtgaacggcgtcctaaccacggcatcactggggcatcgtgagccagcgtcccccgtgctctgcgctgcagctgcgtgagcagtgtcctaaccacggcatcactggggcatcgtgagccagcgtcccccatgcccgtggatgtgccacctctggtcctcacaagaaacccccccacttggccgacaagaactttggggtttagagcccgcccgtcagagctgaaatccagactccccagtgccatcctcataggctgtcttgggctcacctgagattgtgcgtgtgtgttgggaaaatccatgtccatttcaaacttctacagaagtatttgaaacatgtacaagggctgaagcactttggctaagcatagctttccttagaatactcagaaaacaatttatttctaaataaacctttggtttagtttttttttttttctctcccaaaactctaaacagagtcccctaagaggaatattttgccttggttacttctgagtgaccaaaagttatcatgatttgcttttaaagatgaatacgtgggtgattctcctaactctgatgattaagccagggttttctttttccttccatagaaaaaggttctgggcatatatgtcacctcgccaagaaagttgctggagagagactcccagcctggctgccttcccttcaccccttttgatctcagtgccagccgactctgccctaggatttgggaaggctgtcggtttgttggtgttggaaagaaaatatcccagcaaattctgtgtgggcctttttctttgctacctcacaggcagaagctgttctgggcagctgttctgccagagactgaggattcttttttaggaagagatctacagagtccttctcattaggctacttctcgaagggaaagattgtctaaaagcatcatctctgaactacaactgcaagtgcaccttccgtgagctcttcaggacctccagtgcaaagaaacagtgccggtggggttgtcaggagccacgttgatactccacacagttcagctgctcaaagttcagattttagatcctctttgctctctttcttaaaactgaaccgataggttggtaagatgtctggcctggtgtggcatggctacccgtccttctcacatcctccttccgattccgcttacagaatcttcgtgtggggagggtctcacagtgtggggcgagcctggccttcggggtggcagcagccgggctcaccgtctcctgggcgccctgtttcccgtgacttggaagacctaccctccagaggggccccaggccacggtgtgcttcttcctggatcaggcctcccactttatccaccagaagttacgttcatcctgccaggtgcacatctcagcgccggctgattctgaggccgaacccactaacatccagagtcttttccttaaggtcttcggtggagcccagggcctcgcgcaccccccaccccccgttggtgacagtcaagtttaacaggagaatcgagccttgtgttcatctcctgtaaccgattctcgttcagcctccagagcttgtggttcctgagtcactgcgtcacctccctctcagctcggcaccatctgctcgttttataaacatgtttttcacgtcgtcaagtcattgataaaaacacattccgcaggaccagtgctgagccaatcctcccccgtgacgcggatccaccgcgggacttcccaggcgctggttccagggctgagattgtttccacggcccggccttgcgatggggtcaccccagccgtccccaggtcccgagcatattggcaaaggctcatcagatgtttccacgtgaggctcggggctaaacacctccttttcatcctcgaaacagccctgagattcacacagggacagagctggggctgaaggaggttagggagcccaaggtcagcggctccccggagagtgcagcctacactaccccagcgcagacccagccgcaacccacgcacaccgctcttgcagggccctctctggagcagaagtgtggctggcttagcatgacttcctcccccactttttattacaagagttttaaacactcaagtggaaggggtagcgtggcatcgcctgcacacccaccacccacgctggccagccgcccagtgttggccgtattagcgtgacctgcgagcacttcatttattttctggctggacgacttcaagtaagtatcaggcgtcatgacgtccaaatactttagcctgcctgcaggtcctaaatacaagggccttctcctaggtagctgcagccccgttataactaagaaaattaacaacaatccctcagtgccctctaacacccagctgtgcccatctgcccaggctttggagacagcagatgagcaggtgaaaccacagaattgcatttccccatagtcctggaggccggaggctgcggtccaggatgtggcagggctggccgtgtccgaggccctccctggggcttgcaggtgctgtctgtaactaagggtcccctttgtttaaggacagcagacccactgcactaggccccccctcaggacctcaccttcacttactggcctctctagaggccctgtctccaaacatggccacactccgcagtcctgggggttggggtcgtcacacaggggcatcagggcacagctcagcccacagcgccattgctatcacacactcccagggactcccgccgctttctctacaacacggtctgttatctgttgtctgttttgttttttccaccaggatgcagtcaagattcatcattgcattttgggttttgtgtctctttcgtctttttaattttgaaacagctgtccctgactttttttcctgatatgaatggtacctaataaagctgttcttttagtgaccactttcccattccaaacaatcacagactctccatgtggaagtctgtagggaactctgcaagcccacgagaagctcacctgcccccttccagaacccccgtttcccaagaacccggagtgtacaggtctccacgatgctgtaggaacatgaccagcctgctctgcgaccttgccacgggccacagacttcaaaccctgccttggccctgagctccaccctggccctcccctgtcctcccccttcctcccctgtcttccccctcctctccgtcctcctttttcctcctcccacctctttcatggttccctgtgttctgattggccggttgagcagtcctgctgcagaacgatgctttccaaggcatcccgttgcttgtggtcttccaccagcaagaatgtggaggccagccctgtgagctcacagagtcacagttgtgacgggagggtcgcccctggccatgtggcctgtaaggggctcgaggagtccggatagcagcgccgaggtctgctcgtggtgagagaccccgagtcccggcacactgtgggggggccgcaggacggcggcccggggtgccctcgggacccctgcgctccgagactcgaggactacgcgacaaacggcagttcaggctgccgcgggtgcaggtttgctcatccacggccgccgggttagggagacgattctggcacgttccaggcaggccggtgtcgggagagggtccctgcgtgtgggagacggaggcggcggggtcggctggagaaccggggaaggaacgcggcggcctcctcccgcgggaagaggcccaagccgggctcgccctgcggctcagcgaggagcccgccctgccggcttctgaggacgcgccccggaccctgctctcctgggcctgaggtgacacgttctgtcgattgaggccccgaggtttgcggaagtctctggccgcagccgcgggaggcgcaacacgctgaggctgcgcgacgtggggcccgcccggacccgcctccgcccgtgtctccccgcagccgtctctgccagaactatcggaagagaccggaactgttggttttgtgtctgtgagaagagcagcactgggaataagtcacctgctgagctgacagcggaaacgaaggacaagcggagtcgcctagcgccgtcgctgcttagcccagaaaacggcctcgtcagcgccctcgacctgtttgcggaccgcttcaggagctgaaggaaccaccgaggttctgcggctgaggcgggaggcgggactggagacggggccgggcctgtccctccggatgcggggggcgctgccctgttcagccgcagggctctccctgcctcctcctccggccacccaggccggaagcaccccggcccctcctcagggactctccctgtcagtgagatcaaccctccggagctgctgtgtcttcacggagccgcagacccgggcggggaggcggggccttcggctgccgtggggtgtggggggccctgccctggccggggtgtgccgccggagctgctcccacccgcttccccgcttcaccccagcgcctctgtggatgccctttgaccgcgacccctcccgtgcggcggaagtgagttgctcccgcgagctgtttgggcgttttccacacctgcccatcagttacgcctctagggagctaatgtgtaggttcccgccgaatttcctcccttacttttccagacgcgcctgcttggcacagtctgccctgcgccccgtgctgtggggtcagaggtcactgccttctgcggctcccctggcagccccaagaccgtcggtcacaggtgcagcttctgcccccgatccacaaaacgggcgttaatctcaggcagcacagccacaagccagagctgttcttctggtgataccctgtgtcctggtgataaggcgtgtgagctgccccctgctcctagtttcagctccttggaggcgccccccagccgtttgtgtctctgtcttgccgccgccacactcatctgcgctgctcgcacagacgagattcgtcatcagtgtcgatggacggcctctcggtggagccgtgcagacagcgtggccctgcctgtctgatatctgtgctcctgttacagcaaactgttctagttcctgcgagaaagtcgccaccagcgcacacagccacgcctcgctgtgtgtctggagctggtctctgggttgcccacactccacaactgcaggctggctccaggcggcgctttctccgtgcaggcaccaggtgctgctcagggcatgggaagccaaacccaggtcgctccaggtgctctgggcctggagggctgcagggacagagcgccagggatgggcagtgtatgtggccaaagcaggctgtctcccattccggaggccagaaatggaggtcagggtgtcagcagggctggcttctctggaggcctcgctcctcagcacgaccacggctgtcttcgtcttcacacgggcgctctccctccgcgtgtccccagcatgactgcggctgtcttcgtcttcacacgggcgctctccctccgcgtgtccccagcatgactgcggctgtcttcgtcttcacacgggcgctctccctccgcgtgtccccagcatgactgcggctgtcttcgtcttcacacgggcgcgctccctccgcgtgtccccagcatgaccgcggctgtcttcgtcttcacacgggcgctctccctcccgtgtgggtgtgcagagtccttcttcctaacagcacgccagtcatattgcattagggccgcccaaatgccctccgctcgcttacctctgtaaagaccctatttccaaataaggtcatgttcccagggctgggactccagtgtgtctttttgggggagggtacgcagctcaaccctgggacctggtgcctccaagtcagctcagtgactgggcgggcgctgcctggccacggcaacccccacacacctttggcgtctgttccccctgcattctgcccccgcatagccctgcctggggagttccttctacacagatgcctgagatgagactagtgtgggttaaaatcgcttcaggtatgggaatcccccagggcttgaggctccttctagtccacctgccccaggtcacctgcccaacatgcttccgatcccattggggggcgactttctgagagatctgtctgtgggggatgccagtgaaaccatttaagacatgagacactaaaccagccttgtgaccatgccatttggggccactgttgctcctctgggacctgcttttgacgcgtccagtgtggaagccggacaccagcctcgcgctcggttattcagctcagcggtgggcagcgtgcctcctgagtggtgggtggggcaggtctcattttcatgaccatctctggatgtagcagggctttctggatatgagccccagcctgtcccagtctgcccagatgcagcattgtatgctgagctgcggaggccctgaatgacactcagctgactttcctaaatgttcgatgagctttatagcttgagctgagcatttcccaaaggcatagttggaagcagaatgtctgcctgctgactaaggacaggagcgtgtgggaggaagaggacctgccccttcagaatgcgttctgtcatcacgctgttgctggtcttcaagtgcccaggtctgcaaagaatcaagcccatgtagcttctcagagtattgaaacaaacgtggtccgatcatttattcctttgcctcaactatgacaagttcaaaggcctttctgtgtgtgagccgctgggatccctaagcagcactgacggcccttgctgacggccagcagccccgggatgtgcctttgcagccctcagacctcgatggacaccataaactcggagcaggagcttgtgggtgctggtgccaactgtggagcacatcccggaacatgttctctgctggagtcaggactccctctaggagcaagacaccggctccacctctccacaggccacaccatcaacatgaagaagagggcctcctgccagcataaatgactgagcctaaaccttcacagaaagcagaggcagttggagagcccgagagaacacctgagacccctgagtggaaggaaccccattgccgagttccgtgaggcccctgggaggagggaaccccattgccaagttccgtgaggcccctggactcagcagtggcttcacagatggcctcacgcatcctccaaacagcagcaccgtggagcccatgtgctggtgggaggcagattcttggccctgcagagcagcttcctgagtgtggacagcaagccaggaggcctgggggaatgccgtcctcagggatctgtgtagcaagacgatgttccgggcagaggagtcttccacacgctttcctcagatgcagtggggtgggcacgggaggttctagatcatgattaatgactataccgccgcgtcctctagcatgcttagctgggccatctcccaaggctctttgccatagtaataatcaacaagaaattgtgggatgtgtctcttctgttggcatctatgaaaaatcgctccatatgttctgccaccacggggcagcaagaacacgctttgccagcttggctgacctgcgcagttgggtgcgtgtccaccgtcatctcagccttgctcctcattgcttgctgcgtgccatttaccacaacagtgctgtgagttgtatgttatcatcctgcattctccgaacactgaacagtttacccaggatcgcccgctggcaagcagtggggctgggagtcaaaccctgtgctcccctgtggaccacgaggccgtggccacgtgaatcgttccatccttatgagtcttagtttcttcagcctaaaacgggaaagtagtccctgttctgtccgtggtccaggatggccactgggtccaggatgagagaagaggatctaatccgtgaaaatatggaacatctgagaaatttgaaatactctttttttttatatttaaaaaaaaatttttttgagacagagtttcactcttgttgtccaggctggagtgcaatggcacagtctcagctcactgcaacctctgcctcccgggttcaagcaattctcctgcctcagcctcccaagtagctgggattacagccgcccaccaccacgcctggctaatttttgtatttttagtagagacgtggttttgccactttggccagactggtctcgaactcctgacctcaggtgatccacccacctcagcctcccaaagtactgggattataggtgtgagccaccgcggccggcctgaaatattgttgaacaaggcactaacgcatgataaacacagtaaagggtcagaaaaggaacgtgcacagtgggttaatttaacccaatgacattaactcagttatagggccaggtgaaggaagactctacgtgagttcccacattttcctggcctctcagtaaattctcagactacggttttgatagagcacacccgttcttaatggaaacatgagccccaggctgttatgaattctcaccctgtggttcccgccattgctctgtgttgcctccccagggaggtctgatatttcatttgacaacagaagggagcagccttcagttccccgagcacaggccagggctgattgcgcgtgggcctgccctggcttcatctccagcctggggttggccttgagaggccccaggccacctgcttcccttcacttcatagaacacgaagacccctccacaggcctcgcacgtcaaggaaactgccctttaggggactcgggaactggatggcatcatcctatttgctctcaaaacatctcataaaaagtaagagaatcacaaaatagagattcgccaggcacatgaactctccgcacgaggaacggttgccgccccctgcaggaatcagagtccgccctcctccacagcctgcagcgtcccttggccctcccaggatggctccaagcatttcccggaggttccaaatgaccccatattacaaacacaatgattttgctggccaggcacagtggctcatgcctgtaatcccagcactttgggaggccgaggcaggtggatcatctgaggtcaggagtttgagaccaccctggccaacatggtgaagccctgtctctactaaaaatacaaaaattagccatgtgcagtggtgcgtgcctgtagtcccagctactcgggaggctgaggcaggagaatcacttgaacccgagaggtggaggttgcagtgatccaatattgtgccactgcacttgagcttgggtgacggagcaagaccctgtctctttaaaaaaaagacttcgctggtaatttcaaaagcaatatgttgacacaaaatcaaatatgcgatcaggaagtaggagctctccgaagtcatggaagccgggtccttgactcagtgccatctttaaagggtgacctcgggggaaatgaattcggctaaaacaattttccaccaagaagcccatggattgtccacttgccagcagggctcaggtgcccatggcagattccccctctgccatcgagaggagagggccgggctcgtagaatgcatgtctaactccccaggactcccgagctagggaagcattttcttaattttccaatgagaaaatccagctggcacttgtctgctgagtccaatggcagtggccactttccccgtggcctgttgctcacagggcctggcagcagggacccctcagctgaggaggagctcccagcacgctgccctgatgcctcctctgccctccgtagaggccaggccactggtctcagggtgccgtgggcaccatcaaagcacgagaccaagccaggtcaaaagcctgagggctccaggctgcgctgcctgttccctgccctgctccctcctgaccctgctcttggtaatgccttctcagacacgtaagaacggtccgcagttgctggtctcacaagtgcctaaaggtggctgtgctgaaaatgaggcagggccctagaggcccctggaagcagccagaagcccctgcttttattcccacgctctgtgtgggctgcagcaccgggcccagcccagcacctctgaccacagcctcatctctggctgcggtgtctgtgtggccccactgtgaaactgggtttctggaatcaatgtttggagtagtgtgtgtggggtgttcagatgtcagagtcaaccagtttttttctgatgatttgtattacaatttcctgccactgccaattttcactctccaagaactaatttgtgcaggagctaaaagccattgagtccctgggatttttgcatcattcacaccttcgttcagagctgatgggatgacttgcagcttcatgacattcctgaggcattcagctgcatagagcatgtgcgtatgtacacatgcattcttctcctctctctagatgttttatcttatcccatcttgtcacccctgaaagaggctgacattcctacctgaaggaaggtgtcaggacagcatccaacctggagtgtattgatctctagtgcacagtactttcctagttcaatcagttaaaacactcactaagttttccaagccctaggatttgttgttttaaaaactgtaagtaaaatctccaagaaaaatgaaagaattgcgtagagaagcagagtccgtgcagcttcaccaccaccacactgctccatgattggggccacttccttctggtgccagcgcccacaggaggtgcgcagcgagtttggagtttggccacaggtccagaggggacccacggccaccaagcactggcctccgagggctccagcgagggtgcttttgttttctcagaaaagatggaaattggtgttgtgtgcagcaccaagaggttttccctgggacaaacggcagcagagccgagatgttgttgcttccagatttcagccagggatggcagtgacaggccctctggagtggccactaccatcacaccagctgcagcagggaggcgtaacctgggcatcctgttccacgcggcaggcaggaccccacccccacccccacgctggggaggagctacagctgcccaaaccgtagctgcagacccaggcagccctgcacacttaggcacccaggaagaagatccttgcccctgcaggaagtgcctgttcctgctacctggattctccctgctgttggcacccatgctgatcttggagcaaagtcagggctgagcccgggcgctgtcacagcccagcaggtgtgacactctgggcagtgctgacacaccagccccctgccacctcagccccctctggactttgggcaccaacaagcatgggagggaagccgaaggagggctgagggcagctcagctctggcctgcaggtgccccttggcacaaacagcctgggtgccatgaatggcagcaggagacagagattcctgggcaaaagggggcaggtcctccatgaagcaccaccttcaggccagggagggtttgaaggctgggggctgggctgcaagtcctgtggatcagagtgggaactcatggtgccttttccaggcctgcccacggccactcgtgggccaatcagcatgtacttcctcccctctgaggcccataaatgccccaggcatagccagagctgggcagacatggggatgaccagctgcagagaggagctacccactccagagcctcccctttgctaggagctgaacactcatcgggaccccctggctgcagaaaggagctgccccctgtgggagactgagctgttctattgctcgataaacccctcttcatcttgctcatcctccacttgtctccatacctcattcttcctggtcgcagaacaagaactcaggacctgtcgaatggtggggctagaagagctgtagcacaaacagggctgagacatgccccctgctcgccacactgtgggtgaagagaaggagagaacagctgtagcccttcagggagcccagacctgggagctcccggagctaggcctgtgactccatctttgggaccctgtggttcctggtatctccaaacttccaggagctaccatgttcctcagtgtcaaccatggaagctgcttgcagtgtgtctggtctggccgcagcctcacagagagcccgcacccatgctggcacctggagctgcccaccctgctgcagcacccagcgtgcctgactggtgtggccagaccccgtgctcctcacacacccctcgccactccatgcctgactcgcccttggcaggcatgggacccaggctggtagtgtgagccaaacgtggcctgccaggcccagcctgagcaaaacttgggcaaaggcgccaccggccacagagatttctggccagaaaaacaccaccccaaagatcctgtaacacaaagcgcaccttgcagagagaaggaagcggccacacaccagggagttgggaggtgcaggaggggctcttgcggcttccactcctctgtgagctctgcttgtcgaagtttctaaaaacagagcaaagaggagggcggccacagcaagcaggatgggggttatcccagaaccaaagccaagacagctctcatatcacacacgtcacaagtgcctactgtccccccgctgcgcccggcttcagcagccgtcaggttactctgtctgtccgagcgagtttttatgccagtctccaccagtacatttttcctccatttcctctttatctgcattttatttgtctcttactctccttttaaaactaaattccagtaatcttgaggacttaactgttcattgactatgaaactttctattttgaaacgcgggcgattgcttaacgttcatatttctgtttacctgctgtgtgttgccaagtgtgtctgtgatttaaaggccagcatggtataaaattctgcagaggaacccctgaccttggtgtgtgaactccacgtgggggaaaacaccaggatatctccattctgctgagcgggagctttgtgccagttccccacatgccgttcgtctgcctcccacctggaggatcacaaacggaggggaggatgggagcaggaacattggaaaccacattcagaagggtgtgagcagagtcctgggagaggatgcgggtgggccctggagcccgggcaggggtcccacactgctgggctataggccctggaggctgtttgggagtcccacactgctgtgtgatggaccctggaggctgggcaggggtcctgtgctgctgggtggggggccctggaggccaagtgggggtctcacactgctgggtgggccaatgttcctctgacccctgcactgtgtccttgcagatgaccactcccgggtcctgctgaaggcggagaacagccacagccactcagactacatcaacgctagccccatcgtaagtgcactgccgggacaggggccccaggctttcccttgggtggcacggacgcggcaaatcacgtgggaaggttctcgggggaaatcacgtccccacccagctcagcgtctctgcggtggacagggccgactctgcccattgggctcccgccactcccctgttccttcaccagcggggctgtttatgagccgtgtgggtcccggctcacgctgggcggtgggttccgtgacttgtagaacatccagcaatggtgactggacagtttcctgactagaagacatggcttttaggagaggttcgtagtgggtgccgttcctctttcctggagctacacattccctgtatattcatggggcatggggacatgaggcctcagtctacgctttttgtaacaatcagtggcttggaggcaggtccagaatttcaggttcgttttcctgaagtatttccagtgaatgggaccctgtttcttatgaaagagaccgtttgctggctgttcctccccctgggatagacgcaggtgcagtggagatcgggctgtcctgtgtttctggggacgagtgtggtggcagctcctgtgccgtgagttatgagtccctgtggcctgtggtccctcacttcccaggggctcctctcagcccatgctagacgcggctctcaccctatttaactctgggcatcccccttccctgtcatgacctgtcgggggagcagggctgaatggggaggtttgcagccctcccagagtgagcagaggagggagagatatgagcatggagagggctgaagccacaggctggggacactcggactgggtgttcagatgagcagtgatggtggcaggtggcgggggcgggatgggacactgtccagggccggggctttggagacctggcggatggcactttaaaccagtggtggagaggctggggctccatgcagatttatggcggacactggttgtcatgtttccccctttaaacagctcttctcaattctggtcttcagggaaggatgaggacatctcactaaaattccaaatttgcctttaatcaaacatggtgcctgcaggatgcaatgctgttctagggctgagtgagacggggcaggtgatcgaggcacaaatcgcaccctacggtgtcccaaagtttctttgctcgtccatagggagctttggatgaaagtattggcccaactgcctgcaggccacggccactgatggcggacagtgctcagctctcggctctgctgatctcagcagccactgatggtggagggtgctcagctctcggctctgctggtctcagcggccactgatgacggacggtgctcagctctcagctctgctggtctcagtggccactgatggcagatggcgctcagctctcagctctgctggtctcagcggtcactgatggtggagggtgctcagctctcagctctgctggtctcagtggccactgatggcagacagtgctcagctctcggctctgctggtctcggcggccactgatggcagacggtgctcagctctcggctctgctggtctcagcggccactgatggcggacggtgctcagctctcggctctgctggtctcagcggccactgatggtggagggtgctcagctctcggctctgctggtctcagcacacctgtgggataaagcacgctgggaagatgtccacatgcctgagccagtcccgttttcccgcaattcgtggcccacacagtgagcatgttcagctttgagagactgaattcaaagtgaagaactggcctagtgtacttggtctacaccacctgaacccaggtttctgtttatgtgttcattcttaagaaggaatcacttccttccttccagcagaggttgactcccaagcttggttccgtgtgggtttcaaagatcctcattcatcttccttaataagatgtgatgcacatagtatttttctgtcatcaattctaattcaaaaacatcaaaccaaagcctcgctgatgtgccagcctctcacttgatgaacagaacgtgcgttctggtaaagccaggtgtgcgcgcctggattccgttcctgtactatgtgcagcagagttggcaacacgaaaccgtccgaaggaaaagaaaagccatgttgaggtcccttttccctgagatgaaccatttgatgaagccagaatgaggaataaagccgtgattcacaagcctaaaagacgagagttcagcgttgcagctgggcccactctcccccactcgatgggttccaacttgcagatgtctgcgctattccaggccacagccaagccccagcgtgggcagcagtgcccagtgcagcaactgtgtcgagctggaaacggtggacagctttcatcccatgtgggaaccagagggggtgtgtgtttgggggatgaattcctgcacattcatgcaactccctctccaggccttactgggcaggagcttgggtgagaaggcaaggccaggagggagaagtaattttatggtacattttgtgtctttcctttatttcataccacaattcttttttttttccaaatttgggttgtaagaatgaagcagaagaaatcgatggtgcctcttctttatgaaatagctgaaggtacaatgataattaccttcctagcagcagctgaatgaaaagctcacaattacagcaaaggaaggccctggctgtgcaggataaaactatgataattacatctgtcatatttgtacttagtcctcattacatttcagggaaggcatccagtggtaaataatgtgcaatctttgcttttaaatcagaggtcatgaaagtcaatgggaattctgttttccctcgtaggttgtctgagagagaaacccatgagctacatttaaaacagcctgattattactgaggacaccaagttgaggaatggtgttcacgcaacagcccactcaaacacagcacacaagctttattaccaggacaactctgaaactcccagtgacgtgtaaaaactagcttaattcttcatttcactgtctattaagggagaaaaaaacatcatttaaagttttaattcagaatgcatttaactatgtagggacagagtggcttttcagaaaaagaagagaggttggatgttctgactagcataagaaattggccaaatatgggaatcacttcagttatttacaaccaaaattctgtgtataataatggtttatattcagtattttacttaagtaaatctcaactcctaagaatacgatataaaaatatttcaagttcaaaagtcaatctgctgactgggtgcagtggctcatgcctgtaatcccagcactttgggaggccaaggcaggcgaatcacttgagttcagaagtttaagaccagcctggccaatatggtgaaaccccatctctactaaaaacacagaaactagccaggcatggtggtgcatacctgtaatcccagctgaggcagaagaaacatttgaacccaggagggagaggttgcagtgagccgagatcatgccaccacactccagcctggggtaaagaacaagaccctgtctcaaaaaaaacaagtcaatctcccattgattactgaagctacaatttcccaataaattcccatattaagccttagtatttggaaaagagacttgagaagtcaaatggtggttttcaagaaagcgtttcatgcaatttgctttaaatgttaggaaaggcaggtggagatgtgggcaggtggagatgtgggcaggtggagaggtaggcaggtggagaggtgggcaggtggagaggtgggcaggtggagaggtgggcaggtggagaggtgggcaggtggagaggtaggcaggtggagatgtgggcaggtggagaggtgggcaggtggagaggtgggcaggtggagaggggcaggtggagatgtgggcaggtggagaggtaggcaggtggagaggtgggcaggtggagaggtgggcaggtggagaggtgggcaggtggagaggtgggcaggtggagaggtgggcaggtggagaggtaggcaggtggagatgtgggcaggtggagaggtgggcaggtggagaggtgggcaggtggagaggggcaggtggagaggtgggcaggtggagaggtgggcaggtggagaggtgggcaggtggagaggtgggcaggtagaaatacctacagatgaggtgtgtgcttattctctgtgcaagatttcagagtaaagacgtgacacccatgcccttccccaaagctggccagatcctcttaagatgttaaggtcacagctgccagaggccggggctggtttgggagcagaaactggcgttcccttcacctgccccgcagtgggtgcctctgccaccatggaggctgttgaggactgcaggacacagtccagtggtcctgacatgctgagtgcttcatttctaaaatgagctttgtttggaatattggggaaattgtggctaagtttttcatgcagattagggtttctaaagatacttgtttagtaattatcctctgatagcataaggcacatcactaggccatctttacactgtgtattcagagagacagaggaacacacctcactagcatcctagttcatatgacatcttcataagaatcagtcaaccaagggataacagagtcaacacagacaaatgggctttatttttattttaaaaaagtaagccaggcgcagtggcttatgcctgtaatcccagcactttgggaggccaaagcaggcagattgcctgaggtcaggagttcgagaccagcctggccaatatggtgaaaccccatctctactaaaaatacaaaaagtagctgggtgtggtggcacacgcctgtaatcccagccactctggaggctgaggcaggagaatcgcttgaacccaggaggcagaggttgcagtgagccaagattgcaccactgcactccagcatggatgacagggtgaggctccatctcaaaaaaaaaaaaaagtaaaaacagaattatactgttaattgtacttgccttctggctgttgattttcatgaagtcacttggagtgagtcacactggattctctgtggtaccggcctctctaggcgggatgtgttgctgcagaagcccctgtctggggagaaagcgctcagaaatgaccgcacctcgccattcagatgcttggccccgcacaccactggaggacacagcagctctgtgcttgaggaagcagcatccttccttccttctgtggttcactgaggacagcatggacgcgtgttcacgggccgcagaccgcctgacagcttggcgttcacctaataaatttacaggttttcacggacagtttcgggatgaccaacaccaggacacacacatacacacagacgagtctgcacatgcacgtgcactggaatccagagctaaaggacacttagaaaccgcatcatccaagctcctcactccctgagctcacccaccatacagatatggagactgaggcccggagacgccgacgtccaagctcctcactccctgagctcacccaccatacagatatggagactgaggcccggagacgccgacgtccaagctcctcactccctgagctcacccaccatacagatacggagactgaggcctggagatatgacaggccttttcccacagccgggcagtttgtgtcgggaacataacagtcatacaaataaaaagtatgttgcaatgaaatggaaagtcatgagtaggaggcgaagggtaagaatgaagaccggaggaagccagagtaggtgccgtgtgatcgctgggtggggaagacagagggacacacacccaccatgtccggttgtcacgcagatgccctcattggaaaaagcaatgttagtagaaactcacttgatttcctccacagccacttatcctgcccgaaaaccttaaatgtagtaaaatctctgtgtggccagttaagtatttgcttgacttttcctcgaagcctgcgtgagaccacaaggaggctgcctgtggcctttgcagttgctgcttccacaaaatccttctgcccagaataattttctgttcaacagaatgtgcctggaattaaatgaatgtaattgtctcctgaattattgtgaaaccgatgacacatgtcaccactcggatcatcatgctgttcccgccttcccagtggcccccacaggacggcaggtgggcgggagggaggtgaggccggtccccactcagtctgcacagcccacacttcctgttcagccatccccctcccagcaccctgactgtatttgctcctgtcttaggcattggagcaggtgatgggtgtgtggactttaggacaccttaacaactcagacctaaatcaacagtcaccttatcgaccctcctgcaaccctgtccagcattttactttcaatcacctatttctcattttgaaagcaactaaatgtgctagtttgaacatgcttacaattttaaaatgtgttgctgtagaaattgctctgggcaaaaaaaaaaacacacacacacacatttcagaaggaggcggggctttccttttcatgcattactatttgcaaggaagagacaggggtctctgtaaatagctgtcacccccaacaaatgcatatttcaaaaaatcaaaacttatttctgctaagcatttttctactgaaacattctaattggggctttcagcgacggtaacataattttacctgtattgtgtgtgttgtggcgaatttcaaaacgaggtccagttttaattacgaatcactaaatcagatgcacaaaaagcttttctccctgcttccccccagcccccggctagcgtcaccgtgttgttctgtgagaataacttacatctgttcctttatgctcgcccctcttttatggtgaacataattataaggtgcatttggtgccttcttttgtgctgacagccatcatctctggggctggtgacggctgcacggggactcactggctcgctgttaaagaaaacgtgccccacgtcagcttcccaaatgcagcagcacttaaggtagcaccggggccaccactgatgtcctcgtgcgttggcttaaaattgcatagggttaaaatttgctcatttttcactgtgttgagaaatgttttcttaataattaccttgaaatctgaacattgtaaatctcgaatcaaaccctgatagcaaaagagtccattttagtcctagacacaatagaagaaaggactgtgcgtcagatgcacaagcggctgcctccccaaggtgaggttcccccagcgcagcatccggctctccgggggtcggtctctgcagatgcttctgggaggtgtggggaggagctggtgagccctggggatgatagtgatgtcctggtatcttcgtgtcctttgcagggtggcctgggcttgccctctggaagacagaaccacctccatctgacgcccctcagcaatgtgctcaaatctcgcttgcctctcaaggctttgtcctcaagttcttttttctgtgcttaatcttcgaaataaatgtaataattatggtcttctaagccaaccttctcccattggagctagcaagatgcgttcggacaaactggggagccggagagcccacacctgccctctttgtttctggtccctgcctggtggggaaacagaacaggaggccactcccagcaaggcccttccgccccggctctgccacagacccaggcccaggctgaccggctgtgcctgtgccccctttccaggatacacaaaaacaagcccccacacacaacgagttaactccagcagggaagcagcaggtagcgctagttcgttctcccaggacgctggcaagtttgtccatgaggcctggaggaaccctgttcacactctccattgagagcttggagctcagcctcaccccagccagccctgtggctctagcaagaggctcgttctcctgaacacagggcagcctgggtgggctccgtggccaggaagctctggggtcacttgcaggctggaaagctcatccatgtcatggggtcgcacctgctgagtgggctaacaacggctgcctgccctccttgggctactggtcttcatttctgttgatgctgctcttagaacctcaacctcaggtataaggaaagcatttcagacgcagtggttcaggctcaaggctcgggacagctgggtccctacctgtgccgggtgctcgtttgaatcaacaaagggcaagttgtgtgttgctcagttcaggagatgccacctttccctcttcctgaacccaggctctgcttcctggcttcctaacctccaggctccctaacctctgggctccctaacttccgggcttcctaaccaccaggcttcctaacctcctggcttcctaacctccgggcttcctaaacaccaggcttcctaacctcctggcttcctaacctccaggcttcctaacctcctggcttcctaaccttctggcttcctaacctccgggcttcctaaacaccaggcttcctaacctcctggcttcctaacccccaggtttcctaacctccgggtttcttaacgtcctggcttcctaacctccgggtttcctaaccttctggcttcctaacctccaggcttcctaacctccaggcttcctaatctcctggctaaccgctgtggtgtggtcttgtctctgcagatggatcacgacccgaggaaccccgcgtacatcgccacccagggaccgctgcccgccaccgtggctgacttttggcaggtgaacatttttaaattaaaatctctctttctgaaaagaagatctcaataactgggtcacgaatcatgtcttgaatctgattaggccaatcaaacttcttacaaatgctcatcaaatgttacttatatcagaatttcagtctgttcatattttttattatcaatcttttgttttccaaaacttgagtatgaaaaaattccctttgagagatttaatgctttcaagatcattacttttaagccactttacatttgcattttataaaacagcgaggataaagttagtaagtcattccatgttattgaaatgtgcctgttgtccatggcgttgttatgatggcggtcacagcaggacccaagtacatcctctgtcatcctctcctggagtcctgtagggcatctgaaggccaggccgtgcttctctactcgacgcaagcccaggtcacacagatgaaggcacagacgtgagggctgacgtgaatgtcaaacatcagcaaatagagcaacatgcagagggcaggtggggtcttccttctccagctgcccccgggtctcccctcaccagccacgtgacaaagctgaataggaatgggttctggaacctggaacgtggccgtgagttaccgcaggagcacaggcaccggccgcgtgtcgggcacaccagccaaccccgagcctggcagagaggagctcctaaggagagtcgagctggggacgaaggtgggaagcgacgcgtcacccatgcggcagaatccaggcagggaggtgcctgtcgcagcagtgacgctgggatcaggctgcagcctcctggcgatccacagcccgggcctcctggtgatccaaagcccgggcctcctggcgatccacagcccgggcgcctgtgcagcactggggtgagacatttcctgatgtcgctgtgcaccggagttggtaaattcacttctgccccaggctcttcctattccctttacttccctttcctggctttcccgtcagcctcgcgtgactccgattacaggaaggggagcctcctctctctgcccttgagaacagtctctgcagggctttccagaaaagtctggaacagatccgggtttccgagggcctccgagcacccttgcatggtgagcatttgaatcctcaggtgccatcatcccattttatgggcaaggcacatgggtattggagagatggcatcacttacccaggacagctcggatgacgccaggatctgaaacacatcggtatgacctcctgccctttgtgtctgcctgtgtcttcacactattgaaaataaataaataaaactaaactgcatctctgtgtgacgttgttgaagcttgtaatcccggcatggcacggcgaacctgtggcacttggatggttttgggggcacttgggctccctacttgtcacagctggggagtcgcccagcccggtgagaacatgcctttcccagagaagatggcaccctggggcccatcgtctcaggagtttcgtggtaggaaggtctttgcatggcacacacctgccttcctgaaacatggacccatccgtcccagcgctgcccttagaatggagccccagggcccttccagggatgccccctgctgtgcacgctcaccccggcttctcagggaaaaggacagagtgttcagaattggagggcgggcagagaatacccacggagtcctaataccactggagttttcatccacctcaacccattacccaaaatgtgcttatttgtgtggcatggggtgcccccaaatatgtgttctttcatttttatgagcccttgggcccccacagcccaacatcaacttcatctcctcacctgtgcaagacttctctgtccagcaaagccacagggtctggagggcatccacactcaatgaccacgatgatgcccacatccaccctctgttcagcaggtgccacatccacccaccatcctgtgtgaaggctctcggtgtccacgcgcaacaaccatgatgatgcccacatccaccctcggttcagtaggtgccacatccaccctccgtcctgtgtgaaggctctcggtgtccatgctcaacgaccacgatgatgcccacatccactctcagttcagcaggtgccacatccaccctccatcctgcgtgaagcctctcggcatccacactcaacgaccacgatgatgcccacatccaccctccattcagcaggtgccacatccaccctccgtcctgcgtgaagcctctcggcatccacactcaatgaccacgatgatgcccacatccaccctccattcagcaggtgccacatccaccctccgtcctgcgtgaagcctcttggcatccacactcaacgaccacgatgatgcccacatccaccctccattcagcaggtgccacatccaccctccgtcctgtgtgaaggctctcggcatccacgctcaacgaccacaatgatgcccacatccaccctcggttcagtaggtgccacgtccaccctccgtcatgtgtgaagcctctcggcatccatgctcaacgaccacgatgatgcccacatccaccctcggttcagcaggtgccacatccaccctctgtcctgtgtgaaggctcttggcgtccatgctcaacgaccacgatgatgcccacatccacccttggttcagcaggtgccacatccaccctccgtcctgtgtgaagcctctcggcgtccacactcaacgaccacgatgatgcccacatccaacctccgttcagcaggtgccacatccaccctccatcctgtgtgaaggctctcggtgtccacactcaacgaccacgatgatgcccacatccaacctccgttcagcaggtgctgggtcctacatgaagctctcacatgctgacctgtagtctctgtggtccgtgagactcagaggctcatagcgtgcccagattcctgtggctagtgaatagaaggcgtgaaccatttttcttactgtttattatggatagttgcaattgttggaggcaattcatttgatcagtgtttacatcttatgggctattttagagtgataatcaaggagcatatattcttgaaattgaaatgatgcatctctgtatgaaataagtagagacaaattttaaagcaaggtgaaatgcaagataattttgagacacatctcggacagcaggtatcaggtggttccaggaaaccccagcgtccctcaacctggtcacagcttttctaagacaagagctcatggccagtagcctcagccctcccaggatgttctcgagcatgccagccgagcagagcctctgagaaattgtgaactaaagaaactcgcttcattttgctccctgcagacgtccctgaccacgacgtcattgcttccacgtcatccttcaacctggggatccctctgtgcagaacacaggagctgcccaccatcgatgccataaatccacacagagcaggatggaggagagttgcttcctagcacagtcacatttgcctgggaggcctctaaaccgtgtgttttagaatgtcagcatctctcaggcgttgttcttcattgaatacttaccagtaagccccaagattgacattcttaaaaattcaaagttagggttctctttgccctctctggcttagcagaacgcaggcagaggaagaacacctgtctttaaaacctcccacggaaggcagaacttttccaaacccacggtaacgtgtatttttaaggacaaaggtggatttgaaatgcgaagttggtgatgacgaagtcaacaggctgagttggagtgaccgtctcctcctgcatccccattctggaccattctcagatgctgaccaaggatcgggacacagactgaaggttatggatcatcccaaagcaccttccttttatctccggctgttgatgctgatctgaagctcctccttggggcaggtccacaggtgtttcttctctgtcggtaatcagcaaattccaggaagaaagtgtgagcgtgagaaaggccgtgatgggaaagatggccgtgtctgccccaggcccgtgcactccttgggggattcgaagtgtccccctcatctctgcctccctgtcacacagcttttccccaccgtggatttatgtcagggtccaaatttccctcctcttctaaggatgtcagtcattggactgagagctcatcctagcctgtgtgacctcaccttaacttgaccacatatgcaaagaccctatttccaaataagaccacattcatgggttccaggtggacatggatttgggggtacatgattctacccagtacaatggctaagaagaaaaaagaccttttccaagcagctaattggcacccacatgacatggtgatgggtcaggagtccgtttggaggtcactgggctgctgggaggcagaggagccaggagggccccaagttcctcagcaagaaatgctgtacaggggcccatgggtccagaaggggggagcctggaagacgggttcaggggaagtcccctcggtgagcatggggcatcgaggtcactccatgctcaccagcctctcccccagcatggcaccgcgaggccccatcagctccccgtcccgcagggcccacagcacctctgtccgtgctgcgtccctgagcagagcccagaacgtgcacgaaaatccacggagggtcaccactcactgcacacatggtgctttcctgcagtgaaccagctctatatggacactggatgcatttcaagaatttgatttccaaaatttgacttacatcaagaaattcctaaaaataaattcattacctaaaggaagatgtaccccaaattaattccttgtctgtgagtgctctccaaatcattcggctgaattcctggtccttactccagctcagaggggtctgtggaagtctgagttacagttcagaaatcagtgttactagtaagtagtaaactggcctagaaataaaacatccctcaaggaaagaatacccattttggggtgagggtgtcattttgtcatataaactttttttttaaagtgtggaacaattttaaaggaagaatggaaagaaaacttaagtatgggccaatcttgtgctacattatttgaagtcatatcaagatcttaggaagaaacatgtccaccgtcctctctgctggtcattctgggatgatatctggaatatgatgttccttctgcaatcataaattcaaaaagggtgctgacattcaaaacacaacagaaaaagaagccagagagtttggtggaaacagccggggtggtgagagttttgaaaatcactgcaggaggcagaaaaagccgtcctcggcatagagcaccacccacaagctccctcttcatccacgccgccgctgtcagcccagacgtcacaaggaaacttggcctcggctggcgtctggacttggtggtgcgtaaaactttctttttaaaatcctaattttctttttaaatcctaaactttctttttaaaatcctaatttaaatctgaagaagggttaagaatattctaataaattttaaattaggaacacgagtttggctgtgaggttttactgttttgttcaatgcttctaaataaggagtcttaacacctcatacccatccgttgacacccccaggcgttgagctctggttgctgtcaacaagccgcttagggaggaggctgaatatcaggaaggaagacgagaggaggaggcaggtctccatggtccactcctggatccctgcggctttgggtacctgtcagatagcctttctctagaaagcctttctctagaaagtgtattttaatctgcaaagacgcctcccacctgccaaatggggccaccttgagtgaaagacacgcacccattggaggggacattcgagtccagtgggcataaggaaagggggctgggggaagaaaggaagtcccatttactgagctcttcaatgccaggccctgggcaggcacttcccatatgggatctcatttggccgagccattgaccctgcgatgaagccatcgtgagcctcccatcattccacctcatggggtccccggaggcgtcagattcatagaagcctagtatgaatctagggggtagtagccaggggctcagggaggggacagtgcagaggggcttgatggtgacagggcttccatttgggaagatgagaatgctctgaagagcgtggtgacggtgacggttgtagaacggtgggaaggcccttactgccgctgcactgtgcacttacaaacggtaaattatatgttaggtatcttttactacaattaaaatagagatatacagagtgagcccaattctacccaggatgaagctgtggcccagagagccataaggacccacccagatccacacagctggtgggaggcaaagcccattctagacccagacatgtgtagtgccagggtgtctcttcagcatacacactcctcacagataaagaaggcacagtgacatgaagacgtctctataaacagaaaagagagatccggcagcagtgacctcggcatttccagagtaggtgttgtttacaaaaatacacgtgtgcagagtctcaaggcgcagaatatgtgaaagtcaaagtcctcagagacaggagataaagtgacgctttctccaggtgccgagacttccccacggggaagcaaggtctgcaccttcccggggacgtggccccacagtgcgtccccagcccagtcatgtcctggtgcacagggcagctgtcgcagagaagcccccgcaggcaggactgtagctggatcacagagaagcccctgcgggcaggactgtagctgtaagattaggactgccggggaggcaggggaggggccgcgggcatcgatattccatcacggaccacctccctactgcctgcacctgctgcgccaccttctaccacaccctgtgctacgcggctcgagtcaaccgaagggagttggccacccgccatcccccctttcctatttttagaaagagctgcagaattatgtgctcttcttccagagagagcttctgtgtgtcaccaccaaacactggctgtgcccaggagatacacaacagctgtttctaaaccagaaatgtaggcagcatagtctgtcaccatcaggtgcggagtggatgtctgcagatgtgacatggaaagccagggccctggagcccaggcacagggacagccaccacgggagcccaggcacggggacagccaccgcgggagcccaggcacggggacagccaccgcgggagcccaggcacggggacagccaccgcgggagcccaggcacggggacagccaccgcgggagcccaggcacggggacagccaccttgggaacccaggcatggggagagccaccacgggagcccaggcatggggacagccaccgtgggaactggctccctgtatgggaggctcagccaagaggacaactccaaagttcagccttgcctctcctgtctgatgaacaggctgcctttcaggacagagtcagacacgaaacagctctcctggcccccagagagagcacaaagcgctcgctgaagtcagcaggtgtcccactggcatcggatgtgtgttgactcttattgcacatcaacattttaccaagaaaaaggtgcactttcaatttctagtttctgctttctaaaagtattctgtgatgaagcctcagctggggggatatgttttctcatttccaaattgataggcttgatgtaaatacagctttttattatttggcatctgtagatcatagttcttactatggttaagaaaaaatcctgaacttggaactgtggaagacccaaagaatttaacggtgtttccttccaactgcctgccagccaccggtgacaaggccgaggtgcaggagaatgacagttgacagctgactgtcaccgtgcagggccgcccaccacccggcaccagtggctcgtctgcctgtctgcctgtttgtctgcctgtctgtctgcctgtctcgctgtctgcctgtctgcctgtgtgtcttgtctctgtctgcctgcctgtcttgtctctatctgcctgtcttgtctgtctgcctgcctgtctgcctgtctgcctgcctgtgtatctgcctgtctgctgtgtcagctactgcactagtccaggcaggggtgggtgggaagatggcaggcctggattccacaccatgcactgtctctgggcagcttccttgatcagcccaggatgaccactgcaggcatcaccatcagcaccaccagcaaccaaacctcagagcatccagagatgaccctggcctggccccggtggaggggatggtcctacaccacctaatttttaaaaacatttaaatcctccaaagatggcatccgctcagcccgagctggttcacggcccccagctactcacaactgttttaatgttccctcggcatgtgggaggcagggccctgagtgtcccggacagaccgagtgtccaacagcggggaccctgagcatccaggacagacccagcatccagcagcggggcccctgagtctccaggacaggcccagtgtccagtagcagggggccctgagtctccaggacagacgtggcgtccagcagcgggggccctgagtctccaggacatacccagcatccagcagcaggggccctgagtctccaggacagacccggtgtctggcagcctctcctttctcgtcagatgtgtccagcctgggaccacggtgtctgctctgggtccttggttaccttaagtggtctggctccaaaagcatgagaatgtcccccagtccctgcagctccctagtgtgggtgaagactcagcttgctcatcatcctgttccaccccctggacagtgactggtgcgagagggaaccgtctgtggatctcactgactctggagtgaagggagagtcaggaggttagcggggggaaatgacttcagaggctgctacgtcacagatgggttgattttaaggcacgttacttgattaaagggaagcatgagagttgtgttaattcttaggaattaacatgagagttgtgttcattcttaatttcttaggaaaaacttgatttttcatttccatgattgataagtactttaaccacatgcctgagactttccaggacattgttatatttcaaaggtttggtcttgctggatttttttctattcataaattcacgaacctttaaaggtgaaagaaactgtttctcacgttgccttatctaaattttgggtttgaaacctatgacctcaaagcttgtccatggttctgcctgggacagtgcaaagatggtcggtcagtctctcgccgcacacatgcggaatttaaaatgggactcaagtagaaaggacaggtccggctttcctttctgactgattcttactgctccagctgagaacagcaggctctgctgctcctgtgtgtgattggttcccagcctccggccagctcctcccatccccactcctcctcccctcttcctcttcctcttcctctcttgcttcacaactggatctgatgcatttatgtcaggtcctgatcttgaaaaggaaaggccgcccagtgcagcagctccccgcaaggagaccaggcgcatatttaaccgggaacgtgagcacaggcagaggccacagggagtctcagtgacgcctgtgccaggtgacttcctgtgcgggtccaatgcctgatcacaaaggcacccacggtggtcacacaaaggccgggtggagaggaagtccagtgtgtgagtgcattcccaccgtgggaacccctatgcggcaggatggccacaccaagccacacggggtctgcttgcacacaagcaggctgagtccttcccggagaacacagacccgactttggtggagtggcaagtcctcattctgaggcttccccttcctcctgggcagcaatactgctggtgttctgaggcttccccttcctcctgggcggcaatactgctggtggaaaagtcccagaggttgctgcagctgctcctcagccctgggatggggctacaaggcagcacaggcgtcgatctgatagcggcacaggggggttcctcccgctgccccctcatcagcctttccatcagcactgctgacgtgtgtgtgggctacgtcacctcatcgtgtcatccctaaatgaatcccacactgagatatttgtttactaaaaaaaagccaggtaggtgcaccatgagctggtcatggacggcatcacgaaggttttgtcaccctgcgttgggttatattaccgtgtccaaatgtgcgtgctgtggcctggagcctgtgactctctcggaaccagagccgcaaagcctgaagcttcatttcttaggactgtcctctgggcagggtgagagcagagctgaaggtttcccctgcaaaagatgtcacacacactatttcttcctctttaatctgtctcagaccacacagtttaacttccaggcatcggtgagctcctaaggagtgaaatacgagtgttttcccattaactgactcctcatccttttaaatttagctgcatcttctttataagtctaaacctctgttcagcccacgagaggacgctcacaacagaaatgagcagaaatgagctgtgcagcagaattgcgtgggccccgcacctgctctggaggaaatgcatcttcatggcaaccgcttcagcgggatgcagttaccatgcttgtttttttaaaaactgaacacttgtctgtacatttaagcaagtcctggaggacttctgccatgcaagcctttgataacattttctttcggttatctttttttttacataaatatccaaacggcctcttagaaatgtgaattgttttcaatgaagcatctgttagatgccatggagggtagaaaaggtaactggactaggatggagtctttaaagagatgatagtctggtagaggaaagacatacgggctaaagacaagactaacacaggcaggaagggactcatcacaaaagatctaagtagaaggaggagaagctttcctcctgaaggggcccagggatgttttgtagagaaaatggcctggcgtttcactatttcagttttttgttttgtttttcagagatgggatctcactatgttgcccaggctggtcctgaactcctgggctcaaatgatcctcccacccacctcagcctcccaactagctgggactacaggttcacaccaccacatccagctccagtgtttcactatttcagattgatcatcttcccttaaatcaggtctctgtggggcttcaggagagcttattttaagagtgtgtgtgtgtgtgtgtgtgtgtgtgtgtgtgtgtgtgtgtgtgtgtgtgtttgagacagagtctcgctctgtcacccaggctggcgtgcagtggcatgatctcagctcactgcaacctctgccttccaggcacaagcagttctcctgcctcagcctcctgagtagctgggattacagcacccaccaacacacctggctaattttctatttttagtaaagacagggttttgccatgttggcgaggctagtctcgaactcctgacctcaagtgattcgcctgccttggcctcccaaagtgctgggattagaggtgcgagcccctgtgcccggtcgagttgtttttaattgtaaatgtttaaggtgtacagcctgatgttctgacacacgcagacatcgtgaatgatgaccacagtcaagctaatgaatacacgtctcctcgcgtagttaccgtttctttgtgtgtggtgaagcacctgaagcctactctcctggcaaatctctgtgcccaacactcttattaactacagtcaccatgctgaatgccaggtctccagaattcagctgtcctctactggaagttactacctttggatcaattgctccccattccaccctcagccccaggccctggcagccccccttctactctgtccctgagttcgtcctttttaggtgccacatgtgagtgagatcatggggtgcctgtccttctgtgtccggcttatttcaatttaacgtcgtgtcctccaggttcatccatgttgtcaaaaatgacaggagttcattctttcttaaggctgaataatatttcattgtgtatataccacattttctttagccattatccattgacagacatgtgggttgttccaaatcttgtttattgtgaatagttctgcaataaacaaaggggtgctgatgtcccttccacacactgattttatttcctttgggtctatacccagaagtgggattgctggatcacacagtggttctgtgtaattgtttgaggctctccatactggttttattgttttttttgttttgttttttttttttgaggtggagttttgctcttgttacccaggctggagtgcaatgacacggtctcggctcactgcaacctccgcctcctaggttcaagaggttctcctgcctcagcctcctgagtagctgggattacaggtgcatgccacgatacccggctaatttttgtatttttagtagagatggtgtttcaccatgttggtcaggctggtctcgaactcctgacctcgtgatccacctgcctcggcctcccaaagtgctgggattacaggtgtgagccaccgtgcctggccctccatactgttttctgtaaaggctgccctcactcacattgctaccgtatagtgtgtaaggttccgtctcttccacatcctctccaacacttgccatccccctcttttcggtggcagccatcccaacaggcacgaggtgccagtgcgctgtggttttgatttgcatttccctgatggctgatgacattcagccccttttcacatacgtgcgggccatttgtctgtcttctttggagaaatgtgtgctcagatcccttgcccatttttagttgggtcatttgtttttttgtttgtttgctaattaaatacttagcactcaaaaaggacctagagtgaagaggccctgtgttcctctccatcggtgttgataggaagcgtaggcggggtggccattgttccacgcctgtgggtgatttgatgggtgaagaagagagtgaggttgcagcggatgcatctcttgctagggctgacatcacaaggtgctgcaaactcgttgttttaaaacaacaggagggcatcccctcgcagttctggagcctggtagtctgagatccaggtgtgagcagggccacgctctccgaagcctgtgggggaagatcctcacggcctctgcagtgtcccgtggccgcctgccatgaggggtgtggcgtgggtggccacaacactccatctctgcctgtctgcgcgtggccgctctccgtgtctgtgccttctcgaggtgtctccctcttcttctaaagacacagtcacgttggattgggacccaccctcagctcagttgcatctgcaaagatcctgtttccaaataaggccacattcatagataccagggattaggacgtcaatataagctgtggggaggacagcgttgaacctgtaacaaacaacaatatggtttttaaatctacagtcagtaaacttactcagttgggtcaaataacagccgaagtctgcacttcttgttccttgggtcactgtccgaatcactgaatttctccacttgctgctgctgaacagctgtcaggagacctcacagcaagctgctgtgtccctgccgggcgcgtcgagatggctcaggttcacagagcctggcagcaggctttaacccctgtgtttggtggtctctgagaaccactgggctgaccacttccattccttctggaatcataaacagcaaagcgcaacattgctcccctccccaccccaggcccacagagctggcacagctagagccttcaagggggatgctgaggcctggggacgctgcactggagaagaagtatgtaaaactggggagtatcagttttcctccaaagcgtggtgccagccgttcacactcgggatccagcacttgcggctcattttcagtccatgttggtgactttggttcgatccagggatggtggtgcaagtgctgggatgtgcaggggctcaggtgtgcaggtgctggtgtgtgcaggtgctggtgtgtccaggtgctcgggtgtgcaggtgctggagtgtgcaggggctcgggtgtgcaggtgctggggtgtgcagggggtgtgcaggtgctggggtgtgcaggtgctggggtgtgcaggggctcgggtgtgcaggtgctggggtgtgcaggggctgcggtgtgcaggtgctggggtgtgcaggggctggggtgtgcaggggctcgggtgtgcaggtgccacggtgtggaggtgctggggtgtgcaggtgctggggtgtgcaggggctggggtgtgcaggggctcgggtgtgcaggtgctggggtgtgcaggtgctggggtgtgcaggtgctggggtgtgcaggggctcgggtgtgcaggtgctggggtgtgcaggtgctggggtgtgcaggtgctggtgtgtccaggtgctggagtgtggaggggctcgggtgtccaggtgctggggtgtgcaggggctcgggtgttcaggggctcgggtgtgcaggtgctggggtgtgcaggggctggggtgtgcaggggctggggtgtgcaggtgctggggtgtgcaggggctcggatgtgcaggtgctcagatgtgcaggggctcggctcgggtgtgcaggtgctggggtgtgcaggtgccacggtgtgcaggtgctgtggtgtgcaggtgctgcggtgtgcaggtgctggggtgtgcaggtgctggggtgtgcaggtactcggctgtgcaggtggccatgggggccgtgttctcttacccttcaccaaacaggaagtgccagtaatggtcatttctggaattcaggcatacagttttgtaaactgcgcattccaatgaactgcattaagattaaataaggatcctgggtcattatttacttcctgaaagagacagttttagatttctcaaagatttgtgacacaaaccaatgttaacttgattaagtctgaaaaatcctgtatccaaatgaggtcacattcacaggtgccaggggttagcacttccgtatttcacctgtcagcaaagaccaagtcaatgagaaagaaaatagtgaaacttctccccgattagaaattgaaccttactcgactgggatttttactgattctgcattcataccaaaatccaaattaactttttgcgatgtattctgaggttatctggtcaggcgcgctgttgaaggctggaaacagatggagaaatgccatagttttcctcctcgattgagttgctttgtaccgattcaaaggaacacaagataatgtaatcagttccatgaacagcttgtaatattggtacccaattgggctgcctatttgtttgatttagtaaattcccctctctgcttttatacacagtgacctaaaaagaaatattattccccagagcgcctttgggattgcttgtttaaattaagtttcatttggatttaatcttaaccaaatcttcagagagccgggaaggcgccccataatgaagggcggacgcgagagccaatgagtgcggcttccaggccgtccgggtccccccagtcgacggggctctgtaatgtcacacttgggtggcacggagccgagtgccggatgattagtttatggtctagatcattgtatttttattacactcataaaatctgtgtttctcctcattttcgtaatggcttccatgagcttctccaccttctgaaggcacattaaattgttatgtgatggaagaaccgatttggaggagcaggtttgaaagcctgaaaagcctggcgtaagaaacatgttttgaattctcatcttgttgtcggatgggcactaaggaaagagaaagtgcacaaatttgagcataattcttatttatttgtgggcgttttgtaaatacttcagttggttccattggcttccgatgtaaatgttacacagtgaggtgccttgaggatattgactatttcagccccgtgagaacataaatcaatattaaaaaaggaaaatgtcgtgtttgtgtctgatttttaaaatataaatgtggaattcagtaacatgcgctacgatgacagcattttatatttgggatatgagggtttttaaaataacaaggtcttaattggattttgtgtctgtttttaaaagaaatagaaactgtcttggataccaaatttacatctaaatgcagttgcttataaacatttctgccaagttaatgtaacccattgcagaaaaagcagacccctcttcactctataatttcatatgctaataaaaatctacaaatgccacatcagtgtgccccacaggattagtggttttgggtagttaggctgtaaatgttaagatgtgggtttacagccacaagtagccagttgtgtttgcaaagaaacgaggtcagaggactttgtgtctttgtaatttctgtgggtttaaatgtgcttttgtttattgtgtttcaatgtggctaataggaattagtaaatcaatttggtatttgctttaatctgaatagtgttgccatatttcggtataaacaaatgaaattgcagcagtgcagtactgctttccgtgaagtactttgaaaagaagcctttcggaggctgcttctgacaggacagcagcttcacgaagcaaaacgtttctctaggtgagcaaaatgatgctagccaccagcaagtgagggtgtcggcaccgcctcgagaagtgctggctgttatgtgtggcgttgtagaaagtttcctttacagatcagaagttggaaaaccacacagctgaacctacacctgaggaagctctaaatggcatgggataaatttgcggggttttttaatatttcgtggaacatgcaaactatgggccagtgcattcagagatgctcaggcagctgcggagtaaacatgtctgatgaaaatgaaataaatgtcctgtgaatggaataaatttggactgtgcttccgagtgcagtaattacacatgtcacgcggtgatgagacagtcacaccgcggccacgggccttctttgtccgcagatggtgtgggagagcggctgcgtggtgatcgtcatgctgacacccctcgcggagaacggcgtccggcagtgctaccactactggccggatgaaggctccaatctctaccacatctatgaggtactccgaccagagccacccagggcaggacccaccagccggacgaggacgggccctgctcctcctccgaatgggattcgttagggccccccagggccgcatgcagggaggctcagcgcaccccatgttcaggggatggaggctgagccacccccgagggccgcatgcagggaggctcagcgcaccccatgttcaggggacggaggctgagtcacccccgagggccgcatgcccgtgtggatggttcacacggctgtgtgctcatgaaccagaccctgggagtgtggtgtggtttttatcttttagatttttctaaatccaaatgataacagagtagaaaaaacattcgcctcacagcgtggtcccggtcccatataacaagcctttaagtggggtccgtttttaagaaaacctggcgcccatccttgatgccagtgcctgagccgtgtggcctccccgtggctctgcttggagtttcgtggctggatcatgtgacctttttatttgaggataacctgctcaccagtttatttatctggctggattttctgcccccatcaagaatgaactaaataaacgtgggtgattaagccagcactagaatgcatgctttgattctgtttggcattaaatgagtgagaatgccaaagctccacagcaggaagcgagttagaggctcaagtgtgaaccttaaaccacacagctgtggccttggggttcctgcagaaacgcttaggcccggaagtgcctgcgctggggttcacatcagcgcgactccgtgagccttttgcttttcctgctctagacccgggtgtgcgcagctgcgacggagtctcacttagagtggaaccactgagcagaacatgtagtcgtgtcgctgcttttgttgaaaagtgtaatttttctctggttcctttttttgagggtttatgtaacatggacatgcaaaagacagaaagtaggatagttttggattgtaaccttttaaaaaattatttgacgctcaagcccctaaataacactaagcacacacacccgcacggagctaacttcagtgcgttaacactgggaaggtgggagggggccgcgaagccgagggaacccacctgcgctgtaaaatgtgccctcttcgcagcgcccccttctctggtcagacgtggccctgggttcctcagtgcctgaggttcggttcacaatgtccacacctgtctctgtcccctccctccgctcctccctgccaggtgaacctggtctccgagcacatctggtgtgaggacttcctggtgaggagcttctatctgaagaacctgcagaccaacgagacgcgcaccgtgacgcagttccacttcctgagttggtatgaccgaggagtcccttcctcctcaaggtccctcctggacttccgcaggtatgacgcgcggcccgccggcagggcagtgcgcgctgagcgcgcggcacaggggagcgaggcttcggtgctcctgagacgcccctggcgccgagggccgcgtctgtgtcggcgccgcaggggggaggggaagggaagcgagaggcgggaagactccgttaacggcacgtgttaatcgtgagcgattttctagcttcagaggtattaaaatgtgagggggaataggcatcttcgaactgtggaaatagggccattatttttgataaggttcttcagttgacaaagagcctaaagtgtatgtgccacaggatattgatgcataaagctcggatgttcagttggattctcatctggctgcatgggatgaaagaggtagcgagcgcaggcccagataccaccctgcgtgatcttgcagggaagcccggagacacttagcccgtggctgtctgtatttttagggctattttgaaactgaccctctttaaaaaattcagttttttgttcattgctccagtcagccagtcacccaatacgttgtctggtttgagagtgtatttactgaactgttgaagtgaatgctagactctgtcttacaggaagaaattgacaatgaaaaaaaagcagcatttaagaccacagctttgattgtggtaaacagtcggtccgcattggctaggtggtggtgcttagtgaataaaccaccacaaggaaaatgaaattgtcaaaagcatcagtgacgaagctctaaattgtatagaatatgtcttacatttaactgatcagaagtctacctattgaggaaaagagacaaatatccaaacaaggagaataagaagaaaaaatgcatttgaatccaatgccatgccccactatcataaagtgacttgattcttaacagttactcattctcgagtctacagttatgtaactggagggaggttaacgagacaaagattgtcataaagaagcgatttttgaattctctgtggaattcttgaatttgtgtattacagattctgaagcttattatgattcaatttattttgccttttagtctacattgaaaagcaaaatgcagttttttgtaatttgaatcaatagaaatcaatcaagagcctctgcaaggagacacttgaatctggtgtcacagccacaacacacactcagtggcccctgcctgccgtcacctcccctggggacgcagagcgtagatccagagtcctgagtacatcctaaaacaactactgtacacggctccttcctcacccacgctaatttcctggccattatgtacattctgtcaatacggatttatttctaaagacatactatgtagaaatcttacataatttcctgaaatagagtcttcaaaaaacagtcattcctggcaaaatggatgtaactacaaagacggcaattcatcttaacaccccgtctttgcgttcatccagtgtgtttgcacgtatatgcatatgggcacgttgctatgtccatatccatatatggacgggaacatgtacatcaccgaccctcagtgtttatgattcatcaccaagaaaaattggattcccaaatttcccttgctccagggtctgaggagatacagcctaagaaggtttttgttaaattcaaaagctaatgaacccccagacacggttttgaaagccacgtcagagtagaaagcttttcttgcctgccttacctggcaccgcccagcgtttcggccaaggccacctttcatgtgttatctggacagtgggtttgagcgaacacattctcagaaagcttcacacttagacaagcattgccggtggctggttttctgtataaaatagccaccccgatttcagcgacaggaaaggtgagaccccttctgaagacaccggccatcttcatgctgcagcgtttcttatctttgaacaatagacgacgcgttctcactctggcctggcgcgttcgccaggcaccgagatgtgtgattaaatatttctggagcccagagggagcgcatttacactttaaagagaaactgctaagagataattagcatcacatgtgagggctttgctttaaaaactctctctctctctctctctctcattattactctctcccttcttgctgtgtgcaatggtgctcactaacgctgctcacggtaaaacggacaaacccttaccttgccagctaattagcggtggccagtgtcatttttgtgatgttgcagctagtaatatgagcccagttgcatagtcacaaaagtgatcattggaaactgtgactgtactgcaggggcgatgtggaaagccccttttctgagcctctaacgacctctgaccttgcttgctggtgctttgcatgacggtgcgctctcgcccggtgacccctgggttggtttgtatcactaatcgttctttctcagtgaattcctgttgtggaagtttctatgataccaacttttcttactgttggagaccttttgctcactgattctttgttctgatggagtcaaatgagacggctgtgtcaccttcctgaataactcgtggtctacatcttgggtcaaccggatgaactcttgtgttcaatatgtcgtggttttcctctctatttgtgatgctttgcgtgtaataatacaactgcatgatcctttgtaaataaagtcctcagccatgccacaccctgtatctacactgcacatgtccttgactgcccgtgggtttttgtaaataggttgagcacaaggtgggggctggtacggatatgaaaattacagcgaaaccttcccaaggccaccaggcacaacatgtcagagaaaatggtatcttccgtatactgtgagatagagacaggagtttcgggagtggggaagcaggttgaggccatcgtagccacaaattcactggctaggagcatttcccagccaagggggttattactgcattttgccaaagcaggagctgaccagctatccatgagccaccgctgtctactgacttcttatgctggcctttcctcaaaccagcacactttcttaaagggtatctggtttggggtttggggtttggtttgttttactgtcccttttttgggtgtacttggtctcatgaggaaaaaatgagcaacccctggtgactggtgggtgtggacccagaagctgagcttagtctctgcgtagagtggaccacgaggtgtgaaacacagcaggaagctggaggagcagaactgaggtcattcccatttgcaagattcagaggctgagccatggccagtaaactcctctgccaaaggcaaaaggcctttcaaagcaaagccactcaccatttggtctgatagttgagcctgcttgattctacacgtgcacacgtgtgcacatacgtgctcacgtcacacacatgcgtgcagtctcatgcacacacacatggtctttactgagctggagggcttcccacccccatgctggggtgcacccctgaggcctggtatccattctgtcatcaggagccctcgatgctttacagcctgagtcaggaatggaaaattgtagaagtagacataagtgggtctgttttccaacctctttattctccagggaccaagaatgttcaaggcactctggcatacaagtgctgttgcctctaaggagttcaccattgccttccccgcctctccccaaagccttcgcaccactgtgtgccccggaaaaacaacaacaaacacctctaacagaaacggtgacacggccctggaggccgttgctggttgtgcctgtgtctgagcccgcccatttttgggcatcagcctcgtgtttcacagaccagagggcagcacagatcaagtgcgtcctggctaggctgtggccgcggcccatctgcaggtgggcacgccgagtccagtccctgcaactgctccttcagctcccgtggtgccctccagactgggcattcacactcccatcagaagggccttgttctggtaactcctcagggaataggaagagaggaggagaaagctctgtggtttgggctccgccgtattcaagcatccctcccctcatgctcactggacactcacctcccctctccttccacagccaccctgcccctcctggcttcaaaggtttgtagcaaagcaccggttgatggaatgtttactttccacggactctttggtgctggataggcaaggctttgcaaagaaacgtgacattttcccattgatggtccatacttccatttttcttaatttgtttcttgtaggagttcacgcagcacattgtagaacactctccttcacacatgctttattccaataacccgaggttccgcctttaattttacttattcagaaatagttcactgacaactttaatggacttcataaacatgtttcattgtttcactgaattaaaaaaaaacacctggatttacacagtgaattttaaatcagtcctctgttttgatttaggggttggttatgaaatcttaaatatatgctcatttctaatttttacaacttctgatctaaactctgcacaatgaagttgtttgtatactcaaagttataagcatggaagggacttgtcttggacttcatagaggtttctccgtaatttagatatccttaccaaaagctgacgggtcacaaatgcccttgaagatgctgtttttagacagtatggaaataacagttttcaatatgatgtctggactaagaaattttgagcataaattgcaaaactcaaaaattttagtgaagaatcaagatgtagtgtaacaaaaggtcaagtcaacataagcagaaacagaaagaggagagcctgcaggggtgggacgggcaggacaggccgggagtccactggttcaaagcctggcacccctccttggaagaagaaagcagtgtagaggtgtaacattggttttaaagctccgattaataacgtcatgttgagaagaagaataaatgtttgatattatgcgtatgatttttattttctccgtcaaaacaagcgattgcaaaatgatttcaaacacacagaccttgcgctttgttttaatagttgttttggataacgcaaagtcttagtacacaacgataatttttatatctctttttatttcagaaaagtaaacaagtgctacaggggccgttcttgtccaataattgttcattgcaggcaagtacaacttttaatggattaagaagttttggctacctcaaaaactaatctatgcaattaaatacagaagcttaactttctaattgcttaataaatataactaactggcacttctaaaggaaaccaaaaatataaacttacttttctatgccatttgggtaaatacaattgggcgttgcttgtattatgtctgtataaactgcacatggcttgcttttttttttttttttttttaactctgttgcccacgctgcagtgcaatggcgtggtctcgtcaggctcactgcaacctccacctcccgggatcaagcgattgcgcccgccaccacgcccggctaattttttttgtatttttagtagagacgaggtttcaccatttggtcaggctggtcttgaactcctgacctcaaatgatccaccgacctcggcctcccaacgtgctgggattacaggcgtgagccaccgcgcgaggcctcacatggaatattttctagcagcccacggtgcagtgtcctgccttctactcacccgtgagcatgtcctgccaccttgcttgttcttaaaccctgtggtcccatgacacagaaacatcgagacaatggtttcagcctgttgcattgtctcaaccaccaggacgtccagcagaggctcagaaccctctgcagatggtgagaaatgcttggggccagttatgtacagggacgaaatctgtcattacaggaggtacagccacctccagtttatcatgtgggttcaggcctctgggtaaaaattcagtgactcatatccctaagtacgttaaaaccacaccagtaagaatagattttacgcaaagaaaactcaacctaatagtactgtctctgctggacttcatacccaactccttttggtgaagaactcatattccatttttctagaactgtcttatagaatgttcttcctgcctggaataaaaaggaaacctgtctccaaagaacaaacaccaaatctgtcaaatccaatcaagaagcatgtgtgttttgtgtgtgcattcctgtctatgagagaggaggatgaaaatagattacggtttgttatccttacagagtagagtagaacatcttttttacccacaaatgtatcaagacaagcaacacttagttggaagatttttgaagtatatcttaaaatattcatgtgaatatatgctgtgcataggagacaagtgagaaaggcactcagcaaccagaatgctcaccgtggccctttgaaatgagcagtgagggttacgtggcggcccaggccgaccgcctctcctccttggtgatgcagtgagggtgtgaggatgtgaacgtgccgttttttaaacatttaccatcccaactgcagcttttttcaaccatttgtttgaggaaacatgttaaagccaaaatgcgctgattctttaccatcaaaagatcacctataggattccagtcatttcttgggatcacagacggcatagaaagcagaaccgaaagtgtgatatctgctgggtagtcacatctttcttgaagtcttgaaatggaaacatttattcgttttccggaaagtcacaattgattttgctaggattataaatgtaaaaggtcctctgtttaaaagccagtcatgggtgtgaacacgagccctatgtacttttaagaaggtctctcaaactcatgcaacccagtgacagcgtctgcacgggggcaggaaatggcttcacacattcctcataagaaaaggatgatcctgaggctactcttcttccagaaaaaaagggaaattttttttcctttgctactgttgaagtattattcaaaacatttttacaactctagcccagatggtaaatattccaattatagctggtgggatgagaaagagatgaaatgagagtgctttttaaagagtaagatttagtaacgactgttatgtcaatttctccttctgagacggaggacctgcgtttagaaggggtggcaggcagcctagggggatgtgcctgaagtgtccctgcgtgcatgagccagcggggcccagccgcccagcgccctcccctctccgctcgggaggttgcccggcaacactagagaaggcaccttgcagatattttcaatacaaatgccatcaactctgacacagtcaaacgcttagttcattttgttctggcaaaatttaccacatctttggccaaagaggggggaacaagcaagagggagtcacatctgagcacagcagctcatcccacaagctacaagctgctcagaggctcgaagcccccaggggcctcccttctcccctcacttggattctcccagcccgcgtccttcctccccctctcacatccgccatcctttcctctcgccggcccccgtaagcaggaaggaaatgaactgtcactagctttgttgtgggtcgggcttccgtgtggacggcagcactttcatttctctccttctgttggcagtgacggtgcaggccggagcggcacctacgtcctgatcgacatggttctcaacaagatggccaaaggtgagacacagacactgccgctttgttgcggctcagagctgggatggcgtcgctatggcaacgtagggtgccgtgttcacgggaggccctggaaaaaattcgctgcttgttgtgcctctgctgggccgtaggaaggtggtttgcagcaagcacatctgcttctgaggctggtcgtttgttacctgcctctgcgtgccgagcctgcagtgggtcctttgttacctgcctctgcgtgccgagcatgcactgggtcctttgttacctgccttggtgtgccgagcacacagtgggtccttgacaggtgtttgctgcatacgctgcagcgttaacctcagagccacggagaagccaccctcgggtccttcagtgttgttgcagtgcagaatgccgctccagtatttggtgtaactccactgttgtcaaaacggtattcacactagaggcacactaaaaatatccgttagtaattgccatcaaatgtcaatcaccccctctcaaatgagcctttcagccctctttgtgaatgtccttcttatctagggaatctctgtgcgtgctgtgggaggcgttcctctcagagacggtgtggggagtcttagacttgaggcctgtggtgggagaaggacaggtttggcagagcggcagcatgcgcagacggcgtggggagtcttagacatgaggcgcagggtgcgaggatgggtccagcagcagcgtggaaaagcagatctgtgcgcgggtctggctctgccagcaatgaggtttatcactttggacagagcttttaacctctctgggatccaattttctcctacaaaagcatggggattgagctctggcatttctcaaaaggtggtctccagaatacccaacctctaaggtcatctctttaaataggggccagagagaaggctccccaggcaggtgagcttgagaggaggcacacactgagtctgctccttgggcatcacagggcaggtgtgcatggagaggtcccaaggagtccagggcagagagatgtgtccagcttcccttcagttggcgcctccgacacttacttgagaagagtctgcattagccttgcgatacccgttagcgtcccatggaaggtgggaggcaccgaggtggtagcatcctacggtctctttcccagctgtgaataaacaattccctttgtctcaacacacacacacgtatatgtgttcatacagagacctccgccttccgtaacatcccattctccatcactggcccagtgacaggagcagccattgattatagaaacaagtttctatacacttccacgaatgccagcaattttaaaataagcattttccttacttcattttcttctggttaaaaaaaaaaagacataaatatgtgaagataaaacaacagccatggctttacgcagaaggactggagagcctgggcaagttctccagcgtcctgcagcagaggggagggctgcagcccagccccacaccccacacctacccaacaccgccagcatcctttgctggctgctggggagaaatgaaatcagtttttgtgccaccaaatgtcattttaaacacccaagattagtttagtggtgggaatgtgcaaacaaaaacaaaatgcaaacactcataatatttttaatcctttttttgtttgttttggacatgacacaatcctaactttttgtcatttaaaagtccatttttccttgtccattaatgctgctgtgtcttgtcaaatatttcttttcctttccaaatttacagctattggagctcagagccatccatggaatttgtatttctccacttatcatgggccctcccttctttccctctctcagacaaagatttttcttctcttaaaccaaaatgtcttcagaacgttacagatcatttgatgtaagtgtttctgaccaagcctatgtttgtgaacgtgtgatgtggtgagttgctgggggcacctgtgattccaatggaacctgcccatccagggaccagaagcacaggcaggcggccggacgcaggtgaccccagcgtgcgtctccacagggatgggatggagcctgggttctgagtggctcaggttcactccacagagaaggaaacatggagaagtatgtcctgggttcgagaccccggtacggggggcagggctggcatattgtccaggcacctgagctgctgttcactggctccattgtggcatgtgatgtcaattctcctttgagagtgggctcagctttggacaatacgcatgcagccatgtggaaatggccaaagagggctggcctggggccttttctgagattggtgaccctcctcctgttcttgacctgctcctctttccctggggtgtgtgcggtgtgaaattccctgacccgggtcccaggccacagtctcaggagagatcaaagggcaggcagcccctctgccggctgaggtgggcctttcccaggcctccacactgagaggcgctggggttttgttctggtgcaggctgggccctgcccgtgtggcggggcgtctttgtctggcctgagaagctggaggcccccactgcagacccagcgtttctcaaatgatcaaaggcccagagtcctggacgtgaaacctttcttcccatttccctttctgtaaaggaatgcattacagaagaccagagaatgcccttcccaagcttcccgggcagtcgggcagtgccaacgctgatgttagggccctccagtcctgcatgcagggcctctgcatgcttttagctccagcagctgcggccgcagacagcagagcagcacttgtccacacagcccatcagggattaaggcctttgggcctagttgaagggcctttaaaaacaaactcagaatagttgaagttctttctctactgtccagtttagcagcaagtagacgatgatgcagtttggaatgaaagtcaacaggctcatgttctgcaatgggttttgtggcaggaaagtaggcaccaatctgggaagcgcttacacgtgtcatttctgtggcagcagatgcgtttctaactcaccgataatagacgattgtgtaggaatctgtttttaggtagcctgttcctctctcattgaagggcttggctcacatgtagcaaaacatgtttttttcaagcaagatattttccaaggttgtgccttttacttttttgtcagtgacttcacttactgagggtatttttctacttccccacaattttttaaagggatgaggagcaaccagcactgagggggtactccccagagatgaggtgggctgagccatgctgggtggggtcaggcttcactccccaggggccagcacagaaatgcagtggctgagaagtgtggccaaacttccacggcattcccaccagggtctgcgcctgggccggaagagggtgcctgtgtggccccaggtaccatggaggccatgccaagcagacactgtatgatcccccagcagctgtggctgttgacaaggtgcagagtgagtctggggtgactcatttcttttgtctggcaggagccacagaccgggaattttgtgttccaatatgaatccccacggcttgtgagcccatgctggagcgaccttttaaacttcagctggctaggagtacgttcctaagtagtctcacggcgtgaatgtgagtggacggtggggtgtccacacgggcatagacccagctctcagactcagcgactggacatggtactattttgtgtgtggatacacatctccttgcctacggggatggatcacttccgttcttctttgtttccgcgaatctgaatatactacgcacctcatctaagtggagtgataccgcgtctgcgcttccgtgactgttatatgtcactttgcataatgccttcgaggttggcctgtgtcgtggtgtgtgtcagcactaacttccattttatgactgactcatattccatggcatggatggaccgcactttgtggattcatttgtgtattaatggacagtgccgttgtttccggctttgggctgttgtgagtaatcctgctgtgaatgtggatgtgagggtgtccacccacatccctggatatgtccctggggcggaatcgccacatcgaccgtaattctcttatctcttggctgtttgattacagccatcccagtggatgtgagtggatctcaatgtggttttagcatgcatctccctaacaactagtgatgttgaacatcttttaatggcttattggccatttgtatatcaacttgagcaaaacagacatttcaagtcccttgcccatttctgaagtgggctgtttgtattttttgttgttgaattctaagagttctttatatattctgaatactactcccttatcagctatgtaatttgcaagtattttctcccattacatcggggttttttactcttttgatagtgtctttgttacacaaaagtgttcaattttgatgaagtccagtttactttttaaaaaatatttttcttgtgactcacacctgtaatcccagcactttgggaggccaaggcgggtggatcacctgaggtcaggagttcgagaccagcctggccaacgtggcaaaacccagtctctactaaaaatacaaacattagccaggtgtggtggcagatgctactcaggaggctgaggcaggagaatcacttgaacccgggaggcggaggttgcagtgacctgagatcgcaccattgcgctccagcctgggcaacaagaaagaaactccatctcaaaaatatatttttttttcttgtgcttttagtatcatacccaagatatattggccaaatccaaggtcacaaagaccttctgctatctgttcttagatttcctcctatattctcttaacttttaagggcaggcccaagtagtagatggaaagttgcctgtgggaagcgagaggggccatggagcagagagcctgctgcctcgagcgtgtgcgggagcatgtggtcctgatctgctgtgtgtggtgtggtgatgtgggagcacatggtcctgatctgctgtctgtggtgatgcaggagcacgtggtcttgatctgtggcatgtggtgacgtgggagcacgtggtcctgatctgctgtgtgtggtgatgtgggagcacgtggtcctgatctgctgtgtgtggtgatgtgggagcacgtggtcctgatctgtggtgtgtggtgatgtgggagcacgtggtcctgatctgctgtctgtggtgatgcgggagcacgtggtcctgatctgtggtgtgtggtgatgtgggagcacgtggtcctgatctgctgcatgtggtgtggtgatgcgggagcacgtggtcctgatctgctgtgtgtggtgacgtgggagcacgtggtcctgatctgctgtgtgtggtgatgcgggaccacgtggtcctgatctgctgtgtgtggtgacgtgggagcacgtggtcctgatctgctgtgtgtggtgacgtgggagcacgtggtcctgatctgctgtgtgtggtgatgcgggaccacgtggtcctgatctgctgtgtgtggtgacgtgggagcacgtggtcctgatctgctgcatgtggtgtggtgatgcgggagcacgtggtcctgatctgctgtgtgtggtgacgtgggagcacgtggtcctgatctgctgtgtgtggtgacgcgggagcacgtggtcctgctctgctgtgtgtggtgacatgggagcacgtggtcctgatctgctgtgtgtggtgacgtgggagcacgtggtcctgatctgctgtgtgtggtgacgtgggagcacgtggtcctgatctgctgtgtgtggtgacgtgggagcacgtggtcctgatctgtggtgtgtggtgatgcgggagcatgtggtcctgatctgctgtgtgtggtgacgtgggagcatgtggtcctgatctgctgtgtgtggtgaagcgggagcacgtggtcctgatctgctgtgtggtgatgtgggagcacgtggtcctgatctgtggtgtgtggtgatgcgggagcacgtggtcctgatctgcgtgtggtgacatgggagcacgtggtcctgatctgctgcgtgtggtgacgtggagcacgtggtcctgatctgctgtctgtggtgatgcgggagcacatggtcctgatctgctgtgtgtggtgacgcgggagcacgtggtcctgatctgctgtgtgtggtgacgcgggagcatgtggtcctgatctgctgtgtgtggtgacgcgggagcacatggtcctgatctgctgtgtgtggtgacagcagaacgtctttgtcgaatcgtgttttgtggctccccggactttgaaggtccccggactttgaaggccagcagccctccagagccgccttgttccatacagtagccacatgtggttccttagagtcactaaaattggataaagtttacaagtcagctcttcagttgtactagctgcatgacaaagccacagtggctacaccaggcggtgaagctggaagtcactccttcccccacagcaggtcctgggggccacacggctccaaggtggcactacggtggctcctgacttcaccctcaccctcttctcatctccctgggcccagccccatcacccctcgtgtgctggtctccccgctccattttctcctcctgattaggtgtcacacagcagtcagtaagatgctttagacagaaagaccttgggtgcctgcctcggccctggagctgtccccagagccctgggcgagctgtccccagagccctgggcaacctggccactgccgatcccccttggtgggccactctgcctcctttggctccaggactcagggctttgcaggttcttttctgtggcgtggggggcgcacccttcccctccccagggtgcatcccccaccctctgtcctctctggagtcccactggtccattccttctctggcagatgccagggtaaaccgtgaaagtgtggctccagctgatggcagggcagcgtccactgcatgctggatccacgctgatgctggtttggcacctgctgcctgccaggcgtgggttgtgagagcaaaacagagaagccccatcctcctgctgcatcttcctgctctgccgagagacaggtaaggagtctgtggctgcagggtggtggagagcagacaaggacactcccagatgcagagatggcagcttcactcacgggctgtcctggggctcaggaggacccacagaaagcttttcactgaatggaagggggcccaaggggccctccgttctgaccactctgttgcaagctgaggaagcagttctgggaggttgggtgacttgcctcaaggcctccggtcagccagagtcagatgcagaaccctgctcagtctgcaaaggctcagggccccagagggaggatggtggaaggcacacggccccagggacggcgctcagaggcacagcgtggtgtgttccagggctccagggacagaggggcagcttcgctggggagttcctttggggctctcatggaaactaccggaggaagaggaaactgagggccagtggtgaggcgcctgggccgccgagctcagctctctctgggcacagcctggagtctgcagggaagtgggagaacccaggcaggtgctggaggaccagccaggcagtgcagaaccagagggcggggagaccggccgggcagtacaggacccgggggccgaagggatggcatggctgggcagtgcagaaccagagggcggggagactggccgggcagtacaggacccgggggccgaggggatggcatggctgggcagtgcagaaccagatggctgggggaccagccaggcagtgcgggactaagagggccagggaatggagctggaactgaagaacaggccagctcagccacggggcccaggagagggttgagccagacagagccacacatttgggcgcaggcaccaagagaaggaggtgcaggtgcatgaggctcagccttctgcagatgagacttagggggacgcgagggctgggcagaattgggaaagctgagcaggagacgtctcgcttttatgtttggctgaaacatgaaaacacgaagggccagtgggaaagggacctcacagacacgttgggcccgcagtgtctcttgtctcgctcaggcaagtttcaggctgaaaaagtgcccagaattgggtgaggtgggaggagggaaggggagagggagcctgtctgcacctttctcttcaagggagaagttgccttcggtcgggcaggagcagggcctcctctgctgtgtgttgtttattttctgtgcctttccttcccctgagctattctggtgcaagagaaacagtgagggatgtggggcgtgaggtgtccccaggttcccgggccggtctgcagtgccctgtcccgtgtaaggggctgacgacgaacgctggttggagcagtggtccgggggcgtggctgaccccacccaggcagggcacaggcggaccctggtgtcgatcgcctggtgggagcgtgtggacagcatgagacccgctggtcttggggaacacgctctgggcatccgtgtgggcagcactgcccaccatccttcgatggtctcctcgggggtcttcgtccctgtgcatggagccgtcctcactgagtgtaccagctcacaggtctcccaccttcaaggggtctcccaccttcaaggggtcaggctgaccctgctgagccagggttcacatagcctggctgcaggggctcctcacccactcctgggtctgatgtcctcacctgggctgtcctccgcttctcctcatggtcacgcagacacctcaggcccattggatgccgcaaaatgtcgttcaggtcccacctggccgagggctgtcccttctgcaagctccctccttggtcccgggtgctggcaccagcccatccaggcccatccaggccctcccctccctccaacacaggccttgctggcacacatttaggggtcagaccacgccagcaggagctggatgaggccacagcgagggagctggcagcaggcggcccctgagaatgtgggagagaacacaggagagagacggggcggggggggccacagccctgtcggggcagctgtgtcgctgtcaggatgtgcccgaagcactggtccctgagtccacatgtttctgttcaaactcctgtttggaaattcgggaggggatcaaagtcctgccctccaaggttcccgttggagacacagctccacggtccaggctggcccggcctgcgcacttgcctgcctgattctgctccctgctgccgggcagtcactccttcatctcagtccctgggtcctctccgtcctctgtgcgcatcttgctcacagcctggttgctccatttcctgcggcacagctgccctccccacacagtctgtggtcccccctccatctcctctgctctcgctcccacccactctgtccttccctcattcctctgctcgtccagcccccgccagtgtgttctgccactccctatcctgggtttccaggggcccatgtggagggctgcaggggtctccctgttgtcctggaggcacctcccagagcatcatccctgcccagcccgcaggcccaacatcctccgtccagaccctgaggggctgtccccagaggcagcaggtcccaagcgtccgttcctagcgcctgaagtccaggcacatgcagcctggccttttggcagtggggctccctcgtagtgttgagtaggatgctgggggtcccccgatggagtcagggtgctgcagggggtcacacgctgtcccgtggaatcagtaatcctcatgcaagattcttccaaatgcacagcaactgcgtgagacagaacgtgcgtgtgggaagggcagcgatcccgtgcagtgtcacgcggcccctcggctccctccttggcctgtgcttccgtttctcctgtttccgaggtcaaatgatgcaaagtgtccttgaccatgagcccacgggcatgggacaaggtctctgtgtttgcactgtaagccacggaactgagtcaatgcgtaactggccctgtccccagcccaggcactttctgaacccaaaatagactcagagggaccgaggcagctgccggccctacaggagcaagggggaggagagcctgggctgtgcacctgcaggagggatcctgccagacccccgtaaaggccaggcccccggaagcagcagtaccagcagtcagtgcggcctgggaggggagctggctgcatgcttcacgcatccccgctggaccagtgcatgagcaccttttgggtaaaaggtgcaagtggtgtgtgcgtgttccaggcagcatgagaaggtttgccctgggtgagcccagctcctgttctcctccacctgttcaatattcacaatttggtgtgattgttactcagctgcagacggcctcctgaacgccattgaccgcacatgcttgttgattctgacataggtgttgaggacctagccacatcgtggaggcccccatgtgggtgtgtgtgctctgcactgatctgggaatgactgcgtgtgccccatcacacggatgctccaggatgtacctcagcagtcccctgccttggggctctcgtgctgctcccaaacctcttctgtcagcacagacgctgcgtttgcatctcggtcctgccccggtgccctggcactggttgtgcagggcaggtaggtgggatggcagcaaactgcggtgggcaccgcgtcgcaccaatgtgcacgtgttcacacacagataggactcggaattgtggagccatcgtattcgtctttcccttttaacaatccccccttgaattgtgaagctgtgctcgcctgcacaggggtgcagaggtccggtgtctccgcgttgatgctgccagcacctcaacagtattatgggatggtccagcagtcgatagaaacttaccaggatattttgcacaattccctgtcctcctggagtattggggatggtgactttaaaatgacagtactcattcatacacttctacattttctttaacttatatttttaataaggatctggaggcatttcagtttctccaaaagaaggatttagaatttgttcaaaggaaaaaaaaacataagaaatagctagtttgttatgattctgatctacttgattttcaagtgaataagatgcagatttgcctcctttgatcccagcaatatgttacaacatagacaatataatttatctagaaggtcagcaaaaaaaaacctgcttataattttcataagtctttagttaagatcatccaggaaaggtgtgaagtaaaaactcagcactgaaggcccaggagagtgtgtgtgtgtgtgtgtgtgggagtgtgtgtgatgggtgtgggtgttgtgtgggcctatgcatgccgtgtgtacctgtgtgtgcatgcacataggtgtgtgcatgtgtgtggtgtatgagtgtgtgatatgggtgtggaatgtttgtgtgcagtgtgagctgtgagtgttctgtgtgtatgcatgtgtatgatgtatgtgtgtgatcctgaatgtaggtataaaggatgtgcatgtgtgatgtggggtgtattgtgtgagagtgtgaagtgtgggtgtttgtgtgcacatgtgatgtaggatgtgagtgttgtgtggtgtgtgcatgcctgtgtgtgtgtgtgcatatgtatgacctatgtaagtggggtgtgtgtgttgtgtggtgtgtgcatgcctgtgtatatatgtgtgcatgcatgtgagtatatatgagtgtgggtgtgcatgttgtgtgagcatgtgcatgcctgtgtgtatatctgtgtgtgtgtgtgtatgtatgatacatgagtgtggggtgtgcatcttgtgtggatgtgtgcatgcctgtatatatgtgtgtgcatgcatgtgcatatgtatgacattgtgtgtgcatgtgtgtgcatatgacatgagcgtagggtgtgcatgtcatgtgggcatgtgcattcctgtgtatatgtgtgtgcatgcatatgtatgacatgtgagcatggatatgtatgttgtgtgagtgtgtgcatggctgtgtgtatatttgtgtgtgcatatgtatgacatgagtgtgggatgtgcatgttgtgggcgtgtgcatgtgtgtgtgcatgtgcatatgtatgagtgtggggtgtgagtgtagtgtgggcatgtgcacacatgtgtatatgtgtgtgggcatgtgtgtatgtgacatgtgagtgtggggtgtgcatgtttgtgtgaatgtgtgtgtgtgcatgtgcatatgtatgatgtgtggggtgtgtgtgtttggatgtgtgcatgaatgtgtatgtgtgtgcatgtacatatgtatgacgtgagggtggatgcgagtgttgtgtggtgtgtgcatgcctgtgtgtgtatgtgtgtgcatctgtgtatgtatgacatgagtgtgggtgtgagtgttgtgtgatgtgtgcatgcctgtgtgtgtgtgcatgtgcgtatgtatgatgtgagtgtgggtgagtgttgtgtggtgtgtgcatgcctgtgtgtgtgcacatgtgcatatgtatgacgtgagtgtgagtgtgggtgtgtgtgttgtttgggtgtgtgcatgcctctgtgtgtgtgcatgtgcatatgtatgatgtgagtgtgggtgagtgttgtgtggtgtgtgcatgcctgtgtacccatgtacatgtatctgcatgcgtgtagtgtgtagtcagtgccaagtggcatccctgagacccaggtctggggagggcttgaaccgtgtggggcacccagagcatccccaaccacagttaccttgagccgagttttgctctgccagacgtgaggggctctagcttgacctctgcacccagtccagttctggggtcacctcggctgacatggagagctagaaagatggggtgtctgtgcccttcagagcccagtcctcccacagcgtgagctccagacaaagcagaaacatcgcagcctgggtgagtgaggagctctgcgctcctggggcacgggaactgttccacttcgttccttatctggattcttaataatcaccattcgtcatgtatttgaatgcatttagttaggaccaagcttttcttcagttcttccagagggtagagttgagaaaattttctcctgcaagtaaaggcctctctctcttgaacacttggcacacattgtcgtttttactttcaagaaaaaaagaatacattgcatccctgcagtttgcaaaacctctgagtaaaattgtaataaaacttacctgcgctcatgcagtcattatccatgaacaggctgccggaagccatgcggaagaatgacggtcaggagacggcgacgatggccctcccggcacaccccatccgtccgtgttcactgtttactgggaggatgtggtctagggccatgagctgaatcacacagctcggtcagccaagagccagagtccaggagaaatcaaacaagccttggaaagagacaccggtggcatatttgcttggttttctttaacttcaaatggattctttcattgtgacagatagttttaatactttaatactaatattcttttaatggcttttgtttaatggttaacattttttatctaaagctaaaaaaaaaccctctgttgtcttacaaatgtatttaaccaatgtataaacttttaacccaatgagccctgagtgaattagaaaataacaatgagagcgatttacatttgctgagcttggcacgggatggtacccagtggccattcgggtgccagcggagcacgcagagcctggtgtctgtggctgcctccctggtccactaacacgagagaggtgggtcttcctgggtgtcccaggcacgagggtgcagcccaacccaaactgacttggccggtgctcaccacactgggacgcccgccacactggggcgcccgccacactggggtgctgagcaagatggcagcctgcgtcacttccctgtagattcccgacatggacaactcgaattaaacctggtcaagtagcagaaagtggctccactgagtccattcatttccctggtgtttgaatcaccatgatgcttcttaggtggaaaacgcctgggacttctccgtggaccccacgctctgtccccggtagacatcgttaaggttcctttctttccttccatctggattttctttgtgtgtgcgctgactcctcgactgtttgcaggcttttcgatgtcagcgtcacaccactgggcctttctgtttccctggaatttaactttcgttagctgctccttcaccttgtcagcaaaattggatttttcaagagagaattctattttaaatgcactagagggagctttctatgcagtggaggctttaaatgaatcctttgacactaagaaaagccttttatcaagtgaagggggacacacgcccaccctatcccaccctacccacccagcaggtgctttatcaatgccaacgttgtgcccctgcccggcctggccacacccatgctcaggagggcacaagagcgggcaggatccagcgcccggcctggccgcacccatgcccaggagggcacgagagcgggcaggatccggcgcccggcctggccgcacccatgcccaggagggcacgagagcgggcaggatccggcgcccggcctggccgcacccatgcccaggagggcacgagagcgggcaggatccggcgcccggcctggccgcacccatgcccaggagggcacgagagcgggcaggatccggcgcccggcctggccgcacccatgcccaggagggcacgagagcgggcaggatccggcgcccggcctggccgcacccatgcccaggagggcacgcgagcgggcaggatccggcgcccggcctggccgcacccatgcccaggagggcacgagagcgggcaggatccggcgcccggcctggccgtacccatgctcaggagggcaccagagcgggcaggatacggcgcccagcctgagcctggctatccagggtctgtcccttatgaaagatctcatgcatgggctctatgaaagcttctgtctccaccacacttgaagtaaggagttagtcttaatcctggcatgcaagaagcaggagccgtccacagcagacagttgattttcctgctacatcattatggacctaatgctggtgctgcacactttttaagcgttaactccgtttcctccgctcttcagttttggtctcgggctcagcgcgactcggaggcacgctcccgtgtcattttgtatttccgcccggttctccccatgttgtctggggatggcccggcaagtctttctccttcccttttttcacttttcctcacaaaccacagcctgagagggagccacgatgtcatgaaataagagagactttatccatcacattttatgtgaggacgacgacgccactctgggagacagccgccagcaacagccatctccagagatcagtgcacgcggagggagagccccttcctcgcccacacctgctacagctcctgacggcttcatggctccggccagaattcgggagggcggttgccagtgagggacagtctcccaggattcccactagcaccatcatacacacagcccttcagatgacattgctgttgacagtcgttttaaaaaagaagtttcagggactgaaagcaagtaccctaaagccacctaacggagagaggctttaactctgtggcccagatgaaccctcaacgtgatgtctcaggagggctgagagctccccgtctcttgagtcagactatttataccacacttgcttctcctgaggttcatgactcctgagacagaaagctgaggggtccccgtagaagccgctgctgtcctcgtgcctggaaggcttcagagaacataactgattggatttcactgtctcccagaagagtttgctcacgagatctgtgaggttgcctgagcatcaaatgtgttttgtaaattacacgtaatcatgcgtcatctcactggaccctcactggaccctggaaacgggaggaaagcccctccagaggtgaggctggcccatccagcttcccggccaggcccagcataggcacgcggagcggaaacccacacctcagcactgtagcccgagcttccccacgtcatgtgacacaactcgacgtctgtcggcaaccccagcactcctgcctttaactcaccttttttggttttgggaaaatttcttaaaagccaatagacatcttacgtttttaattacacaagactggttgtaatacattttgtgtattagaacccggtttccaaacccagcagcgtatggccaaagacaaatagcgtgctctaaacgtgggtgtgaggccccagcacatggagcctccctcatcctgcacctcggcccatcccctccccacgtggtccaggtcagcatctcgctgaggtcagcagttggggtgtgtgaggagttacgagacccagtgttagatggagcctgtacatttccccgtttctgagctattattcacacggccagccgctttgcacgatgacttcccttctaaatgagagggcaggtttccctgtacatagaaatatgtaaaaatacatagaattatttttatcgggaagctatttagttatgttattgttttttacacgtggtaattaaacagcaaacgtcttgccatttcttctggatgatttctaaagagccaatcaagcagaatgtggtgcgtggtggccgtggggtacacggtggctgtggggtgtgtggtcagtgaccacagggtgtgcagtggccatagagtgcatggttcctgtagggtatgtggtggctgtggagtgtgtggtggtcatggggtgtgtgccagctgtgggttgggtgctggctgtggggtgtgtggtggccgtgggttgtgtggtggctgtggggtgcgtggtggctgtgggttgtgtggtggctgtggggtgcgtggtgcccatggggtgcatgctggctgtggggtgtgtggtggctgtggggtgcgtggtgcccatggggtgcgtgctggctgtggggtgtgtggtggctgtgggatgcgtgctggctgtggggtgcgtggtggctgtggggtgcgtgctggctgtggggtgcatggtggctgtgggttgtgtggtggctgtgggttgtgtggtggctgtggggtgtgtggtggctgtggggtgtgtggtggctgtggggtgtgtggtgcccgtggggtgtgtgatggctgtggggtgtgtggggtgcgtggtggctgtgggatgcgtggtggctgtgggttgtgtggtggctgtggggtgtgtgatggctgtggggtgcgtggggtgtgtggtggctgtggggtgtgtggggtgtgtgatagtggggtgtgtggggtgcatgctggctgtgggctgcacagtgtctgtggggtacatggtggccagcggccttcctttgggtgagccccagctggggtctgtgtttagcttgagcctctataccaacttgagatgcttgaaagatgctgtgaattgcagcttatttatccttctgcctacagttgtggtatttttcacatttaaattgcagcacagttctgggttcaatgtgtccagaagccacagctcctaccaaaggtacagtcacgggtgcaacagacaatatgggcatttctgagttgttttggctcaagcacgaatgtttgtgcagtgacactgagactaacctggcgctctccatgcagggacttgactttcataagacaagcttgtctcagagaggccagttcccctgcgtcgtttctgccatgattctgctgtgtaggcaccaactgcaggagtgtccgtgggaggaggaggaggagaggaagcggcttccttggccgccacagtcatggccgcaggaggggtcctttggcttcctcccttcctctctaccatttcacaaactcacccgtttgtgtcaggctgttttaaatttatggatttcttttaaaacaagattgtatttactgtagccttgtcgactttttaggcctttggagacccaaaaggagcaattaagcaaacccgtgcacctgaccccgccttccacccgcgtgagctgccagctagttccctggtggccgagctcacgggctgccgcaaaagaaagccgccttttatgcctgcagaggctctggcttaaaaggtggtggccctcatggtgttccctgcccaggagaatggggtcctttaaccaggggatgggagctggagggacggccagcttagccccgacagtggctcccatcaccacgagccctgttcctgccaggaaatgccagtgtctccatcttctgtgctcaaaggtggggagacccaccagccaggcagggcaggtggggtggtcatctcgcgcccggcctccctggtggagccgctgtggggctgtcctgacagccagattctccacaccacctgctttgttctcccttcatgcaaacatgacatttggttccaacgtgtgtcctccccaggcctccccgccacccctgccgttccctcctagctgcccgcagttctgacttggaggtgcttcgcaggcacctgctgtgacttggaggtgcttcgcaggcacctgctaccctgctgggatgatcctcctggagcctgagcccccactggcttcacagttgccaccccatgaagccacagaaccacagggaaaggaaattgaggaacctcgggaattttaaagcttctctcctgattcgctgggcgaggaatgtggtgtgcactcaggttgcggccggagagaaaggcctggggaccacctgactctgggccacccgggcctcctcaggtcttcggccagcgctgtcctgcccacggtagttggggttccaatggctgcggcttcttcctgtctgtggcttggacatgccattggccgcgtctctatttcctcatctgcgactcgggtgaccacagttctcagttcaccgtgttcggtagaggtgacatgaagtgcctggcacccatgtgggtttccctgtgggattctgacccgcttcggagctgcctcctgctcctcatcccacacttctctgtgtttctcatcctggcggctgtgtcctgtctgcccctctcaactgcaacacgctggagaggtcgggaccctgtcttgctcattatctgtctactaaagaacctagcaaaatggaaaaataacaatatgtgctgaattaattattagcttaaaatttaaaacttaagtagcatgatttgagtgcagccagcatcacctgccgtgagatcggtgctgtctacaggaggatggagcttttggtgaaccactgagctgggagtagctacgggcacctttacccagtcccaaaatgtggaacatttgagtttaaaaagcagaaaactctacagttaaaagccaatattaaggttgagtccattaatctaaattaatctgattttttatttctttaaataaaaaagtaatcctatgcaatcaaagttaaagttcgtatatggctccctatgaggtactacattccctgaagtgtcacaaaaaaaaaaaaaaagaaaagaaagaaaagaaaaccagtacagctttggtttctgacggtgacggcctgctgttggtaagcatcttataacaatttttcagcccagctttctggaattaatgctaatgaaagctgcccctgccttcgtcttctacatgaacactgaaattgcagccgcctgccagccggctgagggatgagcgtaataattttcaattggcctctcagcccagagggaacgtggctagcaggagattgacagatgtggcatggattatcttgtgctctgaactcagcccaatttgtggtttgttgcaggtgctaaagagattgatatcgcagcgaccctggagcacttgagggaccagagacccggcatggtccagacgaaggtactgtcagtctctcctccgggacgcagacccattcaaggtgcctctctgcggccgtgttcctgagaggagcacggggagggcctggtttaatgtgagccgcacaccgattgctctgctctgaccggcctcgtccatgccggccttgcatgggcggggtcacttctgggcccccaaaggtccactggcgtttcctgcaacacctccagatgcagccacatctcaagtcctaggaactcgatccactggctctttccattcactagatttgggggtggggggagaacgctgcatttttgtagaaagaggttgacgataaatcccagaaccctcaggaggatgttctgagctctctgagcgctgcccggcctctccggggcctgcgctttgtggaggcccccagggcacagcatccttgagcacccaaaatccctcatgcttgctgaagaggcccagtttgcagcaacagaggtcaaaacaaaaaaaattctggtgagctttggctcaacaagaactggacgtgaggttgacgtgtgtctggtctctctggccctgaggctggggttggtgtgcctttggcctctctgctccttggtttcatttcgccctctctgtgcaactggtaggaccatcacgtgattttgtgaaagttctttgtaagtcttgggacactatattttattcggtttttgttgttgttgttgtttgtttgttgttgttgttgctttctgagacagagtctcactctgtcacccaggctggagtgcagtggcacgatctcagctcactgcaacctccacctcccaggttaaagcgattctcctgcctcagcctcccaagcaaaaaatataaataaaatgcagaaataatccaccaaccctccaccaagtttccccaaatgtgaacacctcacataaccacagcgcagtgaccaaacccaggaagtcagcaccgatgcaaaccactgaccaacaggcccagcgatgccctacgcgcccccccagggagcttcccctggagcaggacacgcccagggcggccacgcgaggggcatcatggttcctctgctgtccgggacgcttcacggctgtgaggtcttctagagcgccagcggccttgctctttgtggaacgtctcttgtctaggcgtgtcccacgtcccccatggtcagggcagggggcaggactgtccctcacgagggagcggcacatctacacccactgaggcgtgtgtgtctggaggcttctgcgtggctgcgtgatgatttttccctgtgtggttactcagtgtcccgcggggagaagctgggactgtgcacatgtctgtctttccttctgcttgttcacaacagcattcggcatgtgttgcgaggctgtcgagagaggaggtgacacgggacagctgctgttccagcagcaacagccatcaaaacaaaaaagttctcatgagctttggctcaacaggaactggacgtgaggttgacgtgtgtctggcctctctgtaccaaggagttccaggttttgtgccatggaagggtccaaccttggaagggtccatcttgccgcactgaccatcctcctgtactggctgcctagcagtaaaagaggtggccttgtcaaggctggcacataccaccttctggctggccctgcatcccgtgagcttcaggtggctctgaactggacagaggaggccatggaggctgggagaacggggcacacattaccaggaatggtcagcgagagccacctcaggcaggtgtgttcgtgactccacagtgaggcccactctgggataagccccaggaaatctaaattcaaagtagtttcctccccacacctctgcctgcctctcaggcagcctctccctccagacgggtgagttcacccagaacacctgcctgtcaggcagcctcttccctccagacaggtgagtttgcccagaacacacactggctttaggatgggtctgggcaaaatcatcgcaaggggatatctttgccaaaagtgaaaaaaatcacaaggagcaaaccctccaagcctcccattgtatgtatcctgttcgccagaacaagcccttcctggcacacagatggctgaggtgcacaacggtggtcccaggacccttcgtgaagtgaggtgctttgggactcatcagagaaagaggaagccacagtcacaatcattacatgccaggtcttccgttctactccatttttaaatggcaagatggcagcaaagacatggaaccaacgcaaatgcccatcaatgatagactggataaagaaaatgtggcacatatacaccatggaagactatgcagccataaaaaggaatgagatcatgtcctttacagcgacatggatggggctggaagccatcatcctcagcaaacaaacacaggaacagaaaaccaaacactgcctgttcccacttataaatgacagctgaacaatgagaacacatggacactgggaggggaatagcacacactggggcctgtcagtggggaagggggatggggagcatcaggatgatagctaatgcatgcggagcttaattcctcggtgatggattcatgggtgcggcaaaccaccatggcatacgtttacctatgtaacaaagctgcccgtcctgcacatgtatcccagaacttaaatataaataaataaataaatagcaagatgataacacatacacaccccagccctgttgcccagatcacttggtgacccgaagctccgttttctgcactccagataacagagtcagcttcctagctgcttccttcttggactgggcgtccggaggagttcaccctcttcctcagggtgtgtgttcaggagctgtcttggagcatgcacataaattcagctcctggaacttcaaggcataaggaaatggaaccatgcgaaagtcaccatcacatcttaatccgtgactgcgctgcccaacatcgccccgagactaaacttcccctacaagttcagtttcacaaagatagaaaaattatttgggcaaaatgctgctgtccaatctgaatgcttgcttctacgaagccaagaggaggcgcctgcagctcctttgaacggaggaagtcacgtcgcctggtttggaactgaagacaaggaaagagcgagccgtcgagggtgagcacccggagaccatgaccaggatgaccgcaggccctgacagcaaaacatcatcgttgtggtaaaaaagatgcccctcaggagagctgtttcctccctggaatttgggtcgaatagaaaatgtttcaccagcgcccacctgagcatttggcaactcagtccccgaccacaaactccatcatcttagaagagaagtccaggcacccaggggctgaacggcagtgcgggctttgacaccacacgagccgccagagaggcggcacactcagccacacacactgtgtacacccacacacctgcacactgcgcacacccacacgcagccagggacactgcacacccacacacctgcacacacccatgcatacatccacacacacctacacacccactcacgcagtgcacacccacactcagccacacactgcgcatccccatgcacacacccaggcacaccccccacacacacctacacacccacgcatgtggtacacacccacatacagccgtgcacactgctcacacgcacacacctgcacacagtgcacacctacacacagccacggacactgcgcacacccacacattgcacacacacccacagacacccacaaacaccactcagccacacactgcacacacccacacacctgcacacacccatgcatacaccccacacacacctacacacccacccacggggtgcacacccacacacacacccatgcacactgcacacacccacacacctccacaggtgtacacacagtgcacacccacacacagtcatggaccctgcacacccacacacctgcacagctgtgcacacccccacacacatccacacacccacctgtacacacccatgcacacctgcactgctgcacacacccacacacacctacacacccacacacgatgcacatccacacacagctgcatgcacgcacacacacccgcacacattcccgtgtgcacacaccctcagcagacacaagggatgccagacaaggctgaaatcacccctctctcccgtccatgcctctgtggtagatgatgggttcttcccttccttccctccacacgtctcaagagtttcccatttcaccaaggaccttaacactttcctgcccacaatggtgtttcctcttttacatctgtcagttccagaagtagagccagtgatgagtgtgtcccacacccaagaagccccatgccctcctcactggacgggaggccccgccccctcctcactggacgggaggcccctcgcatgtccacgtgctgcccgtgcgtcactctccccaacctgccgtctcacatctgcattttagtttcttccccattttcttctgcaccagccccttgtcctaaagcctgacctcagcctcctcctcagacgtacccggtgttgtcctccgtcccagaagcagggcgttgcccagacatgctcctatcttcccaacccagcacagcaccggagtgacagacacggattctgtcacgcgtagcgcagtccacgctcacacatcagctccaggcccgcagcccacttctcccaaggcctcccgtgccattgaaactgttcatttccgtagctctccatctctctccacctctctccgtctctctccacctctctccgtctctctccgcctctctccgcctctctccatctctctccacctctctccgcctctcttcacctctctccgtctctctccacctctctccgtctctctccacctctctccgtctctctccacctctctctgtctctctccaccgctctccatctctctccacctctctctgtctctctccatctgtctcccatctctctccatctccgtctctgtccctccgccctggtgtacacacacacaatgcctagtccctaacttgggcagggctcaactctcacggtgtggcttggagcttgtctacttttgtgaaaagagaagctgaaggtgacagacacaggaaggtgtgtcatcctcacccccttttgagaggtgctgggggaagctgccccgcagttatgtgtgcagcctcctggagggcacaggtggctcagagacacgatcactgaggtcctctttaaggttcctatttgtacatctccacccaggcctttgtttacacctgaaggattacaaatataaacataagcacaaatagaaatccaagcagcctccacaaagctccacggcttccagccctggctgacccttaccccagcagcgggtgtccgagagccatggcagctcctgcagcctccatccctccaccaactatgtgggcaccccgtggttgtcccaggacagcctgagaaggggcgttcccactcgctgtccagcgtggacccaggggtggtgaccagacagcctgacctggcctgagcctggctcggccgtcccacctcagccacttctccaccgggtgcagttctactggaagaagccgtgggatctttctccaacaggcctcaaattttattgtagtatgtgttcaaaaatgctttcttgcttagaatgtcctgactcggcctctcgaatgtcctgtctttgcaaacccaggaggctttgcacccctcctgttcagactgctggcactcagatgcagtttaggctaagatggtcatctggtcatctgttgctgttgtattttactcctttgaaataaactcctatcataaaagttatccaaatgctggggttttcccagcctacccgggatctagagcatggttctaggtgatacttgctcagcggattctgctcagaacgtggccacagaccttcgaggacccacagggcttgggtgctacatcccggcgccgcatgcagctgacacttcacgataaaggacaagatgatccacaagcccctgtcccctcaaacgccagctctgaggctcacagcacccctccgggaagcaccccctcctcctgccagccgacgcccacagggcccagtgggctctgagtaaggtgcacggcacacaccagcccacacgcccggtggagcttctcctttgagctaaacagtgcggtaacaattgccaaacatggccagtgagtagagcacctgtctctgtggcccggttcccttcctgctgctctgtccggtgactgtgcagtgttggaaacagttatgatccagaccctggtggagttccccctgcccgtcccctcccccatagcatggatattgggctttcctgttggatgccgcaagtggctgcctgagaggccgctgggcagctctgcaggattagcactggccctgggggtggagcgctttccagcctccactgcatgatggggctgcggggcggcagcgcttctctattcttccctttaaagatcatttctcaggctagatttccagtgtgtcggaagatgtaaatagatagatgacacttgcatttcgcttcccaaaaagccacgcttaatttttggcatctccaagccctcacagagcctcagggcactggcagcccagcactggggaagaaatggtctgaatggctgttgtgtatttagcctggatcccctaaacagcaccttcatcgaacacacttggtgtgggaggggcaggagtcagcatttagacagaacgtttgcggaccttcccggcacagcccgacctgagcccctgcccccacaggggcagctcccacgtaatttcgaggagcagaaaggtgccctctggcagtgcagaggggagagagacggggcgcaggcagacacatctccccgggtcccaccctgaggtggccgccaggctcagttgactcctttaataataggttctaacacgtacactaagaggccgcgtggccacactaccaaaggcaggtagagtccagcagaccattccgtcagcatcagggcagaagaatatgaaaggagaaactgtcttttgtctcagaatgagcatcacgttattttgactttctgatgtctcggttcaagctattttccatctttctgttatgcactaaacattcaaaactggaaattaatcatcgtttttggcttggggctgccctgttccttaaatgatcaagtattggagctgtcaacagggctttccttccagaagttgttagctgggtaacagtgttgtttccgtccacgcgttctcagctgtagctggagtgctgctggcctgctttggagttttccatagcagtgttttgaggtggaaactgaagagcaagaggaaatgagcatttatccacctcatctgtgggagaggaggcagatacgctctccggcgctaagccctggtctttggaggagcgaatagtcctggcatcgtgaacccgtccctcgtgcccactggatgctctcggcaggctgtccgtggagggaggggtgcccctcaggtgtgcctgcccaagtggctgtggacgcgcatgccctgagccaggaggggtgtggacaaggggaggtttctcagcatgtggaacggagtgggtttggtctgagtaacaggtggatttcaaaagcgatgataacaccacacttccgaggacaggaaacgcccaagcatggccctcattgtgagttttaatggccacgtctttgtagtgtctgcacctgcccctcacaccgtccaccaaggcgggtggctgtgaggaggaatcgtggagtcgtagggtcagaaggacagggcagtacgcaggaaccgttgccttctcgctgcttctgtgggcagcttctccccgcagggggaaagatgaggcttttctagtgcgagagaagctcaaacatgtgtcactgttgtgtctcccaaaccgaagggtacactgtcctttctaaggaaatctgagccttttgcttttttttgctaaacaatttctttctgcgaaatggcccggggagctgatgctgcgttgggaaggggggacgccgctttcatctgcagggagccgacgctgtggcaggagtcggggggacgccgctctcattggcacttctctcgtttctcgccctgcaggagcagtttgagttcgcgctgacagccgtggctgaggaggtgaacgccatcctcaaggcccttccccagtgagcggcagcctcaggggcctcaggggagcccccaccccacggatgttgtcaggaatcatgatctgactttaattgtgtgtcttctattataactgcatagtaatagggcccttagctctcccgtagtcagcgcagtttagcagttaaaagtgtatttttgtttaatcaaacaataataaagagagatttgtggaaaaatccagttacgggtggaggggaatcggttcatcaattttcacttgcttaaaaaaaatactttttcttaaagcacccgttcaccttcttggttgaagttgtgttaacaatgcagtagccagcacgttcgaggcggtttccaggaagagtgtgcttgtcatctgccactttcgggagggtggatccactgtgcaggagtggccggggaagctggcagcactcagtgaggccgcccggcacacaaggcacgtttggcatttctctttgagagagtttatcattgggagaagccgcagggacagaactgaacgtcctgcagcttcggggcaagtgagacaatcacagctcctcgctgcgtctccatcaacactgcgccgggtaccatggacggccccgtcagccacacctgtcagcccaagcagagtgattcaggggctccccgggggcagacacctgtgcaccccatgagtagtgcccacttgaggctggcactcccctgacctcacctttgcaaagttacagatgcaccccaacattgagatgtgtttttaatgttaaaatattgatttctacgttatgaaaacagatgcccccgtgaatgcttacctgtgagataaccacaaccaggaagaacaaatctgggcattgagcaagctatgagggtccccgggagcacacgaaccctgccaggcccccgctggctcctccaggcacgtcccggacctgtggggccccagagaggggacatttccctcctgggagagaaggagatcagggcaactcggagagggctgcgagcatttccctcccgggagaggagatcagggcgacctgcacgcactgcgtagagcctggaagggaagtgagaaaccagccgaccggccctgcccctcttcccgggatcacttaatgaaccacgtgttttgacatcatgtaaacctaagcacgtagagatgattcggatttgacaaaataacatttgagtatccgattcgccatcaccccctaccccagaaataggacaattcacttcattgaccaagatgatcacatggaaggcggcacagaggcagctgtgtgggctgcagatttcctgtgtggggttcagcgtagaaaacgcacctccatcccgcccttcccacagcattcctccatcttagatagatggtactctccaaaggccctaccagagggaacacggcctactgagcggacagaatgatgccaaaatattgcttatgtctctacatggtattgtaatgaatatctgctttaatatagctatcatttcttttccaaaattacttctctctatctggaatttaattaatcgaaatgaatttatctgaatataggaagcatatgcctacttgtaatttctaactccttatgtttgaagagaaacctccggtgtgagatatacaaatatatttaattgtgtcatattaaacttctgatttcaca

SEQ ID NO: 16 - DNA, 282044 bp, Homo sapiens
agggagcggccgggcgaggcatggcgggccgccgggcgccgggggagaagcgctggcagctggtgcgctggtgagtgggcgccgggcggcgcggggcctaatgcgggagcgaaccccgaggcccggccggcgcgggaagcagcggggcgcgggcccaaagtttcgtcccgggctgaggctgcggggcccgggtgggcggaggggcgccggctgcctggtccccaccaccccctccggtccccaccaccccgcgtccccgcgccgggtctctgcggctctccaaagagatgggcgacggggaccctgtgcgagccgtcaggctttgggggaaccccgtccccctcccgcgggggcgccctttccctgcacttcacctttcacgctcgcacggggcttccgccttccccttcgcccccttcaggtttcccatttgtgcctccctccgttccttctgccacccggggcagggctctggacttgggccccgagaaggcaccacccacagcccccaacccctgcgtggaaaggggtgctttagccccgaaacacaggagcccctgggggtgtgcactctggggacagggcgcagagaagggggcctaggagaccagggcaggggaggggtccccgtgtagcggggcagtcgccctttccccctccgcagtcctggcccgctgggaagtcagagcctgcggtgtcaggttaccggactgcaagctcagagggtttcagacgcagcgctgtcgagtcacctgatctgggcccccgaacccacgtcccagggttccaggtgtcccaatgttcaggacggcttcagccaggggcctgacctctgcttggcggcacttggagcttagggcagcctgcacagccctccccggacctcggaggactccaagattcaaaagagaatgtcggcctgggactcctccccatcccaaatcatcccacacacagcagggtcagagagcacctctgaaggtacattctgtagcctgcatacaatgaacaataatgtcatcaataacagcaacgtgggcttccccagcacctcccgtggctctggagtagtcaggattcaggcacacactgagaggaaggtattagcacctccattttactaaagatgaggaagccgagggtcagagagggaaaaggattcaaggtcacccaacaagcgcatggtagaggcaaggtttgaaccaggtcttgctcaggagcttaacttttcctctgttttgcatatttcctggatggttccacccagcgtggccacacatccaagttcacattgtccgaaaatcccacagtgtcagagcaggaggtgccaatgggtttccaagtatattagttagcagtggaatcactcttcaagtgaagctccaatagagaaaccagataaaagtagaattaatctcctttatttaattcttttttttgagatagggtctcactctgttgcccaggctggagtgcagtggtgcaatctcggctcactgcagcctccacctcccaggctcaagtgatcctcccacctcagcctcccaagtagctgggactgcaggcatgggccatcacgcccagctaatttttgtattttttttgtagaggtgggatttcaccatattgtccatagctagtctcgaactcctgggctcgagcgatctacccacttcagcctcccaaagtgctgggattacaggcatgagccaccgtgcccctggcagaggtaatccacttttgaattacctcaggggaggtgggcagttagtgtccctttcctcaaaatgacatagcattccatcgcccgaccacagcgcctggctcaagtatgggtgtgtgacctaggtcaggtcagtgacatgacatcatgggaactgggctggaaccactgagacagggaagctctgtctccatagagtgttgatctgggccactgatgaccaccttgctgccacaaggactaaaactggaacagagggaggcagaggtataaagaaagtaggaccaccccagcaccccagaccttccagatcagttccctcacttcacagaagaaataggaagagatttaaggcgtagagcttggatgcctgttttgactcatcctcccaactcttgcccctggcactgtctgctggggttgtttcttgggctggacctgatgatgcctgaattttttttttttttgagatggagtctcacactgtcacccaagctggagtggagtggcgcgatctcggctcactgcaagctccgcctgccgggttcacaccattctcctgcctcagcctcctgagtagctgggactacaggtgcccgccaccacgccaggctaattttttgtatttttagtagagacggggtttcaccatgttagcccggatggtgtcgatctcctgacctcatgatccgcccgccttggcctctcaaagtgctgggattacaggcgtgagccaccacgcctggccacgccccccccccttttttttttttaagatgaagtctacctctgttgcccaggctggagtgcagtggtgtgatcttggcttactgcaacctgtgcctcctgggttcaagtgattcccctgcctcagcctcccgagtacctgggactacaggtgcgcaccaccacgcctggctaattttttctattttagtagagagagggtttcaccatgttggccaggctggtcttgatctctgactttgtgatccgcctgcctcagcctcccaaagtgctgggattacaagtgtgagccactgcacccagccacatgaatcatttttagtgccgtaattgggtttggggtcacccctcaccccagataaaagctcatctttctgagaaggtcctgaagatgtgacttgagtggttaggcagcctggcagggtgcacgtctgaggccgagataccctctcaatccatgccatgctccagccatggccagccatgctccagctgtggcccctggatctaggacttcccactgagtcagtttactttcctttttaatgaatcaggattctttcacttgtaaattgtagaaatcgactcaaactagcttcaaagaaaaagggaatttatagactcactgaactgaaaaaactctaggagctcttcatgtttcaggcacagctagattcaggagctcaaacaacgccactgaggctggagtgcagtggcgatcacagctcactgcagcctcgacttcccaggcctgagtgatcctcctccatcagcttcccatgtagctggggccatagttgaggtccaccatcgagagccaccacgtctggctaacttttacatctttttttttgcagagatggggtcttgctatattgtccaggctggtctcaaactcctgggctcaagggatcctcccatcttggcctcccaaagtgctggggctacaggcatgagccactgtgcccagccttgagtcatcattcctttacctaacctctactgacaatctttcaagtattttgaacattttgatattacaagcattgtggcaaagaacattcttgaatctatatctgtgcatacttgtgcaaagatagtggttggatactttattattttttattttttgagacagaatcttgctctgtcacccaggatagagtgcagtggctcaatcacagctcactgtagcctctacccgctaggctcaggtgatccttccacctcagccccctgagtaactgggactacaggcacgtgccaccacgcccagctaattttttgtattttattttttgagacagagtctcactcttgtcgcccaggctggagtgcaatggtacaacctcagctcactgcaacctccgcctcccaggttcaagcaattctcctgcctcagcccccggagtagctgggattacaggcgcctgccaccatacccggctaatttttatatttttagtagagatggggtttcaccatgttggccaggctggtctcaaactcctgacctcaggtgatctgcccgctttggcctcccaaaatgctgggattacaggcatgagccaccgcgcccggccaattctttgtattttttatagaagcaggttttcaccatgttgcccaggctggtctgaaactcctggctcaagtgatgcatttgcctcccgaagtgttgagattatagatttgagccagcgcgcctggcccatggttggatatattcttcaaagtgaaattgcagggtaaaaacatttgcatattgaaaaagatattgccaacctgacctccaaagaagttgtaccgttttatattatctccagtgatgtgtgagatgccagtttcttcacaattttgctcatgctgcgattaacaaactttaaaatcttggccaatctcactgatgaaaaatggtctcttggaccatcctggctaacacggtgaaaccccgtctctaccaaaaatacaaaaaattagccaggcgtggtggcgggagcctgtagtcccagctactggggaggctgaggcaggagaatggtgtgaacctgggaggcggagcttgcagtgagttgagatcgcgccactgcactccaacctgggggacagagcgagactctgtctcaaaaaaaaaaaaaaaaaaaaagaaaagaaaaaagaaaaatggtctcgttaactttcacttttttttgagacggagtcttgctctgtcgcccagggtggagtgtagtggcgcaatctcagctcactgcagcctctgcctcctgggttcaaacaattctcctgcctcagcctcctgagtagctgagattacaggtgtgtgccaccacacccggctaatttttgtatttttagtagaggcagggtttcaccatgttggccaggctggtcttgaactcctgacctcaggtgatccatcgaccttggcctcccagagtgctgggattacaggcgtgagccaccgcgcctggccaactttcacttttttttttacttacggtaaactttaattttccctaatgtcctttccctgttctagggccccattcaagataccgcattacgtttagttcctgtgcttcgttgagctcctcttagctgtgaaagcttctcagacgttccttgttttagatgaccttgacagtttttgaggagtactgctcatattttgtagattgccactcactcagttgggatttctctgatgtttttctcatgattaaactggtattatgagttttggggaggaggatcacagggatgggtgccattttcttttcttttctttctttttctttttttttgagacacagtttcactcttgttgtccaggctggagtgcaatggtgtgatctctgcacactgcaacctccgcctccggggttcaagcgattcttctgcctcagcctcccgagtagctgggattacaggcgtgtgccaccatgcctaattaatttttgtatgtttagtagggttgaggtttcaccttgttggccaggctggtcttgaactcctgaccttaaatgatccacccatctcggcctcccaaagtgctgggattacaggagtgagccactgagcctggccggtggggtgccattttctctttttggtcttttttcttttttttttttttttgagacggagtttcactcttgttgcccaggctggagtgcaatggtgtgatctcagctcaccgcaacctccgtcccccgggttcaagcgattctcttgcctcagcctcccaaacagctgggattacaggcatgtgccaccactcccagctaattttgtatttttagtagagacggggtttctccacgttggccaggctggtttcagactcccaggctcaggtgatctgcccgcctcggcctcccaacgtgctgggattacaggtgtgaggcaccgcacccggccaggggggtgccattctcatcatatcgtcaagggtatatacagttgtccctttgtatccttgggggattggtttcagcacccttggggataccagaattcaaggatgctctagtcccttgagtaaaatggtgaagtacaggtcgcagaatttgtttgagaaaagaaatacaataaaataaataaattggtgctgggtgtgggaatgtgcaccagctgtgtacgaaggttccggtttttccacatccccatcaacacttgttattatctctgtctttgcttatagccatcctagtgagtgtgaaatggtgtctcattgtggttttcatttgcatttccctgatggctgatgacgtcgggcatcttttcatgtagttattgtccgtttatatatctttttttttttttttttttttttttttgagacggagtcttgctctgttgcccatgctggagcacagtggtgcaatcttggcttactgcaagctccgcctcccaggttcacgccattctctatctcagcctcccgagtagctgggactacaggcgcccgccaccacgcccagctaattttttgtgtttttagtagagacggggtttcaccgtgttagccaggatgatctcgatctcctgacctcgtgatccacctgcctcggcctcccaaagtgctgggattacaggcgtgagccactgcgcctggccgtccatttatatatcctttttagagaaaggactattcagatcctttgcccatgtttaaattgtgttagttgtctttgtattattgagttgtaaaagtttcttttttctttcttttttttttttttttttgagacagagtcttactctgtcgccgaggctggagtgcagtggcacgatctcggctcactgcaacctccacctcccaggttcaagtgattctcctgcctcagcctcctgaatagctgggattagaggtgcccacaaccacacctggctaatttttgttttttttttggtagagatgggatttcaccatgctggccaagctggtctcgaactccttacctcagatgatccacttgccttggcctcccaaagtgctatgctggaattacgtgagccactgcacccagcctgggttaggatttcaacatagaaattttgtggggacacaaaaattcgggccctagcactgggtctcgtcacttcaagtgatcctcctgcctcagcctccttggtagctggggctataggtgcacgccaccatacctggctaattatttatcttttgtagagataaggttttgccacgttgcccacgctggtctcgaactcccggactcaagcaatcctcctacctcagcctctgaaagtactgggactacaggtgtgagccaccacacccagctttcttgccgaagtttgagtggctgatagtgattgaaaaggttggccctctgtagcagttactctccttcagtgtagtgttcagcgggatttcagatacacggcaaggtgatagggaagatagttggagatggcagtttacttttccttatattcaatgcaatccaattcagcaaacatattttctacgttaacaagttggactcgttagtggggatcatctgtgtcagagcattccgaggatgtagttagttgatcactgttcttgctgtgatttttacagcaggctggcttcgaagaccagagggctgtgtaaggatgttgtggggatttcagagatggatcagatacagcctttgtacttcagcagtgagacagacaggcacataaataactaacatccaggcaggcagagaaatgctgtgatcaaggttaaggaaggccgggtgcggcagctcatgcctggaatcccagcgctttgggaggccgaggcaggtggatcacctgaagtcaggagttcaagaccaggctggcaatcatggtgcaaccctgtctctactaaaaatgcacaaattagctgggcgtggtggcgggtgcctgtaatcccagctactagggaggctgaggcaggagaatctcttgaacttgggaggtggaggttgcaatgagccgagattgtaccactgcactccagcctgggtgacacagagagactctgtctcaaaacaaaaaaagaataaagaataaaagaaaatccctcattcacagcctctgggagatgggggtggagagcgggaggaggggaggggaggctgggtggggccaggaggtgaaggctgtgcaggtggccggggctgtattccaccagtggaaagggtgagtgatggggttggagtgggagatggctcctgagtgagcctgctcttctttcagcctggggacctgtgtgtgcccggtgggatcaaggacagcatgatgtgatgtgtggtctgtcagcccgggagagaccctgtgcctctgctgggtctcacgtcctcatctataaaataaagctgctggaccagatgagtgacttcttgggatttttctggccctagcaacctacgatgatgtcataatcagaagatatcttaaattaaaaaaaaaaggtatttaccttttaaaaaatataaaataggctgtgcgcagtggctcacgcctgtaatcccagcattttgggaggctgaggcgggtggatcatttgaggtcaggagtttgagaccagcctggccaacatggtgtaaccctgtctgtactaaaaatacaaaaattagccgggcatggtggcgggcgcctgtaatcccagctactcgggaggctgaggcaggcgaattgcatgaacctgggaggtggaggttgcagtgagcctagattgcgccattgcctgggcgacgcagcaagactctgtctcaaaaaataaaaatagaaggccaggcgcggtggctcacgcctgtaatcctagcactttgggaagccgaggcgggtggatcatgaggtcaggggtttgagaccagcctgaccaacatggtgaaaccccgtctctactaaaagcacaaaaattagctgggtgtggtggcaggcacctataatcccagctactcaggaggctgaggcaggagaattgcttgaacctgggaggtggaggttgcagtgagctgagatcatgccactgcactccagcctgggtgacagaacgagactccgtctcaaaaataaataaataaaaaaataaaaataaaaacagagtgagattccatctcaaaaataaaaatacaatatagtcacatggttctcattcaaaagggtctaaagcagtgacagggctccccaggcactaatctccctcctcggaggcaaccaggtttaccagttcatcagtgttatcagtttctcccacagagatggcaagagtctgtcacccagggctgaattctgaggaacccaacgatggggaaagtcagggacactcatgctcagaataggatgggattaatcagggtgggcttcctggaggagcctaattactcatgctcagaataggatgggctcctggaggagcctacttttgagccaggttttacaggaggggagtcactttggggcaggaagcaggtcacagaggagggacatgtcccaaatggaagtcataatctttcctctcaaagctgtcctcatccagtacagatggctccgcagccagccacctgcacaaaccaggaacgggggaatgatgttgctgcctgtcttctcacctgtgtccagcccagcaccaggtcctgccaacaccacttccttagcacattctcaagtcgccccatcttacctgagccgggagtggtagctaacacctgtaatcccagctactcaggaagctgaggcaggaggatcgcttgagcccaggagaccagcctgggcaacatattgagaccctgtttctaaaaaacagagagggcgcggtggctcacgcctgtaatcccagcactttgagaggctgaggcaggcggatcatttgaggtcaggagatcgagaccatcctggctaacatggtgaaaccccgtctctactaaaataatacaaaaaattagccgggcatggtggtgggcgcctgtagtcccagctacttgggaggctgaggcaggaggatggtgtgaacccagaaggcagagcttgcagtgagctgagatcgcgccactgcaccccagactgggcgacagagggagactctgtctcaaaaaaaaaaaagagtttgagcaagagcagcctggccaatatggtgaaaccccctctctactaaaaatacaaaaaaatgagccaggcatggtgctgcgcccctgtaatcccagctactcgggaggctgaggctcgagaattgcttgaacccgggaggtggaggttgcagtgagccaagattgcaccactgcactccagcctgggtgacagagtgagaacctgtctccaaacaaacaaacaaacaaagcgtctaacctggccgtcctattattttccacccagcagccaggatgatcttctcaacacacccactgcattatgtggaggagagtggaaagaggccggcgaggacagatgctgtggttgggcggccatgggggcggtggcagccttgtgctctgcagcaacccaacctcttttagatccgggacactgtgcgtcctctgcaccctggggcccattctaccacggcgcctttctcccagtgagtccttgttatgaactgaatgtttgtgtccccggaaattcataggttgaaatcctagccccgcactgtgatgggtttaggagacggggcctttgggagggagagaggtcttgaaagtggagcccacatccagacgcactggctcacgcctgtaatctcagcactttgggaggccaggtgggcgaatcaccaggtcaggagttcgagaccagcttggccaacatggcagaagcccatctctactaaaaatacaaaaaattgtcccagctacttgggaggctgaggcaggagaattgcttgaacccaggaggtggaggttgctgtgagccgagatcacgccattgcactccagctcaggtgacagagaaagactccgtctaaaaaaaaaaaagtggagccctcatgaatgggattagtgtctgtatacgaagatgcatgagagagatgctctgtgtccctgccatgtgaggatgcaatgggcgtctgcatgccaggaagagggccctcaccaggcactggcgcctcaaccttaggacatcccagcctccagaactgagagatacatttctgtcatttaagccatgcagtctatgctatttgattgtagcagccccaactgtctaacagggtcctccttatcttgtcctttagagctcagctcaaactgcctctccccggggaggacttatgggaagtcccctcccccagcaaatcccctgtgccccactgggcaacatcagggcagctgcacagttttttttttttcatagcactttatccagtttgtaatgatacaggctgacaggcaggcacccctccagtcttctccctcgttaaagatttggaattggtggccaggcgtggtggctcacgtctgtaatcccagcactttgggaggccgaggtgggtggatcacgaggtcaggagttcgagaccagcctggccaaggtggtgaaaccccgtttccactaaaaacacaaaaattaaccgggtgtggtgacagatgcctgtaatcccagctgcttgggaggctgaggcaggagaatcacttgaacccgggcggcagaggttgcagtgagttgagatcatgccactgcactccagcctgggcaacagagtgagactctgttaaaaaaaaaaaaaaaaaaaaaaaaaaaaggttggaataggtaatctctctcctgtgtgagaagatacgttgtgaaaaggtcactttcccatgccctcatccaccctcttctctcttcccccaacccaggaggtgacttttattagcttttgtgtctccagagtttctacaggtaaagataagcgagtatgaattcccactttattccctgccccctttttaatgtcaatcacgcatgaggccctgcacttgattttttcctctgaacaatgtgccttggagatcttggcaggatagcacatgggaacaccctcatttacaacatcttttatggccacacatggctttactatatggatgtaccataatttattatagctttttttttttttttgagatggactcactctctctcccaggctggagtgcggtggcacgatcttggctcactgcaagctccgcctcccaggttcacgctattctcctgcctcagcctcccgagtagctgggattacaggtacctgccaccacgcccagctaatttcttttgtatttttagcaaacgaggtttcaccgtattagccaggatggtttcaatctcctgacctcgtgatccatctgcctcggcctcccaaagtgctgggattacaggcgtgagccaccgtacgtggccaatttattatagctttttatttctttattataatttatttagctccctactgaagggtgcatgggtcgccctcagtcttttgctattatagacaatcccacagcaagcattgtccacttgctggaatccctaggtaaattccccaaagaggggattattgggataaaagggaaatgcatttggaattcagacagatgttgtcaggttgtccttcagagcggttgtaccaagtgacattcccactgataatgtatcagagtgcctgtttgtaattatacatgtatttatgtgattattgtatggtttctctccccacaggagggcagggactatgtcagttttctttatcatcataggccctcaataaatgttgaattaggctgggcgtggtggctcacgcctgcaatcccagaactttgggaggccaaggtgggcggatcacctgaggtcagcagttccagaccagcctggccaacatggtgaaaccccatctctactaaaaatacaaaaattagctgggcatggtggtgggtgcctgtaattccagctactcaggagactgagggaggagaatcacatgaacctgggatgcagaggttgcagtgagctgagatgaagccattgcactctaggctgggcaacaagagcgaaactctgtctcaaaaaaaaaaaaaaaaaagagttgaattaatgaatagattcatggttcttccaggaggggttggccaaggtaggagggagatcaccttcattttatgttcactgtgcccggcccagcttccctgatccttccatagaacagctgggagcctgggagagaccctggaggttctagaagacctaatcttgactgctgactcctgacccctgctccagagtagcccttctcctgctgtgaaatcaagaagtccatggctaggctcagtggtgcactcctgtaaacccagcactttgggaggcccaggcaggaagatcgcttgaggccaggagttcaagaccagcctgggcaacatagcaagatcctgtctctacaaaaaatttaataagaaaattagctgggtggggtggcttgtgcctgcagtcctagctactcaagataccgaggcgagaggattgcttgagtccacaggttggaggcttcagtgaactataattgcgccactgcactctagcctggatgagaaagtgaaaccatttctctaaaaaaaaaaaaaaaaaaaaaaaaaaaaaaaaaaaaaaaaggtctgggtgcggtggctcacgcctgtaatcccagcactttgggaggccgaggcgggcggatcacgaggtcaggagatcgagaccatcctggctaacacggtgaaaccccgtctgtactaaaaatacaaaaaattagccgggcgtggcggtgggcgcctgtagtcccagctactcgggaggctgaggcgggagaatggcgtgaacctggaaggcggagcttgcagtgagccgagatcgcgccactgcactccagcctgggtgacagagcgagactccatctcaaaaaaataaaataaaatgaaataacataaataaaataaaataaaataaaataaaaaagaaaaaataagtccaatgtcttagccctgtaaaggggcttaaaggatggacacttgcctgatgcctgaattgcctgtgtgtcctctgcttacatacctccagtgacggggaacttactccttccaagtgacttctttcagcttcagacaactaacttctagaaagcttttccatctactgccaggtgcagtggttcacacctgtaatcccaggactttgggaggccaaggcgggtggatcacttgaggtcaggaatttgagaccagcctggccaacatggtaaaaccccgtctcaactaaaaatacaaaaattagcgaggcgtggtggtgggcacctgtaatcccagctacctgggaggctgaggcaggagaatcgcttgaacttgggaggtggaggttgcagtgagccaaaatcgcaccactgcactccagcctgggcaacagagagagactcggtctcaaaacaaaaaaaaaaaaaaaaagaagaagaaaggaaagcttttccatttattgcgttgaaatctgatccttctagctgcctcctcttcagggaatcttaatgatggccctctggaaacagggctttctggcagatgagcaggagggatatttgtaaacaggtacccctcagcaattctccggcaagcagggctgactctcccaaggagctctgcagagctcagccacctcctcactctctcctgtcctgcccacaggtacgtgcaggaagggcggttccgaatcgaggagaggacgctgacagccttccagtggctctacagcccgcagcagcatcgcatcctcagccgggctgacctcgagtctccctccaggtaaaggggccttctgccttgaccctcacattctttggcctcggcccaggcctctcagctggtacttaggaagtgagctccgcactggtccacaaatccaccatggggaactttgccctcagtgatggggaggccttctaggaaagaatttatcagcctggatgcttgtcccacctcgaatgcactgaggcaactcactgcctctgctttctcctctataaaacggataggatcatactttccctgacttctcttgggagattataagtctccagtgaaatatgactgcagagatttacaaagcctggagattggtcgggctcagtggctcatgcctgtaatcccagcactttgggaggctgaggtgggtggatcacttgaggtcaggagttcaagagcagcctggccaacatggtgaaaactcgtctctactaaaaatacaaaaattagctgagcgtggtggcacatgcctgtaatcccagctactcgggattgagtagctgagacaggagaatctcttgaaccccggaggcagaggttgcagtgagccgcagttgaaccactgcactccagcctgggcaacagagggagactctgtttcaaaaaacaaacaaacaaacaaacaacaaacaacataaaacaaacaaaaaacccaacaaaacaaaacaaaagaccaaagactggagatccctggttccttcctctctggagggagagtggcaggtaaatttgctgggcacactttgctttgacctggagccagccgtgccttctttgtccgcctcctttcccatgccagagagtccagctgggatcctgagtctgggtagggggctgggaggtgagggctttttctgacccagatccttgctccaaacccctgcccactcttcccccagcactggacacgtatggccagcatcggcagtcacaacagaggcgtcctggcaacccttctgcagccacagcgcttcccaaggcctctgccacacccgacccggggactttctttccactttccccatcaaagccacttttttgttttttttttttgttttttttttttagatagagttttgctcttgtcgtccaggctggagtgtaatggcacgatcttggctcactgcaacctccgcctcctggaggcgattctcctgcctcagcctcccgcgtagctgggattacagatgcccgccaccatacctggctaatttttgtatttttagtagagtcaggttttcaccatgttggccaggctggtcttgaattcctgatctcaggtgatccacccgccttggcctcccaaagtgctgggattacaagcgtgagccactgtgcccggccacataacttcagatttcatacatgggaaggttacatgccagaggacttgaagaagagtctgccatatagtcattgagataagtgactgaattcatttttgtgatagaatattaatttttttttaagaaatagagtctcactgtgttgcccatgctggccttgaacccctgggctcaagtgatcctcctgactcagccacaatagttctcttttttttgagatggagtttcactcttgttacccagcctggagtgcaatggcatgatcttggctcactgcagcctccgcctccagggttcaagcgattctcctccctcagcctcttgagtagctgggattacaggcatgtggcaccacgcccagctaattttttatatttttagtagagacggggtttcaccatggtcaggctggtctcgaactcctgacctcagatgatccacccacctgtgcctaccaaagtactgggattacaggtgtgaacacaatagtttctaattattttatttaatgtattttgagacagggtctcactctgtcacacgggctggactgcaatgggatgatcatggcttactacagcctcaaacttttgggctcaaggaatcctgttcagcctcctgagtagctgggactataggcatgcaccaccttgcatggctaatttatttcattttattcttatttttatagagatggggtctccctattgtgcccaggctggtcaactcctaggttcaagccattctcctgcctctgcctcccaaggtgctgagatgacagacgtgagccactgtgcccagccaatagttatttttttagttcccgttatgtgtcatgcaaatgctttgcaggaataaattgatttaatcttcatagcaatgctatgatctaggtactattgttgtccttgtttttcagatgaggaaactgaggcacagaggttaagttacagctagtaagtggcagtgctcccaactactatgcacactgcctctcagagaataaggtttatacttgaagtgggggaaaaggggcgtaatttctttttctttttctttctttcttttttttttttttttttttgagacggagttttgctcttgttgcccaggctggagtgcaatggcacaatctcagctcactgcaacctccgtttcctgggttcaaatgattctcctgcctcagcctccctagtagctgggattacaggcatgcgtcaccacacctggctaattttgtatttttagtagatacagggtttcactatgttggctaggctggtctcgaactcctcgaactcctcccagagtgctgggattacaggcgtgagccactgtgcccagcctctttacaaagagcaagaaggtggtgtccgcaaactatagatgggtggacttagcatcagtcctagtcaagttccagagtcagcagttattaaagaggaggtgtgtgggcacttagacaaggaagacgtggacgatccgcatcggtgagtaggttccctaagaactcaccctactaggggaagctttttgcttttctgattagttttctagactcaaaattagaccgggggtggagcaggagactgcttctgagtttcagcaagcaattgttctttcttcttgtggtcaggtccttgcagatgacacagagccacatgggcagggggatgggacagctaaggaggttggtgagtggactgccatcagctgagttctattcagtgtgtttaaaggtggtttgatgagggaaggtgtgaccagtgtgctggcgacattgctgatggcaggaacctgggtaccattccagcaagcaagatggcagaattgggacccaaagtgccctggaagctgaattccaggtccaagtccagtagatactattcattcattcattcgttcattttagcaaggatgctcacagtagacactatttatttatttatttatttatttatttatttatttatttattcttttttgagacagtttcactcttgtcgcccaggctggagtgcaatggtgccatctcagctcactgcaacctccgcctcccgggtttaagcaattctcctgcctcagcctcccgagtagctgggattacaggtgcccgccacgatgcccaactaagttttgtatttttagtagagaaggggtttcaccatgttggccaggctggtctcaaactcctgccctcaggtgatctgcctgcctcggcctcccaaagtgctgggattacaggcatgagccatcgtgcctggccaggtagtagacacaatttaacaggggtaaaggataaatgtattttggtttctaatcctgtttgcacctgggcagcagggtgaaggaatcagaattgtctgaagggttcccatggagtagaagcttgggtatggccccatgtgttaggtgtctaccaaagaaaacgcttacattttgaggctgcaagagctcagggcagagtccagagtgagggaagagaaggtcctgctgttctgaggccaaggctctatgaggaatgttcctttgcttgttcatttatttggtgggcatggattgaatgccgttcctctgccagacattgtgccaggtgtcccccttgaacagctgagcagttgtatttctgggtgatggaacgggctgctgataggactatgggactatgggctggtcacccctgctatcgtttttttttttttttttttgagatggagtctcgctctgtcacccaggctggagtgcagtagtgcgatctgcaatgtccgactcccggttcaagcgattcttctgtctcagcctcctgagtagctgggacgacaggcactcccccaccatgcctggctaatttttgtatttttagtagagataggggtcaccatgttggcaggctggtctcgaattcctgacctcaggtgatccacccaccttggcctcccaaagtgctgggattataggtgtgagctaccatgcccagccagccaccacgcccagccagccaccatacctggcctccctgctatccttttttttttttttttttccccaagatggagttttggtctgttgcccaggctggagtgcagtgatgcgatctcagctcactgcaacctccgcctcccagattcaagcaattctcctgcttcagcctcctgagtagctgggattacaggcatgcgccaatatgccctgctaaattttttttttttttgtatttttagtagagacagtggtttcaccatgttgaccaggttggccttgaactcctgaccttaaatgatccacccgcctcagcctcccaaagcgctaggattacaggtgtgaggcaccgcgcccggccagccaccctgcccagcctccctgctatcctttctttctcccacaactatccattgtgatcctgctctgggtcaggccctcaaggaagaccagggtactgcctccatgggccacacattctagtgggagagacagacgataaacatgtaaacgcagagacaagagaatttcccaatatgaccagcgtgctgaagaaactcacacagggcatcgagatcatgagcagccagtgggtgtgtggggactctggaagaggtggaagtcctctccaagaaagtgacatgtgagctgagtcctgaagggcacaggggcgaccacataaagaagctgctggtgagaggtgttaagtgggtggtggggagggggcacggggcatggggtggaagagtccttctgcagggggagcagcaagtgcaaggctgttctagaagcagaaggccattgtagctagagcagagtcatgatccacagggtcaggaggccatgacccacagacagaagcgaaaacttctgtgcaattaaaggaacggctttctagcacttagagctgcctgaggatggagtgggctgccccgagggagagaacttcccatcactaagccatagtcaaaggccgctgtccacggaggttactgaggatgagactcaagcatcccaaaggttggctagaggacccttcgttccttctacgccttcacgttcaggagcatccttggtttggcggaagctggggggatgtctatggagtgcatgaatgaaagttccaggccgagcgcggtggctcatgcctgtcatctcagcactttgggaggccgaggcgggtggatcacctaaggccaggagtttgagaccagcctggccaacatggcgaaaccccgtctctactaaaaatacaaaaagtagccgggtatggtggcgggtgcctgtaatcccagctactcggcaggctgaggcacaagaatcgcttgaacccgggaggcggaggttgcagtgagccgagatcgcgccactgcactccagcctgggggacagagcaagactctgtctcataaaagtccagcctccagatcccaggcagcggggagtttcaggggtctgagcagccctggagactcgcagcatagcgttctgtaccccgtcccgggtcccgcgcaacgcagagctagagggagccccagagtatcttcctcagtagatcaggagcccccaggcctcaccgcacctcggttccccattgcccccattgcccccattgcatcttccaggaacccctggcgggcaggctgctccttctctccccgggtcctctgggtgcacctgccccgccccgcgcctttgttccggaggagccgccttgggcagcccccagggagctcaggacccgctgtaccccctgccaccgcctcccggtgcccgcccctccgccccctctccgcggctgcgccaggcgatccgcaggcagcggcacagggaccagggcgcgccccgggtggcggaggcgcggcgagggcgggagcacgaggaccccggaccctggatcggcgcgggctccggctgcgcgtgcgcggcggcggcggcgaggggcgccaggtgtgcgggcggtggcggctgcggagggcgcggctttgtgcgctggggccggccggggtgcgcgcgtgcgcggcaggactgctgcgagggaccccgccgccccggaggaggaggaggaggaggaggaggaggaggagggggctgggccgagggagggggcgaccgcggggactgaggtgcccttcgctccgggtccagaggcagccgcgcgccaggcggcgcagaaggtcagtggccccggggctgggattccgcagccagcctggatcgggacgtgagtcctggtgtgactgacggggaatcggagcgtgtgtggagtgtgaacgcgtgtgtttgcagacagacatcggcacgtatggacggcgcgagccggtactgcgttccggaggagccatccggcgtcacaggctgtgctggggaggtggggtgaccgtcctcagaaacccccgcgggcggggcgctgcacacacgtccacctatagggtgtgtgtgcgtgcgtgaggtgtgcagcccctgtcaggatctggcgagagaagctgaccgggatggaggtcagaggtagggtgtttacaggtggtggtagaaggaaaacagccaggaaccccaggaggaccctggagctaggctgggcttcctgaaaccccccatcccatcctcgctccagcctgtgcctattgcaggaagaggagctagggaggtgggctgccggctgagaggccttgagggatctttgggagcggggcccgatttcagcctgatcctcatttccagaggcctggatgggtgtgggggtgccggccctgagtggggggtccagggcaggcgtgtgttcaggagacctcaggggtccgtgtagactgtcctctggctttgccagcaccaggtgctgtgtgtctggacctgggagctggctgagggatacccttgcttcctctcatttgttttctatagctccccctacatgcttgttaacaaacctgaagggcacttgtatgccagtggggtttgctgggatgtgccctgttgaggggctgtcatcagagaagcctccatggggaatgagagagttgtcctgagccaggtgccagggctcttgggttctttgcctgcgttgtgaccctggggccatccctcaagccctatacgcctcagtttcccatggcgctttgccctcccccttcttcctgttgcagggtggggagtaaacagcttgcacagctgccaggaggctgggaggctgggaggcggggaggctgggaggctgggaggcggggaggctgggaggctgggaggcggggaggctgggaggctgggaggcggggagtgactcagggtctgtgaggtcttgggcagcgatttttcaggcgaaagtcccagcacatcttctcgacttgggcaggagttgggggaggctctgccctcagctccaagctgtggtgctgggttttctgagtcctggggtggggtggggtgggcatctgttggatttggctgctcaggcttcaagaagctgcctctggtccctccttcttcccagatatcaagtagttggagagggatggggctggggggcctggtagctgggtgggatgcgggggcgggagctgaagtgctacagcagcctctcttggttcctgtgtttgatgttactgggcagagacagatgctaagcttgggtagggtcggggctggtctaagtgggactgctcagctcagcatgttgaggcaatttggtgggaggtggcctcagctccagagaagaggaccctgctgctggaggcacgcttgcagctctcctcaccctctttcccatgaccctgtctgatcaactctggctgagccaccatggctcagaatgacttgagccttgagggaaagggaccctggcatggatgggggtggtggcagggtcacatagtggctaagcatgaaggccctgctgtcactcagacctgggcgtaagtcccagctccatcacctactgctgtggccgcacctgcattcccctcaatgggagcccgagagaaaggcttgcaggctgtggcttatttgggaagcaatctcaggaaacaagggcgaggacatggggtttgaaggagagggaggggaagcaacaatttgattattcccaccactctcctgggcggtgttctgaggagccttacagacagaactgctctgttggggagagaaacagggaagcacttacccattagccccatcccctgccagacaagggtggctctgtggacattcgctcccgtgtggacttccagattgcacatgtgtggggctcaagtggttccctgtgggtactccacacggcagcttccaagaaggcccagcgtggcctgacatgaagcactgtcccattgcacctgtaagatgctgcttggagcctgtggggacctggtcattgcagaagtgtttggagtgagaggtggggccaagagggctggaagcagcacactgaggtgcctaacactgcgtgaccttggccaaattacctgacttctctgagcctcggtttccttagctgggtgttttaagtgttaataaggcatttattgaatttttgaacatggtgatggccccatagcaagggcttcacccggggtatttctgtgtggccaggaagaccacatgcccagggtggctcagatagtcattcactcaagtggaggtgggtccgcataagaggacctctaaagacccctcccggtcataggacctggggctcaggggccagactgctgacctggtcagttcctctagggctgtggcccagtttcccagacctcctgaatgcttccatttcacagcctatgaattggagtcagcgatgtcctgctcctgggctggccgctcagatatacctcttcctgggctctgcctcaggaggacacagaggccagcactgggcagaggagggcgaggggagaggacagctcagaagcaggtgcttgaaggaggagtggagggagggtggatgctggcatttctggcattgggagctggcatacggtcatgggcatgggtctgggccatagtcagtgggggaggacaaggcagggggctgggggggggcaggaaaggaaggtgagcgggttggcagaaggtggccaagaagcatggaagagacagggacagggagtgggttgggcagccttggcgtatggggattcacagcgtctggggtggtggtaaccaaatgggagggggatgaggtggcaggaaggaagggagggcattgggtgaggtctagctgggccttcctagggcgtaaactggggcagtgttcgtagttcgtggtacagcatccacaagcctcctcgttccttttttttgagatggagtttcgctcttgttgtccaggctggagtgcagtggcgcgatctcggctcaccgcaacctccgcctcctgggttcaagtgattctcctgtctcagcctcccgagttgctgggattacaggcgtgcgccaccacgtcctactaatttttgtattttcagtagggacagggtttctccatgttggtcaggctggtctcgaactcctgacctcaggtgatccgcccgccctggcctcccaaagtgctggggtgacaggcgggagccgccgcctctggcaaaagtctcttcatccttttttccacggtgtccacctgcccctcccaggccaccgccccgtttgacaggggaggagttgtttgcaaacagttcctgttatgagcggcgattggagaaggtccacaggtgcctttgccaaggcctgttgccatggtggcatggtgggccttgtctgcctaccctctcccatctctgagcaatgtgcaccccccccaggagaggtcacagagtggggaaggtgtccagctgcctctttgctcacacatggccagctcaggctggccttacaaaggtcactgcgttcatccctctgcctgcaggcagggtcacacccagcctatgctgggagacccagcagccgccgtcttcattacagccatttaaagtctactccgatctctgcaatttgtttttaataagtttaatgaaaaataaagcaatgatactagcctattcatctgctccccttttaaagcgggcatctcatggatgatactcttcttgtccacacctctctcagtgctttggtgcctgtccagtaggaagttctgcctcatgtctgatctcagcctgacatgctgtactgtttttgggtgtgttttgtgtttctgattttctatttgttgcaacccttcagggattccagatggttctaagggcattcctgtctacctgctcatgatctggagcagtcgcaggggcacccaaggcaggtgtgatgccaacgatacaaggctgtgccgagcccctggccccggccacgctctggttctggacttttgcagcttgctctcagggccagctggttcccactcctttccctagttcagatccaggattactggcctccttcttggaccatgctgggcctgctggctgcgctctgccaggtctgggtcagcaagcagatggcagcaggcatgggcacttgggggactctggcacagtcagggccctgccgattagatggctggtggagagcaagagcaggaggggagagacagggagtgacaggcagtcgggaacactgaggtgtgcctgtgcatgtggacacatctgtgcttggtgtgcacgtgtggccttggagggcttgttgctggattgctgtgtctggacatctctgggtggttatatgtggttcttctgagcacacccctgtgtgtgcaccgtgtgagcacgtctctgtgtgagcacgtctctgtgtgtgcacgtctctgtgtgtgcaggtctctgtgtgggcacgtctctgtgtgtgcaggtctctgtgtgagcacgtctctgtgtgagcacgtctctgtgtgtgcaggtctctgtgtgggcacgtctctgtgtgtgcaggtctctgtgtgtgcacgtctctgtgtgagcacgtctctgtgtgtgcacgtctctgtgtgagtacgtctctgtgtgtgcacgtctgtgtgtgcacgtttctgtgtgtgcacgtctgtgtgtgcacgtctctgtgtgtgcaggtctctgtgtgggcacgtctctgtgtgggcaggtctctgtgtgtgcacgtctctgtgtgtgcacgtctctgtgtgtgcaggtctctgtgtgggcacgtctctgtgtgggcaggtctctgtgtgtgcatgtctctgtgtgtgcactgttgtgtgctctgggttgttcatgggtactttctctggatatgtgtgccagccacctactgggtgtctccagggttctcaagagtgtgcccatctggatggcaggtgatactttttccctgcaggatttcctgcccccacggaggctcccttgagtcttctgccatgccccatcccgccctctctccaggcttccttatcctgtttctccctctgtctgaggaagttgcttctccccctctggctgtgtgggcgtccactgccttctgggcagggcctgaagagggacggcaagtccagcctccagccccatcctcccgagctctgagctgagggtgatgggctcaagctctgagttgaggagatgagtcagggatggctgcagggggtgggcagaagtggcctgtgtgtcagcatgctgtagggaagtgtgtgctcttgcccccctccacctgacccgccctcagtggcttgggcaccagtgcagctgtgatgaggctcccttaccttcatactcttccccagtagccttggttggcacagtttctgatggggagcagagtggtctctggggctccgggcatccaatgggggccttggccttagcataatttatctcaccataatcactggtactaatggagctcttcctgcaccaggccctggactacacactgtacatgtaatcagctcatttactcctcagaacaatcccatcccaggggatagtaggtcctattaggtgggttcgaaaacatccctggccaggcgcggtggcccatgcctgtaatcccagcactctgggaggccaaggtgagtggatcatctgaggtcaggagttcgtgaccagcctggccaacatggtgaaaccccgtctctactaaaaatacaaaaaattacccgggtgtggtggtgagcacctgtaatcccagctactttggaggctgaggcaggagaatctcttgaacctgggaggtggaggctgcagtgagcccagatcgtgcccctgcactccagcctgggtgacagagtaagactccgtctcaaaacaaacaaaccatccccattttatgaggaagttttcccattttatgaggaagtagaggctcagagagcctgggttacttccacaaggtcacacagctagtaagtgatggagccgggttctgaacccagacccgttcttctgctgttccctccgctcttcacaaagctgtgaagctgtgtccgtctcgtcttggcagtctccctctcagagaggccatcccagatcaccccctctacacaggactccctagccatctggtcccatttggatcggatcaccctattgtaaatacctgcataaaggtagccctcatttatcctctacttcctaaccccctcttccccacctagagcagggacctgtctgtcttgcttactaaaatattcttagaactggaagacagcttggaacacagtagggatgcaataaacatttgatgaatgaatgaattaatgaatgaagagaggactgactccagacctaagcttgaaatccctcctatatactgtctcttacacaacagggactgttgcagagtggcaggagcacaggctctggagccagcttgcttggttcaaattctggtcctgccagtgttctggttatctaatgctgcttaataaaccacccaaagcttatggcttaaaacactggtgacactgattttgcccatgaatctgcaacatgggcagggttcagtggggataacgcttctccactcagcattgtctggagtgtttcaaggtctaggggctgaagccatctgaaggcttagtcgctcacacgtctggcgtttcttgctggctgttggctttgggtcagttcctctgcacatgggcctctctatgtgctgtctccacatgctagattgggcttcctcccagcatggtggctgagctaagggacaagcatgcccagaaagagagccaggtggaagctatttcactttttattttatttgtttatttattgagatggagtcttgctctgttgcccagggtggaatgcagtggcgcaatctcggctcactgcaacctctacctcccgggtttaagtgattctcttgtctcagcctcccaagtagctgagactacaggtccatgccaccacgccaggctaattttttgtatttttagtagagacgagggtttcactgtgttagccaggatggtctcgaattcctgaccttgtgatctgtcctcctcggcctcccaaagtgctgggattacaggcgtgagccaccacgcctggcctatttttatttatttagagacagagtctcgctctgtcgcccaggctggagtacagtggcgtgatctcggctcactgcgacctccatctcccggactcaagcgattctcctgcctcagcctcccaaatagctgggactacaggtgcctgccatgacacctggctaatttttgtatttttagtagagacagggtcttgccatgttagccaggctggtcttgaactcctgacctcaagtgatccgcccgactcggcatcccaaagtgctgggattacaggcgtgagccaccgcgcccggccagcagtttattcttttagcagcagctacacttttgctcactgatcccctggccacaggtgaggcttgggtctgtccccagatccccgcctactctcatgtagtccaggaggcatcttactgtgcagagccctgctgagggtggggcccgtaatgagagaagggggaacttgaatgggaaaggccttttctgtcccagtttattatctcattacaggtcagccctgctcccttcaaggggcctgggacacatgttgctgatggagataccatgagggtggggctcaggcagaattgctctgggcttggggctgggatgaaccccaccagacccccatctttatccaggaaaaatcaagatggtgaggcctgaacatgctgtgtttgagctgagggagctctccgcttctccctgtccctgccgcctgcttccacctgagtcactgttcatctgcctgcggcatcatccccctgcggcatcatccccctgcctcgcttgctggcctcagggaggaatctcagggtttgctccttgtggcccaggttagggctgctcctgagcagagcgttggcagggggcccaggaagaatctgggggtttgcacgagcccagcctggcagtgtctcccatctaacgcagccctcatttagggcctgctctcctctgagccttccctgaaggaatggcagaagggctcaaagggggactctgggtttgaattctgtcaccttccagccctgttaaggaaggagaccactgctcctcctgctgccctcctgcccccaccttgcctagttcacaagataggaggagagaaaaagcaaaaagttggaaaaaaaaaaaaagtaagataaatagccagacaaccttggcaccaccacccggccctaggagttaaaaaaagtgataattataacatcaacccctgacctaaactacttttgttatctgtaaattccagacactgtatgaaaaaagcattgtgaaactttttgttctgttagctgatgcatgtagctcccagtcacatttcccacgcttgcttgatgtatcacgaccttttcacgtggacccctttaagttgtaagcctttaaaaaggccaagaatttctttttcgggaagctcggttcttaagacgcgagtctgccgatgctcccggccgaataaaaacctcttccttctttaatccggtgtctgaggagttttgtctgtggctcgtcctgctacactgtgaccttggacgagtctcttaacctctctgaggctccagttacttaccaggagggagactgtggtatggtaaagatgaaaggaagtaaaaagtatgacttttttttttttttttttttagacagagatttgctcttgttgcccaggctggagtgcagtggtcagatctcggctcaccgcaacctccacctcccgggttcaagcgattctcctgcctcagcctcctgcgtagctgggattacaggcatgtgccaccatgcctggctaattttgtatttttaggagagacggggtttcaccatgttggccaggctgatctcgaactcctgacctcaggtgatccgtccgcctcggcctcccacagtgctgggattacaggcgtgagccaccgcgcccagcctggagttattctttacagatgaaaaacctgaggcagagggagtttaagtggtttcctcacagctacatttaatgtcaggactggggctggaatccgtgtgttctgacaccaggtggtggttgcttatcttttgcaggaggaggatttccccctcccttcaaccccttccgccagagggcaacatggctgccatcctagaaacaagcccaggaagacgctccctttcctcctcgcaccacccaagcttgcctgcagagggcgcaaacgcccaccttctggccggtcctgggaggcgccaggtgccccgccttagcaggggagggcgggagtgacccagctgggtgggtgtgggcagagttggctgtgtgttctcctttagtgagaagctccttcagacagcccccacggtccaagcctttcttttctttttttttcttcaattttttttttttttaatgttttgcgatggagtctcactctgttgcccaggctggagtgcagtggcgtggtctcgggctcactgcaccctctgcctcccggattcaagcgactctcctgccccagtctcctgagtagctgggattacaggcaggtgccaccatgcccggctaatttttgtagtgtttagtagagacggggtttcaccatcttggcagggctggtctcaaactcctgacctcaagtgatccacccaccttggcttcccaaactgctgggattacaggcgtgagccatcgctcccagcctttttttttttttttttttttttgagatggagtctcgctctgtccccaggctggtgcgcaggggcgcgatctctgctcactgcaacctccgcttcccgggttcaagccattctcctgccccagcctcccaaatagctggggttataggcgcatgccaccatacctggctagttttgtagtttttagtagagacagggttttaccatgttggccaggctggtctcgaactcctgacctcaagtgatccaccccaccatggcctccaaagtgctgggattacaggtgtgagccaccatgcccagctttggtttttttttttttttctttttttttttcgagacagagtcttgctttttggccacactggagtgcagtggtctttactgcagccccaacctcctgggctcaagtgatccttccacatcagccttctaggtagctgggaatacaggtgcacagcaccatgcctggctaatttaaaaaaatttttgtacagatggggtcttactatgttgctgggactggtcacaaactcctgggctcaagcaatccccctgccttggcctcccaaagtgctaggatgacaggtgtgagtcaccacacgctgagcctgtttttttgttttgttttgttttttttgagatggagtcttgctctgtcgcccaggctggagtgcagtggcgccatctcagctcactgcaagctgcctctcccaggttcacgcaattctcctgcctcagcctcccgagtagctgggaatacaggcgcatgccgccacacctggctaagtttttgtattttcagtagagatggggtttcaccatgttggccaggatggtttcaatctcctgacctcgtgatctgcccgcctcggcctcccaaagtactgggattacaggcatgagccaccgcgcccagcctgtgcctgttttttaaaacttgaacttttagcatatcttcatatattaacatatattaagtgctacctcgttattttcagtggctagatagtattccattgtacgcttattctgcaatgtagttaatcctcagttgatgatcatttagattattttttgaatttgctattataatgatatgattaacatctgtatacatagatcttgtcaagtggtatgagttaacctgtgcaataaatttctaaaaacaaaattgttggcataaagggtatgtgcacttaaacaattttgatagagtgtattagtcagggctttgcagagaaatagaactaataggaaatatatacatatgtatataggggtgtgtgtgtatgtgtgtgtgtgtttagatttattatgagggattggttcatgcaattttgtggggtttttttgtttgtttgctttgagatagagactggctctgttgcccaggcaggagtgcagtggcacaatctcagctcactgcaacctctacctccctgattcaagcagttctcctgcctcagcctcctgagtagctgggattacaggtgcccgccaccatgcccagatttttttttgtatttttagtagagacgtgggtttcaccatgttgatcacactggtctcgaactcctgacctcaagtgatccacctgccttggcctcccaaagtgctgggattactgagccccagccaggcatgagccactgcaccccatcaggttaatgcaattttggaggccgagaagtcccatgatttgccgtctattagctggggatccaggaaagctggtggtatgttctagtccaagtcctaaggcacaagaacgaggagcgttgatagctgagggcaggagaaggcgggttctcagctcaggcagagaatgaactctcctttcctccacatttttcgtctattcaagctctcagtggattggttgatgccggcccacattggtaaagcggcatcttctttacttagtctaccaattcaaaggctaatctcttccagaaacaactcacagacatacccagaaataatatttcaacagctatggagatatcccctagcccagtcaaattgacacataaatttaaccagcacagagatattgcccaatagctacacattaatgggacgcccgtttccttatacctttacacaattatcaattttttctttttgagatggggtctgggctctgtcactcaggctggagtgcagtggcccaatcatggctctgcttcctgggctcaagtgatcctcccacctcagcctcccaagtagctgggactacaggtgcctgccatcatgccccactaatttttgtattttttgtagacatgggggttccaccatgttgcccacactggtctcgaactcctgagctcaggtgatccacccgccttgtcctcccaaagtgctgggattacaggtgtgagccaccgtggccggcattatcaaatttttaaaactttatctgatgggtaaaagtgataccttgttattatttaaaatttttaactgtagtaaacttcgtagcttctttagttcagagccatgtgtggctaaaactctcttggcagatggaccttactgaacagataagaataaactgcaataattttgggaaactgaggcgggcagatcacctgaggtcaggagttcaagaccagcctggccaacatggtgaaacgactcacagacagtctctactaaaaaaaaaaaaaaaaaaaaaaacattagccaggcatggtggcgtgtactggtagtcctagctactctggaggctgaggcaggagaattgcttgaacctgggaggcagagactgcagtgagccgagattgcaccagtgcactccagcttgggcgacagagtgagactccatctgaaaaaaaaaaaaaaaaaaaaagtaaataaataaattgtgcaattgtggtatatgtctgggccctgctcttggaactcagtttttacaagccctccctttgcaatctgccatcatcttgcttttcagcacttgtgcaatgggaaatttagtctggaccttgagatagtgcaggtgggcagtgatctgtggactgtaaatcactatgcagatgctaggtgctgtttttatcttgaccctgaggcgtgaattcttcactaatgtggggttgctggccctgaatgcccactgtgccctgtttccctggagaccagcatctttctccatcatccttttttttttttggtggttttgagatggagtctccctctgtcaccaggctggagtgcagcggcatgatctcagctcactgcaacctccacctcctgggttcaagcaattctcccgcctcagcctcccgagtagctgggattacaggcatgagccactacacccagctaattttgtatttttagtagagacggggtttctccatgttggtcaggctggtctcaaactcccgacctcaggtgatccacccgccttggcaggtgtaatcccaaagcgctgggattacaggcgtgagccaccgcacccgacctctctatcaccctttatcttcatatggtttatgaaggaagcagaggccagtctaagtctccccttggatgactagtaggctgaagtctcaaaagagtaggtcacctgcccccagtgacttagaggtggatctgggatgagagctgagctccagggggttagtactggggctggaatgggtactactgtctggatgggggaggatctgggtcagaccacctagtgcctgcttcactcgggacatctgtttcctgagcttcctgtaactgcctcatccccatgcctggggaaggagcttgtctcatctttcagctcccactggtggctatgaggtctgagctgctcgagcagaggaaaccacattgtcccttcctcccgtcctgccccgagggccaggggacacagtggaggggctgctgctgacaggagcctgaactgccccctcctctgagcccagccagctttcttggctctacctgcctcaaaagcccgtagaggccgggcgctgcgagcgccgtggctcacgcctgtaatcccagcactttgggaggctgaggtggacggatcttttgaggtcatgagttcgagaccatccaggccaacatggcaaaaccccatctccactaaaagtacaaaaattagccaggtgtggtggcaggtgcctgtaatcccagctactctggaggcagaggcaggagaatcacttgaacctgggaggcggaggttgcagtgagctgagatagtgccactgcactccagcctgggtgacagaacgagcccccttctctaaaaaagaaaaaaaaatgcccatcgaactgggtgagttccctggagctctgccctggggttgggactctggctgggactttgccccaggctggtccccgagaaacacctacagcccttgtgaactgtgacccacagcaggctctgggaagcgttttgagcctgagagagaaggagcccgtccagccaggcattgggggtagctgggtacttgctctttccatcttcattattctctccccagtgatgagctgagttttgctttaggaccttacttttcctgtctgtaacatgggcactgatgcactgtgcatttctgtggatccagaattagtggggctgataatcatcaagctgggttaatttggttggattccttcacttccctgagcctcagtgttcctatctgtaaaatgggataacagggcaccctctcagaggggttgtgaggctgaaaagctaagcgctttggtccgcgctggcccacaggagactcacagatgccggtgctgccctggctctcttgtgcccgcagctcatcctcctctccccgctggctgctgagagtcagctgagctctgggaggaagctgggctgtgcttgatggggccaggagggctgggcctgcttcacagaccgcttcccttttctctcttttttttttttttttttttgagatggagtctcactctgtcacccaggctggagtgcaatgtcacggtcttggctcactgaaacctccgcctcccaggctcaaacgattctcctgcctcagccttccgaggagctgtgattacaggtgcccgccaccatgcctggctaatttttgtgtttttagtagaggtggggtttcaccatgttggccaggctggtcttgaactcctgacctcaggtgatccgcttgcctcggcttcccaaagtgctgggattacaggcgtgagacagtgcgcctggccgcttcccttgtctcttgactcacaatccttcccagggagcccacagtctccttgctgtgcacggcacatggaagaggaatcacagggtcagagcagggggtcaagaagctgcgcgggactgaagcagggacagaatcgtccttgacagtaatgatagcagctcccgtgacggccttggagccccgtgctcagtgtttctgtttgctgataaactcgtgaaggtggtggcagcctccccaaattacagaagagaaaactgaggcctggagagattaggtaacttgcccaaggtcgctgggccccaaggaaggagaggaaggcagcgtgggaaaggccctaggaagactctcacaccctgcagggctcatgatgggccatgagccgtctgggagagtcccttccccctttccagccctcagtctggggacgtgtgggcccctggatcctcctggtttctccaaggttcctggatcccagcggcatcgaagaagtccaggctgtgggttctgcagggccggcagccgggccagtcctgctccttggccgggtgtctgactcaggagtgttgtttgtggctgtcaggggcacaccccccggtgggggaaaccagcctcagggtggcagcagcggaggcctcgaaacgcaccccttccctgtctccaggctgccgttcagatgtctgtgcctgggccggagtctgtcccggctctgggaacacttggtccaggtgttcatagctgggcatttacctggctgtctccatagaccgggaggccccagataaaagcatctgtcagctttgtcttcccctagaatgcatgcggcgggcagctttcacatgtggtcagtgtgggtggtgaggcgtgcccaagtgtgatgtgactatcaccccgcttctctctcatgtatgaaagcgcatcaacgtatactccaaagatgggcctgtcattaactccctctaactgattttttaaaaaagtaatttgcaacaggatttttttttttttttttgagatagagtttcgctcttgtcgcccaggctggagtgcagtggcgtgatcttggctcactgcaacctctgcctcccaggttcaagcgattctcctgtctcagcctcctgagtagctgggaatacaggcatgtgccacgacgcccggctaatttttgtacttttagtaaagacagggtttcaccatgttggccaggctggtctcgaactcctgacctcaggtgatctccctgcctcggtctcccaaagtgttgggattacaggcgtgaaccactgcacccggcctgcaacaggaattcttgcaacgtatgcaacacctccaaccccagcacctcccaactgaggctgtgggctgtacctggctcaccctggtgctttctgcacccagcatggtgcttggcctagagcaggtgttgctgtcagcggcgggaggccaggtgggctgactgttcccactttcacttgttcacttgtcaagctcttttctttagttgggactttattaatggagaatgaaagaaatccaactcatactggctttaggaataactctttattcgtacggctggctctcctatacccggggtcagctggttcctggcacagccggatcctggagctcagatgatgcccttgagactcaatcttttggccgggtgtggtggctcccgcctggaatcccagcactttgggaggctgagacgggtggatcaccggaggtcaggagttcgagactagcctggccaacatggtgaaaccctgtctctactaaaaacacaaaaattagctgggcgtggtggcgggcgcctgtaaacagatatgtgggaggctgaggcaggggaatcacttgaaccagggaggtggaggttgcagtgagccgtgccactgcactccagcctgggtgacagagcgagactcttcaaaaaaaaaaaaaaaaaagacatgatctttctcctctttccctttctctgtcagttctcttctctgccttcctgtgagtcggtttcattttccccacactctccacagccccaggctttcatctcatgcttcagcaggggaagcctcttgggatggtgtcttgttgggtttacttaggtctcctgaaccagtccccttggctggccaggcctggtcaggtgcccactcctgaccctggaggtggattgagtgcagagggttcttctcagatggaggcagggcaggcaggacccaagttgtccacggtacctgttgagcacttcctgggtgtgggtgggtgcctctggggagagaggcgcttgtggcactctgcagtggccatcctgtgggaagccagcagcctgaagccaccccagagcatgaaccacacaatcctaactttcctggggcagaggtgagggttgggggaagcctccgggctcctgctggggactagctgccttggaggtagagagtcagcccccagccctgctctggcccaggaccctgaagctgctcccccagcccactcagggcttgaggcccctgtgctgtcccctgctgtgaaggagtcaagaaaatagaaatccttgtacccttcgtccacaagctggggttggcccctggcacctcagcacggagtctaggaccttcacagtggcagcaggtgccagagaggaaatttcagggagggttggccagagagagaggccaatggcaccagctagggccgtttttttcctttttttttttttttttttttttgagatggagttttgctctttgttgcacaggctggagtacaacagcatgatcttggctcactgcaacctctgcctcccaggttcaaacgattctcctgcctcagcctccagagtagctgggattataggtacctgccatcatgcctggctcatttttgtatttttagtagagatggggtttcaccatgttggccaggctggtctcgaactcctgacctcaggtgatccacccgcgttggcctcccaaagtgctgggattacaggtgtgagccgccacacccggcctttcttcttcttctttttttttttttgagacgttttcttccctttctccactgcttgggggtagggtggggcctggggccctatctgtgcccactccccccagtgtctgttgtagtgtacgtgccacatccctttgaggggctgccattagtaagtgcctgctgtgtaccaggtgtggtcagcaccagtgcgtgcagagatgagcactggccctgtggtgtgcagactgggatgcgtgcaggacacgctagccctgtggcatgaggaccagcacctgagcatgcagagatgaggacgaaccctgcggttcagctgggaagacaaatccacccgcacatgggtaccgcccccccaccccacacagccagcgtgaagcatgccactgctctgacctctgtctagacacttggcggcgggggtggggggcggctgacaggtacagctctgtgcccatgtgtgtgtacatgcgaatgccccttgcagtgtgatgtggtctgagtatgtggatgagtgcctgcgggcacatgtgtatgcgttcatgtctgtgcacgtgtccaatggggctttgtcagtatgtgagaagcgtgtgcaggtgtgtctactgatgcctgtgtgaagtggtgtgtggatgtgcacgggagcgtgtgtgccgcgctgtgctcaggtgtgtacaggtgtctaatgatacgtatgtctgcgtgcatgtatctgtgtgtacctgggtatcctgggcgtgtgtgtgtccatgtgtgcatcccacgtgcccctgtgcccatgcgtgtgcatgtatacttacatccacgtgtgctagtggaatgacatgtgtgtggctggttcctctggcgtgtgccgagccatggtggggcaggcaggcaaaggtccctgtctcaggcagccctcgggagtgggtgtgaaggtccccagtgctcaggcgtccctgaggcttccagctgaatctttctgtccctcctaggcgtggctgtgggaatccttggggcgcctttgggttccaggaagctggggctgtgtgggccgggctgctaactggggctgtggagcaatctgccagccgagccccttccggagctgtgggttcctctgggtgtggggaagctgccctccacaacctcctcggcctatcttggtgcctcctggagtgcaggacacacctcccagctctgcagcctcacccacaggaagctcgggttgggggcaggcgaagagggaggtgccacgctgggctccccgccctgcaccggcactgaccccgctgtaccacggccctcttgcggacagccccggggacgtcgttgggacatcgctgggaccccgggctctgcagccacaaccatgtttggccggaagcgcagtgtctcctttgggggcttcggatggtgggtgacaggtgggagggtgggggaatgatgggagagaacttagaagtgaagtcttgttaagtgcattggcggccgtgggaacagaggggctcgggctgtgcctgagagctgggtctgctgacgccctggcaggtcgagatgcaggatcctggtggggacatcagagaccgtaagccttccccactgtccctgggcacaatctgctggcgaatcctggaggtctgcgccggctgcccgtggggaggtggatagcatgagtgtgactgcagttgaatgtgtgtgtctctgtgtccgcaggttcccatgtatgtgtgtgcgtgtctgggattatgtgtaagtgtgtgtgtgcgcgtttgagcctgtgtgtgcaggcgtgtgtgtgtggctgtgactgccagtccgtgtgaccgtgtgtgaggtgtgtgcctgtgcatgtgggcagctgcctgtctgcacttctggccttctgtgtctgtgtgtgcttgtgtctgcgtgtttgtgtgtgtgatgctcctgtctgtgctgttgttgtggccttgtggcaggggagtctgtacctgctggacctctgggctgcctgctgtcttgggggtgggttgtgagagaaggtctcccacctgcaccccaggcagcccaccctagctctgtcctagcctgagcagctgcatctgtccccagcctcctgcctggccctctggacactcttgcctctaagcttctgtctgggatgagggatgtgctttttcttcccggcggggggcagaaggtaggcacacgaaggccaaaggcttgtctctggttcccagtgctggcagcttcttcgcagctggggaacagagtctggtggttttcatgatcggtttcctttcagtgcctgggctgggggcgttgtcagactgggagagggccccgcgggaggtggccggggggtgtcccggtgtggaaaatggtggactaatgggggtggcacgaagggcgagggggagaggggctgtgttcctcggtaatttttcgcttccgtgtgtgtggcttatttccctcttcctcctcttcaaaagcactttgccatccatcctctggcagggggggactgtgggcactccatgtttggcagatgggatggtgcggatgagaagatggcacagcgtcgcctgtgtctgctctcgggccctccctgacgcctggatctgggagctgccaccccgagggtaggtgccagtgtccgggaggcagcagaggacttggcttctggttgggaggggtgtgtgtgtcttggctgtgggccttgcagggcagggcccagcaattagattgtgccctccaaggcccgcctttctctgggaggtgtggagcagatggaaggctggtcgccagaaagctccgggtgcacaggtcccggtctcagcctagcttcattccatatgaagccctctgtgttgagacccacagctccagagcacaaggcaaagccaggcctgagatttgaatctgggcaggtgagggggaagacaggagtgtggctgcccagggctgccaagatagaaagcagaattccaagttcttctctagcagcccttctcactggggcttccttaatgaaatgcacattcagattcaggaggtctagggtgagccgaaggtggaggaagagccctaggatgtcccagacgcccttgtgtgctggctcagtgtccactaggctgtgggttccaggagggcaggccctgccccgtcgcgttcacctggaagcctggcatgtcacacaggctcagtcgatgcttgtggactcatcgaggtcttttgcacacagcaggtgtctgcttggggccccttgaggttgacgggatggcggggccttctgggcttggaaggttaaggcagcaagaaagggggcgagactggggtttgggcctcctcatctgggatggctgtcagctgggagggggtgtcacggattcctggagccctggtccctccagacagtgaacagaatctctggggctggtgttttccaagctccattggatgcagggtggataacctctggcaccaggggcagacaaggtgatgagggtgggtgggatgggatgggagagggaggagtgcccaggagccttggcttcctgaaagggaaaggcccagcctcacagtcctctccatctcccatctcagcctctccaaaaccagagccctgccctcctgaggccacaccctgatgtgggaactctggtgggctggctgctgtgtaggcgtggtttgaaccagggctgctgtgaccacggtgcctgtaggtggtgcggtgggcggggctgacccgacagcggtcagaggtgcacgcaccaggagccccggttccagcggttccagcgccgactccaccttgaccattgaggaactctaatgggacacttcctctctctgggtctcagtttccccttgtgtcagtgggggatttctgccttacccacaacacagggctgttgtaagaattaggagattccttgagaaaatgtaaaacctaagcgcctgctgtgaggggctgccatccggcagctctgggttgcacgcgttacagcagagtgtggggctctgagtcctgctcggatctgggtgtctgtgcgttgaatgggggaagaggagggtctgcaccccagagcgggtggggattccagggtgagaccctcagggaccagtagtggaagccctaaggaagggactcaagaggacgtgtgaggaagaaactgggagagacgtgggccaggcccctcggggtgccgcttgctttgctgttgtaactgagatcagaaggtgctgggagtttactcagagtgaaaggaccccgtcccctagctccaggcctcagggtgacttgtgggctggctcagctccgtgtcctctcctcttccctggagctgtgactgtgggaagcctgaggcagcgctgggctggccagagaagggtgccggaaagagcctccagggtctccagcatgctggagccagtggcagttttagtgaagctgacagtgatggtgacactgatgatgacatgtggtgacatggacagtgatggtgacacgaatcgtgatgttgcaaaggcagcattggtgctggtggcagtgctggtgacagtggtggtcacgacccttccacaagaggagatactgacagtgggaacactgtccacctttctgcctctggagagggaggaggggcctcttcttgccagccataagggctggcatatgcaggggggtaaaaatagaacctcagcggcgctgtctccccttccagtgagggcgggcacaggctggggatggaggagctggctgtgagggcagtctgcagcaaacgtgatcttccccgctctgaacctctgtgcctgatacaacccaccagggtctgccccaggagcagggtctgcctccctggatggactggtggctccttgggcaggagggtccctggggctggggatgcttgcgtcttcccaaagcagacgcctgggaaatatggatgtccacctggcattcagattgacatccgtgctgacccctgaagccgggttgctgggttctcttgcgagggtagccgtaataaagggagaggctgcatacaaagtgcttacgatccctggacctgacgtgagatacctgaattcagactgggccagtgattttacctttctgagcctgggtttcctcatctctgaaatggggagaataataatacgcatgttgtagggtggtgtgtggccccagctctcccagcactcagaggcgtctctccccctgctagcggagaactggcccctttagccagtccctgacagagccctgctgtctggtggtttgggctgtcccggggactcctccatacagatgctatgtaggagtcttcagcctcagcactgaccggagcccttgcttttctcttggcaggatcgacaagaccatgctggcaagtctgaaggtcaagtaagtagcaatttcctgttctgtaaaggtcagagatgacgcggatcagagcgccgggcccttgctccccccaggttgtgggagacacaagaggggctgtcgtgtttgtcagattccagtccgagtccatggtgcttccagatcggaggaggctggactaactcttattcctggggtgttcagggagaggtagaggtgggaatggaatcaccaggggctagaatggtgggagtgtgtgtagcaggtgtaacattcagtcccattattcttttttttctttttctttttctttctttctttctttctttttttttttttgagacggagtcttgctctgttgccaggctggagtgcggtggcatgatctctgctcactgcaacctccaccttccaggttcaagtgaatctcctgcctcagcctcccaagtagctgggattacaggcgcccaccaccacacctggctaatttttgtatttttagtagagacggagtttcaccatgttggccaggctggtctcaatctcttgacgtcatggtccgcccacctaggcctcccaaagtgctgggattataggcgtgagccactgcgcctagcccagacccattatcttcctatcactttagtttttagatatatattgggctgggcatggtggctcacacctgtaatcccagcactttgggaggccgaggtgggtggatcacctgaggtcaggagttccagaccagcctggccaacatggtgaaaccccgtctctactaaaaatacaaaaattagctgagcgtgatggcacttgcctgtaatcccagatactcaggaggctgaagcaggagaatcacttgaacccaggaggtggaggttgcattgagccgagatcacaccattgcactccagcctgggggacagagtgagactctgtctcaaaaaaaaaaaaagaaagataattacattttttatcactttaatttttatgtgaactcccaatcctggcagtgactttctgacattccccgcctactaggacctgactaaacactccagggtatgtgtgtgtgtgtgtgtgtgtgtgtgtgtgtgtgtgtgtgtgtgtgtgtgtgatgtcagctgctcatcaagtcatttgttgccaggtatgtcagcatgggcagcctggccctggggctttctgaggctcccacgccagactcagggtgtgggaattacctgcctcggtttaccgtgtatctcttggtccgtctgctgaggtccgaagcaggcacagccctctcctagaacctctgacctctcttccctcaccaccttcattcctttttcctctgcgtttctggccaaaccattttgtctgcatcctgatctcctttttcttttgagacttaaccaaagtgtagcctgcgtccagctgcacccctcccatgaggcaatgagtactggctaaccatctgctccagtggagtgaattgaaaaggagggaaattctaggaggaaaaaagcattggcctctagctcaaaatattctcccggcacatgtgaattcactgttgcatggaaaattcctccaatgaatcgccctccttccgaggcagcttctctgggttgtcactcccccatctcggcagaaggttttccctgcctagtctccctctgtcatgccattcagttgccagccctggttgtgtatcccctggatgcaggtccctgggcaaagtacggccagtcttgacggttggcataaaagagggtcaaaataagaggtttcccactttggttggttttgttcaaaaaggtgaggctgggcagttcgcagggccgggatggaggacagacttttcctgcccttcaagagctttcagtttctctgttgagctgatgccaggaagctggatgtggtggttcacgcctgtaatcccagtactttgggaggccaaggtgggtggatcgcctgaggtcaggagttcgagaccagcctggtcaacatggtgaaaccctatctctgctaaaaataaaaaaaattagctgggcgcggtggcgggcacctgtaatcccagctactcggccgactgaggcaggagaattgcttgaacctgggaggtggaggttgcagtgaggcgagatcgcaccacagcctgggagacaagagtgaaatgccgtctcaaaaaaaaaagtctagagctgatgccaggagtgccatggagtagtcccgaaaggctgcctggaggaggtggcctctaaagtagctcttagagatgaagcaggatagtaggacccccatgtctgtgctggcttggcatggtgtgtgcatcagtgcagacccattcaatctggaggtgtcagggcaagtcacccgggacaagatgcttcccttctctgggctttagtttccatatcttttgtccagtggacacaataatgtctggttttcctagagctttctagagcatatttgcatactgagtgagacgccaggcatgaagcagagctgctaaggggtgtagagtggtcagagtgttcttttggtgctgttttgggacatctagttcaatctcacaagcacttatcgagggagggcctgtttgtaaatataatatctgcaacctggaagtgcaccagttatagggtagagtgaaaagctgggggcgtgggccagggttgagattgggaccccagtgaggtctctgagtgattatctgggaaggcgatattgggatgatagcttgggacagtgtgtagcactgtgttcggagttttattggttaagattcctttgattacaagaaacaaaaacccagtgtcatctggttacgcaaaagatggaatttatggggaagaaagcagggtgccccagggaactgaaggggaggaagcaaagccagagctcaggagtggttgaaccaggaactggaaacccgttgccatcaaaatcccagctggcttctttgcagacatggataagctgatcctgagattcacatagaagttcaaagataatcttgaaaaaggagaacaaagttggtgcactcattcttcctgatttcaaaacgtatcgcggccaggcgcgatggctcacgcctgtaatcccagcactttcggaggtcgaggcacgtggatcatttgaggtcaggagtttgcgacaagcctgaccaacatggtaaaaccccgtctctactgaaaatacaaaaattagcccagtgtggtggtgtgcgcctgtagccccggctacttgggaggctgaggcaggagagtcgcttgaacccaggaggtggaggttaccatgagctgagatcacaccattacactacagcctgggtgacagagtgagactatgtctcaaaacaaaacaaaaacagaacaaaacaaaacaaaagtattgcaaagctatggttattaagacagtgtggtacggacataaagatggacagacagatggatccagtagaattcagagttcagaaataagcccttgcatttctggtgaattgatgaggcagccaaatgcccactgttggggctcctgagtcaccaagatgcctcctccctctgcctttgctgggtgaggcatctctccttctacagcagctcactgcattccctgccatgtagcggatactcctgggctgcagcccaggctccctggttgccttggctccctccccaaggacctggtgtccttggtgcctccccaggtgtccctgaggcctgcagctctgacgacaggggtctggcctcaccgttatgaagcattcactgtgtgctcaggcttcgttgcactgttttcctgaggctttgcacccacctcatgaagcaggcaccaatcctctctgcattttacagataagaaagtggagactgagagagtttaggaaacccgttcaaggtcttcagggaggaagtcacagagttgggatttgaatctgggtctgtgttttgtgtgtggagctgagtggttctcacacctgcctcccgccctactttcccatattctttccctgatgttctcaggggctgtgtatatagaatccgtggccgcagaatgcacctccgcctccacgacaccgtgggtgagaaggccgcccctggtttgctggggcccatccccttgctggaggcctggattgaatggggtctgtggtgcctggatgagttggacactcagaagcaaggatttacttaactgcagtgcaggggtacaggggctatggagccacgttggaatgctggaggggaggtggcaacggtaccacgcaggagaaggaggcttgtgtgtgggatatagcctcaggctaacacacaggcaaatcgttcacctctctgggtcagtttccccgtctgtaaagggttggattagcgtccagccttctctcttccagccttgacgttctaggagtttgcattcatgccttgaatcctttcgtatttttctcaggaccttggtgatggtaggcgctcgctgttgagtgagtgaatgcatggctgtgtgaatggaagtctctgagagcaggggctctgtgcattacatccctgactccttagggcctacccagtgcctggcacaaaacaggttttcagtctgtatttgctgaatgaatcaacatgtgtcatcatggttggcccatcacatgcaggtggaaggaaggagagaaagaggcaggctcagcgtgtggggatccctcttctccagtccgctctgggggccagctgggcatgaggtccctgtcgggcaggtgcctggggttttcttgtggagctccttgaaggagcagccggaacgggaggatctgagctgggagcctccgagacactcctcttgtcctttatttcttttttgagaccgcgtcttggtctgttgcccaggctgcagtgcagtggtgcaatctcggctcactgcaacctccgtctcctgggttcaagcgattctcccacctcagcttcccaagtagctgggattacaggtgtgcaccaccacgcccagctattattattattattattatttttgtattttagtagagatgggggtttcaccatgttggccaggctgatctcgaactcccgacctcaggtgatccacccacctcagcctcccaaagtgttgggattacaggcgtgagccactgcacctggccaaaacctctgctcctttttgctaccctctgtgctctctccacagagacccctgcatctttgctaaagaaagagatgcgtgtatgtgtgtgtgtgtgtgtctgtctgtctgtctgctgcatgggctccagctacctgaggtgaccgtcatgcacaggggctggctgcggtggcctggagtgagcacgtgaatggttcagggtagcctgtctccactgctggagcacattctcatgcacactcctgaggggtggggaagtctaaaatccattgccttgtaggaaaaaaatccagcttaaatttaagtgggtggctgcagcccttggtccctagaagtggcacctctggagagggatgaagcccatgatgggacctgggtgcagctgtgctctgtgatttcttccctaggagaaggacggggagggcctggaggagctcctgcttggctgggccagcatgtcagttctactgtggtttggccagaagataccacacagccaccgctattctaagtttcagatttaaccagctaagaattgaaaatcctgctagaaatgaaggggccatgaaggacagggctcagtgtgtctccgggcagctttcctaggtccctggggactccagtgtcagctgctggagacattgtccatgagagcaggggcttgccacagccaggaagcttgatttcttctctgctacaacctttttattattattattattattattattattattttgagagggagtctcgctctgtcgcccagtctggagtgcagtggtgaaatttcggctcactgcaacctccacctcctgggttcaagcgattctcctgcctcagcctcccgagtagctgggattacaggtgcggcccaccgtgcccggctactttttgtatttttttttagtagaggcggggtttcgctgtgttggccaggctggtcttgaactcgtgacctcagatgatccacttgtctcggcctcccaaagtgctgggattacaggtgtgagccactgggcctggtctattattattatttttatttattattattatttttgagacagagtctcactctctctcaggctggagtgcagtggcatgatcttggctcactgtgacacctctgcctcctgggttcaagtgatcctcctgcctcaggaccatacccaactattttttttgtatttttagtacagacggggttttgccatgttggccaggctggtctcaaactcctagcctcaagcgatccacctgcctcggcctcccgaagtgctgtgattacaggcatgagccactgtgcctggtctgccacaaccctttaaactcaggcttccctccccatgctgtgagaattatgcacaacatggggcacgtttttgtggctaatttttgtatttttagtagagacggggtttcgccgtgttggccaggctggtctcaaactcccgacctcaggtgatccgcctgcctcggcctctcaaagtgctgggattacaggcttgggccaccgcctccggccgttgattccaatttaatgactcttttcattcaccagttgaaggccacacctaccaattcattcccccacctttggccactgggtctttgtttactgtagattacaagaattcttgaggcaccactacgatgttctagaaccctctggggccaactcatcttagtctgctcttctcctacacacctagggcatctgctgagagtttgctggggttgtcaaggacagggggagcttgaggtttttgggggtagacagctgagtcagttcagcctacatttactgggcacctacactctgcagggagacagttgccatggcacgggacaagggctgcgatgcccacagaaaggatggaggggggcctcctggagacctggtgatgcctgagctgtctccaggggtgcgtaaggtcagcagggaggagagaatgcactccaggtagcccgaccctcacgaaggcagtggggcgtgaagcagcttcagcaggtgggacctgggagcagttactattaccagacagaagcgagggtgggagtgcagggggctgggggaaggcaggccacgtctgggagggtaggtgagctatgctggaagtggggctggatcaaagggcttaggactaggggaatgctatggtgagctcgagtctgagagcccctctggctgactggaggggttagagaggaggcagggcggccaggaggggatattgagacagccacgtaaagaggtccccggagaccctccgctggcctgcgccctggggtgaggcctcgggaagttcgcactgtttccagcggggaggatcctggccattcctgtttggaggtggtaacctggggatccaacctgtgagatggaggcctgttaacaggaacctctcttgctttgctgagcttttttcctttcgcccagtaaatcccgttgttctcacccttctgtcgtgtccaagagcctaatctttcttggtggtgtgacaaggaccccgttttgagctgagctcaggagaaagtcccataatagcatggggctggagggagtggccttccctgcctggagctggtttggaaggtgtgggtgaaggtgagaagaagggtcagctgaggactctcagaaggcttcctgtgagcgctgggtggatgctggtcccattcatggagacggagaactagcgagtttgggcagtttgggcggggaaggagggagtaagactctgaatgtaaaatcttccctccactttccactctcctgtttggtctgtctgagacccaccatatacctcctgccctgtggaagggggcagaggagagagcagcatcctgagggccgtgggggctggtctgcggcctgggaagcagctgcacggcgtcccctcgctggcccggctcggctcctgggtgcctttggcaggtgagttccaggtgagcactggccggtgtggccgcccttgtgactgacagctggccacaccacagaacccactgttagataccctccaggtgggtcgaggagaatgtgcccatttctgtcttgagtggcagactctggttcgttgatttcttcaggatgggccctgtgcctgaggacagtgttggcatgtgtgggggcatgtgggtgtgtgcagatacgtgtaggcgtgtgtgcacgctcgcccatgcaggtggacgtgagcgctgagggcccatgtgggtgcctatgtggtgccttttttggctttagcgagttcctatggtaaccatgaacatgcctgttttgggatctggagtctcggggcgtgcgtggctgcagggagaagcagggaaggcgagcgcttagccggtggttggcttgatttcattaccaggcaccggggctgctcctggaggtaccatttgccaggcggcaaggtctgcagactccaagacccatgtgctcctggccctcctcctggccagtccctgccatgcccaggaagccctggtgagtccctgttctggtttctcattggacaaacagctccccggacttggccaggtcttgtgggtatctgctgatgggcaggcagggagccggctggcagccctggccagtaggtaccaggaattggggctcttctgagatgagtgtgggacagtgggcaggaggggctttgcctattcacggagcccgtgagggtgttttccatgtggctggtggagtggcatggtccttgtgggtcccatggacagggctaaccgtgtgagtgtgagggtatgggcaaggacgccggagaggaaaatgtggaccgggtggcctgtggcccgccagccgagacccaaccatccccggaggcccccctcacccctctcagctccccgggtcctcatgaacccccaggcctctggccatgcacttgggcttcctcgctggtctccccaggcccagaggcctgctggcctggcctggatgggaagactcacggtcctgtggaagaggccagagggctctgcccggctcgctgggagctggatttggccaaggccggggaagaattgctcccacttggctctggagaaagactcgtgcctccccagattgtgcaccccctggtgcttcttgtctacacactgcagacccatgggtgtgtcaggacacccctctccagccaccgcgggagaggctcttgatggacaggggcccaagcagccctcaggggccgtacagagacgacgctggtgtctgggagcggggtggcaccttctatccccttcctcccgctggctcctctggggcagctagcagggagttggggatgtgagtgtcaataggggctgtcagtggcccctctggcttgtgctgggaccctcccctccccccgccccaccccaggagttccttcctctgcctctgagaaggctctgggtgaggctatgctgggaccgggggctgtgtgtggagcaggagttgctagggctggacagagggctgaggccctggtgaagggcgaggggagcaaatgtggaccttgcgagctttgtctggaccaccccggccttccctccctgggaggcagagtccagaacctaatccccgatggccttccctgggggcgctgggagagggagaggggaaccttcaggagagacccccagatctctagagtctttgaatcttagggcttgagatttaaaaagtcaaattagtcgttttttttttttaattatactttaagttctagggtacatgtgcacaacatgcaggtttgttacatatgtatacatgtgccatgttggtgtgctgcacccattaactcgtcatttaacattaggtatgtcttttaatgctatccctcccctgtccccccacccttttttttttttttttttttttttttgagacggagtctcgctctgtcacccaggctagagtgcaatggtacgatcttggctcactgcaacctctgcctcccaggttcaagtgattctcctgccttaggctcctgagtagctgggattacaggcatgcgccaccacacccggctaatttttgtatttttagtagagatggggtttcaccacgttggtcaggctggtcgcaaactcctgacctcgtgatccgcccgcctcagcctcccaaagtgctgggattacaggcgtgagccaccgcgcctggccaacaaaagtcaaattagtctttatgcaaatctcctgtgcccctaaaactagtcacccaggctgagcttggttacctgtggggacagtgagctcattaccttgtatggatgcctattttattgtagtacaactttgctcgaagctgaccgctgttttcatctggaatctctgtaactgcattgctcggtccagtcttgacccttggcccgcacgtccccacttacccccattcaacaaggttcacccctctttccactaagagccctgcagacactggaaggctgctttttcaccctgagtcttcccttccctccccttggctggtcaccccggcctctgcagctatatttgggattcctcacctgcctgggctgatctttgtcggaagggttcaggttttgcaggcaccctgcaggagccccatggacacgaggatggacagctagaggcgatgggcctcaccctccttatttacagatcagtaagctgagaccctgagcaggggtgctgctaacttgcgataggacaacacagaggtggtcagggcagggtcgggacgtgaggggctgctcttgtcgtctgtgacgtgctggcccctggttcttttcctgcttctccatcagctccatccttgctgctttctgacttggaccctcagctcttgggcactgcaagaatgctggcctgtcttagcggatcttccattttataacagcagctggaaatccgtttctttgtgtgtgtatttttttgtttttttgttttttgagacggagtctcgctctgtcacccaggctggagtgcaatggcacgatcttggtgcattgcaacctctgcctcccgggttcaagtgattctcctgcctcagtctcccgagtagctgggattacaggcatgcgccaccatttctggctaattttttgtatttttagtagagacagggtttcaccacgttgagcaggctggtcccgaactcctgacctcaggtgatccgcccacctctgcttcctaaagtgctgggattacaggcgtgagccactgcgcctggcctgatttttgtatttttactagaggcgaggtttcaccatgttggccaggctggtctcgaactcccaacctcaggtgatccccccagctcggcctcccaaagtgctgggattacaggcatgagtcactgcgcctggccggaaatctggagttttagacaaaatcttgacaactaactgcagactttaaagaacagagctggccgcagcctaccctgcagaccagagtcagccggaccctctgctctgctcacctccttaggcctcagctcttgtttctttgtggctgactcccaagtccctctccccaggtcatccccaagaacagtgctcttgccccgacctcagtggctggctggtcatttcggctctgttcccagactgaactgactctcaattaaccttttctctctttcagatccagttcttttctgtcactgggttgagaagcctctgagtcatgggggggtggttcctcctgtctcccggttcaggcccattatctcctgcccagtgacacaggctttctaattaacctcctcctccggtctctgccagctgtgactaactcttcatccctcaagctggctccagctctgccttccctattactagacgctggcccgaaggcagaccttgatagtgctgactctgatgggcttctcatgccaggatgctggtgtagggacccccagcccccatctggtggggggctgtctttgggtcacagcaaatagtttgtttgttccttccttccctcccccaggacggtggttctcaaacttttctacaatttggtttcacctggaggtgcttttaaaaattctgatgccggctgggcgcagtggctcacacctgtaatcccagcattttgggaggccgaggtgggtggatcacctgaggtcagaagttcgagaccagcctgaccaatataatgaaaccctgtctctactaaaaatacaaaaactagccaggcgtggtggtggttccctgtaatcctagctactcaggaggctgaggcaggagaatcgcttgaacccgggagatggaagttgcagtgagccgagatcgcaccattgcactctagcctgggtaacaagagtgaaactccgtctcaaaaaaaaaaaaaaattctgatgcccaggttgtacccagttccaattaaatctgaatgtcggagggtagaacccagcatcagtacttttttttttttttgagatggagtctcgccctgtcgcccaggctggagtgcagtggtgcaatcttggctcactgcaacctccgcctcccaggttcaagcgatttctcctgcctccgtctcctgagtagctgggattacaggtgcatgccaccatgcccagataatgttttgtatctttagtagagatggggtttagtagccatgttggccaggctgacctcgaactcctgacctcgtgatctgcctgcttcagcctcccaaagtgctgggaatacaggcgtgagctgcggtgcccaactatacttttaaaagatcccccgttcattccaataggcagccaaacctgggaagcacttccccaagggatacacaagtgtggtgaccgtcagtggttgggcaatgactcaggtcaggctggatgttaaaatgggctcctggtgggcgtgagccctctgggccagggcttctggtaacatttgaggctggctgactctttgttttacggtgccatcctgtgcgttgtagggtgttgcgcagcctctctagcctgtatccacaagatgcccacaacccacccctcactgtgataatgaaaatgtctccaggccaggcatggtggctcacaaatcccagcactttgggaggcccaggcaggtggatcacctgaggtcaggagttcgtcgagaccagccgggccaacatggtgaaaccctgtctctactaaaaaagtacaaaaaattagccgggcatggtggcacgtgcctgtaatcgtagctactcgggaggctgaggcaggagaatcacttaaacccgggaggcggaggttgcagtgagccgagatcgcaccattgcactctagcctgggcaacagagtgagactccatctcaaaaaaaagaaaaaagaaaagaaaaaaagaaaatgtctccagacgttgctctatttctggggcagtggtataaaatctccccgactccgttgaaaactactgttctaggcctagtaggttcaccttgacagcattctcaaatattcacagaagaaaaggggcaaaggacaccaagtggggaccccagcttactgattgatttgtgggcttggcagtcaggcagcctctgtttaaatcctgactctaccagctgggtgaccttggacaagttacttaacctctctgtgcctctgtcagttctggttttgttttctcacaatcgtgcctcctcttgatcttcagctgcagcccgagggtggaacttgctgtgtgtggctgggcactttcgcctgtggctgtgctgctctgcccacagggaacatgcctttgctgccccttccctgtcagcatcagggtcacaacctgcccgtccttccagggccagcttccatgcagcttcctccacgcacagccccttccccatcggcatggaaggctctcttccttgtgcccctggggcagccggaacctcaggtcacatgcagctcctcccgcgccgtggggatctggtggtttctgtctgagttcctccccacttggggtctgagaccgtgggagcctctagcgtgcccagctcgggctgtctcactgtttgttacccaggtgaggtggctgtcccctccctaccttgggttgagctgtgaaccagtaggttaccgcagtgtggtaccaccccccccaaccccaacacccagctcattctgagagggtggagtgggcggaaatccgtgcctggcagaccacaaagccacataactgacttttgtagccctgccctggggtgttgggggggagggttgacggcagccattgcccctttcttcggtgctttgccaccagcagacgccccgtggaattgaggagctttgttctacgagctcgggaacgggacttgggagggacagcccctgtcccaccctgccatgccctgttcaaccctgtcaggcagctgaacgtaggctggacccatggctgcccaccctggctgcagtacagaatcacctaggggacctcgttaaaatgcagcttccggaccccaccctggggcttggggattctgcctcatcagcctgggtggggcccaggaaacctgtgtgttaccagcgctgaggtgctgctgatgaggcagctggcttcacagctgcacgggaaccagtgccgtttaaagcactttcccccacagtgcggctccagcagtcaggttcacgtactctgggtgacctggggcaggctgcgcaacctctctgtgccccagtttctttgtctgaggataataacagtacctgcacgtgggtgcgcttgttgtgaggcttaaatgagattatccaggtgaaatgggaacagagtgcctggtacctagtgctcaacacatgtaacctgccttaacatctctgatattattattattattattattattattattattattattattgagacagagtctcgctttgtcacccaggctggattgcagtggcataatctcagctcactgcaacctccacctccccggttcaagcgattctcctgtctcagcctcttgagtagctgggattacaggcgcgcaccaccacgcccagctaatttttgtatttttagtagagatggggtttcaccacgttgaccaggctggtcttgaactcctgacctcaggtgatccgcccaccttggcctcccaaagtgctgggattacaggcgcgagccaccgcacccggccccatttccgatattaacaacagtcctgggctgtgcggtcacacacgtgtaactgtgcgatgtgccctcgtgcctgcaggcgtacctacgcaggcacactgagcattgtgtaccgggacccaggcctccctgctgaggacagagcatccctgtggtacatgcgtggacgcagtcactggctggacgtggtcagaagggcagacgtgtgtgtacacaaggcccagacaagcgggtttttatttgattcacactctgaccttattccttgagttagcagcacctgggctgagctctgggagcccaaggtgccccttgtttccatagcaaccataatctggtaaaaataggcgggggagggaagagctggaagaggcccgagccggctccgggggcatcctgcctgctaaggtccttttttccacattgctgaccatacagaggtgctgttttgttttgttttttttttttcttaggataatgacatgcaaacctctgagtactcatgactcagaattgacacttgttaacattttttctcattttcatcaaaccctcttatttatttatttatttttgagacggagtctcactctgtcgcccaggctgaagtgcagtggcgcgatcttggctcactgcaacctccgcctttcgggttcaagcgattctcctgcctcagcctcctgagtagctgggatcacaggcgcccgacaccacacctggctaatttttatattttttagtagagatggggtttcaccatgttggccaggctggtctcgaactcctgacctcaggtgatccacccacctcggcctcccaaagtgctgggattacatcaaagtctttttaaaaaactgtgttaaaatatacatattataaaacttaccatttaaagcatttttaagtgcaccattctgtgacattaagtacatttacaatgctgtgcaaggatcaccattatttctagaagtttttcatcatcccaaactgaaacttcgtatacattaaataataactccctattccctcatctccacagcaccctgcagccaccattctgctttctgtttctatgaatttgactgctcggtgaactgtgtataggtgaaatcacacagtacttgtccttctgtgtctggcttatttcacttcccataatgtcttcaaggttcatccatgttgtagcgtgtgtcagaatttcctttttttttttttttttttttttgagatggggtcttgctctgttgcccaggctggattgccgtggtatgatcttggctcactgcagcctccacttcccaggctcaagcgtttctcgtgcctcagcctcctatgtagctgggattacaggtgtgcaccaccacacaaggctaatttctgtatttttagtagagatagagatagggtttcgccatgatggccaggctggtcttgaactcctgacctcaggtgatccgcctgcctcggcctcctaaggtgctgggattacaggggtgagccaccatgcctggcctagaatttcctttccttttaagactgaataatatcccattgttgcatgtatcacattttgtttatccatgtgttcactgatggacatctgagttgcttccaatttttttttgctgttgcgaataatgccacagtgaacgtaggtgtataaatatctgggtctctgttttcagttcttttgggtatctatttaggagcagaattgctgatcgtatggcaattctatgtatagttttttttttttttgaggcagggttttactgtgttgcccaggctggagtgaagtggcatgatctcggctcactgcaacctccgcctccctggttcaagtgattctcctgcctcagcctcccaagtagctgggatcacaggcgcctgccaccacacacggctaaattttgtatttttagtagagacggggtttcaccatgttggctaggctggtcttgaactcctgacctcaggcaatccaactgcctcaacctcccaaagtgttaggattacaggcatgagccactgcgtctggcctctatgtttaattgtttttgttttgttttgtttttgagatggagtctggctttgttgcccaggctggaatgtagggcacaatctcagctcactgcaacctctgcttcccaggttcatgccattctcctgcctcagcctcccgagtagctgggactacaggtgcccacgaccacgcctggctaattttttgtatttttaacagagacggggtttcactgtgttagccaggatggtctcaatctcctgacctcgtgatctgccctcctcggcctcctaaagtgctgggattacaggcgtgagccactgcgcccggcctctatgtttaatttttttagctttttttaaaattaaagaaataaaacacacacataaagttaagttccggtcatcatttctgcttgcctccgttcctctatttcttccatccataggggctaccattagcaggaattttgtgttttctctcagcccactttatttatttatttatttatttatttatttatttatttatttatttatttttgagacggagtctctgttgcccaggctggagtgcagtggtgcgatcttggctcactgcaacctccgcctcccggttcaagtaattctcctgcctcagcctcccaagtagctgggattacaagtgcgtgccaccacgcccggctaatttttgtatttttttttagtagagatggggtttcaccatgttggccaggctggtcttgaactcctgacctcaagtgatccacctgccttggcctcccaaagttttgggattgcaggtgtgagccaccgtgcccggcctcagcccacatttttaatgctttcacattcatacacaggtatctagaaacatttatagtttttgtgtgcattaaaaagggacatacctgacatccttttgaatttgtgtgaggtggcgttctggcgctagattgcctgggttcagatcttggctctgacacgcagcagctgtgagacctcaggcaggttccttcatctctccatgcctcccttttctaatctttgaaactggactaatagcaaagcctgaaacctactgcaagggttgttttggagactgagtaagtttatacatgtctagtgcttagaacagagaggggatgtagcagacacaggatggatatattaccattatcgttctgcatgtgtgtctgtccacatggttgtaaagtctattttttttttttttgagacagagtctcactctgtcgcccaggctggaatgcagtggcgcgatcttggctcactgcaagctccgcctcccaggttcacgccattctcctgcctcagcctcccaagtacctgggactacaggcgcccgctaccacacccggctaattttttttgtatttttagtagagacggggtttcaccgtgttagccaggatggtctcgatctcctgacctcatcatctgcctgccttggcctcccaaagtgctgagattacagatgtgagccaccatgccttgctttttttttttttttctttttttggagactgagtcttgctctgctggagtgcagtggcaggatcttggctgactgcaacctctgcctcctgggtacaagtgattctcttgcatcagccttccaagcagctgggatcacaggagcatgccaccacacacttttttttttcttttttgacggagtcttgctctgtcacccaggctggagtgcagtggtgcaatctcggctcattgcagcctctgcctcccgggttccagcgactctcctgcctcagcctcctgggtagctgggattacaggtgcatgccaccatgcccagctaatttttgtgtttttggtagagacggggttttttggccaggctggtcttgaactcctgacctcagatgatccacctgcctcggcctcccaaagtgctgggattacaggcatgagcctcagcgcctggtgatagatctagtttcttctctctttctccttttttttttttttttgagacaggatctcactctgttgctcaaggtggtgtgatcctggctcactgtagcctcaatacccccagggctcaagtgattctccaacctcagcctcccacgtggttgggactacagcatgcaccaccatgcttggttaagtttttaagaaatttttgtagagatgaggtttcaccatcttgctgtctcaaacttctgggctcaaatgattctccaaccttggcctcccaaagtgttgggattacaggcgggagccaccacttctggcctagttttttctttttggtgccatgcatattaatttgtacaaatagatcacattttttttgtatcccccattgatcccctcttgctggacacctaggtcgtttccattttctgatattgcaagcaatgctgcaggcagtggctttccccttgcctggccctctgtgcgtttgtgtgaggtcatgaggggtacctagaggtggggctgttgggtcgcagctctactggatgctgccagattgccctcaagagaggacttaggctgggcgcggtggctcacgcctgtaatcacagcactttggcaggccaaggtgggcggatcacttgaggtcaggagctcgagaccagcctggccaacatggcaaaaccccgtctctactaaaaacacaaaaattagccaggtgtggtggcgggtgcctgtaatccagctactagggtggctgaggcaggagaatcacttgaagacgggaggcagaggctgcagtgagctgagatctcatcactgcactccagcctgggcagcaatgagagacaccgtctcaaaaaaaaaaaaaaaaagaggacttagtattttcactgctcccaattctatgattcccattccccacgtcctcactgatgtttgattttcatgttgatttgagtgacagaagcatattttattttattttattttgagacggagtctcactctgtatagtggcatgatctcggctcactaaaatctccgcctcccgggttcaagcaattctcctgcctcagcctcccaagtagctgggactacaggtgcccgccaccacggcccggataatggtttttttttttttttttgtatttttagtagagataggtttcattatgttggccaggctgctctcgaactgctgacctgttgatctgcctgcctcggcctcccaaagtgctgggattacaggcatgagccaccgcgtcctgcctattattttattctttattatacaaacatgaacagatctctgaataagcgcttggaaaccctcatggctccactgtcagatcgctgtgtctgagcctccctcgagtccctctccacaggcccagggatgcgcttctcttcaccctttttctgtgtcacaagcatttccatatattgctacattcttttttcccctctttaaaaatagcacttttcctgattataaaaatagtacatgctcactgtagaacatttagagaatatgtacaaatagagattaaaaaataaaaatatgacccatcacccaaaatgttatcattctgatgtatttctttacaccttttttttttttttttttttgagacggagtctcgctctgtcgcccaggctggagtgcagtggcacgcttacagttcactgcaacctccacctcctaggctcaagcgatcctcccaccttagcctccggagtagctgggaccacagcatctgccaccatgcctggctaatttttttttttttgtagagatgaagttttgccatgttgcccaggctggttttgaactcctggtctcaagcaatccatccgccttggcctcccaaagtgctgggattacaggtgtgagccaccttgccccgccaagtgtggtgttttaaatttaagtgaattaagtacaattaaaaatgcagctcctcggttgcactagccacatctcaagggctcagtagccacatgtggctggtggctaccatagggaacaacgcaggtacagaacattacagaacattttcatcatcccagaaagttctactgtacagcgctggttgagaatgaggtccagactcccctggaggacttccaagggctggacaagcccagagagtctatgctgtctatgatggattacgcactgcagaaacgtccctggacccccaggccagaaggcatctgaaccgcataaagccagtgccaccgggtggtgctgaggaggaggaggcggcaagctggtgtctggggcagtgaggatttcagatgcagctcctgcctccttgggcagacagaactgtcacctccagggttgcccaatcccatggtcagcacccagttcaagcataatatgtcgtgggtcctggtgtctcttgcattcacgcacacacacacacaggtatgtaccattgagacatgaccacgcagggtcacccaggttcacacatacagcctcattcatgctcagaaacagttccccaaaaggcacaaacacggtctttgccgattgccattataacagcaacaaaaatagctgttaggctgggcgccgtggttcacgcctgtaatcatagcactttgggaggctgaggccagaggatcacttgagcccaggagtttaacactagcctgggcaacatggtgaaacctcgttgccaaagaaaattaaaaaacaattagccaggtgttgtgtggtatgtgcctgtagtctcagctacttgggagtcaggtgggaggattgcttgagcccaggagtgggaagctgcagtgagctatgatcacaccaccgtactccgcctggaggacaataaaaccctgtttttttttgtttttttttttttttttttttttaagaaaaggtggctcacgcctataatcccagcactttttttttttcctttggggaaattttttttttaattatactttaagttttagcgtacatgtgcacaacgtgcaggtttgttacatatgtatacatgtgccatgttggtgtgctgcacccattaactcttcatttaacattaggtatatctcctaatgctatccctccccactccccccagtcccagcactttgagcggctgaggcagctgtgaggtcaggagttctagaccagcctgaccaacatggtgaaaccctgtctctactaaaaatacaaaaagtagccgggtgtggtggtgcgcatctgtaatttcagttactcagggagtgctgcttccttggggtgaggcacagccctgtggcgagtctcttggtaaagtgaaaaatgctgtaaatgggtggctgagatgggtgcagaggattggggtgtcatggggatggcgggtggcatggggctggcttccggatacctcatccctgacattttctctgttgacattggaacccaggatgtccagatgctgtttttgaagccctatcggccagggagtcaatgggcccccactttgcctgggagggctgtgtcctggtgtcctgtggggttttggtctcccaccccggggcctaagggcctcagaatgaactggaacccaacctttgtcaggggagccccagcaatgtctgcacgacatacgcccccaaacagcgtgggttcaggaatttgtaagtgtttgagaaagaaaaactgttaggattctagtttcgttgaaaagccattttgcctttgtcttcctctgggcacctgaccatccattcttagcccacctgagtattgagcatacactatcgtctctgcagtggaggtggtcctggacgcatggcgtaacgtgggctctctgggccctccagaaaagtgtgccactcgctcctctccggctgggccgtcagaacccacagctcacacacacatccagtcaaggtcagaagaggtggctgcattcctgactcaaggtcaaaagaggcaactacataatcagtgagtggccctgaggggccagtaagcaataaggcagcgggaaagggtgcagagcaattgtggagcaattactaagcaagcagaatgggaagcaacacgactgaacaagaaacagcacatggggccgggcacggcggctcacacctgtcatcccagcactttgggaggccgaggcgggcggatcacgaggtcaggagatcgagaccatcctggccaacatggtgaaaccccatctctactaaaaatataaaaaattagctgggcgtggtggcgggcgcctgtagtcccagctactcgggaggctgaggcaggagaatggcgtgaacccgggaggcagagcttgcagtgagctgagattgtgccactgcactccagcctgggtgacagagcaagactgtctcaaaaaaaaaaaaaaaagaaagaaagaaaaaaagaaacagcacatgggccaggtgtggtggctcacacctgtcatcccagcagtttgggaggccgaggcagatggatcacttgagattaggagttcgagaccagcctggccaacatggtgaaaccctgtctctactaaagtacaaaaattagctgggcatggtggcacacgcctgtaatctcagctacttgggaggttgaggcaggagaatcacttgaacccgggaggcggaggtttcagtgaaccgagattgtgccactgtactccagcctgggtgacagagctagactccatctcaaaaaaaaaaaaaagtccgggcatggtggctcacgcctgtaatcccagcattttgggaggccgaggcgggcagatcacctgaggtcaggagttcgagaccagcctcaacgtggagaaaccctgtctctactaaaaatacaaaaattagccgggcatggtggtgcatgcctgtaatcctagctactcgggaggctgaggcaggagaattgcttgaacctgggaggcggaggttgcagtgagccgagattgcgccattgcactccagcctgggtgacaaaagcgaaactctgtctcaaaaaaaaaaaaaaaaaaaaaaagaaatagcatatgggtcacaaattctgttgactaagtagaagcagaggcttggccagagaggaggaggaggcggcggctggagatgcctgtggtggttcgaaaggaagcacctggactgtttgagggaagcctctgtacaatgtccaattttaccccaaaacgtatcatgctgcctccctgcaccacttcctcttttaggagacaaggtgttgctctgtcccccaggctggagtgcagtggcataattgtggctcactgcagccttgaactcatggcacaagcaatcttcctgcgtagctgggatgacaggcatgtgccaccacacctggctaatttttaaaatgtttcttatagagatggggtcttgctatgctgtccaggctggtcttgaactcctggcctcaagtgatcctcccaccttggcctcctaaattgctggtattatgggtgtgagccaccacacctagtcccatcttccctttcaaacacaggcctagcagcagcatctctccagcctgtctccgcagggttgtttttggctcatgatttgggcaagaggagggagaagggaagagaagaaactttgctgttggaactgggtcagaattggaatacaggaagcaagaacatgagtgttcacgctttgactgagctgttgacagcaccgaggccagaggcaggagaaatgaagctgtttgtttatctgatgaatattcatcgagctcctatttgtagccagccgcctctgttttaggagccggggatccctttgttgaatcctggctctgccactcactgctggggttaccttgggcaaccgtctgaacctctctgagcttgttttcccatccggaaagtgaagataaggagcgtccctgtctcacagggatgtttgaggatgaaatgagctaacataggaaaagcacttagcatggtgcttggcgcagagttagtgctcgtgactgcagctgttactgaagacagagcgtttaggtgtgaagagggtctggtgcccgcatccaaggaactcacagtctctggaggaaacagacatttaacagtcatctgcaaagcatgaggcagtgccaatagagatattcttcctggtggaatgagggaaggcttcttgaaggaggcggcgctggaaggttgaaaaggaatccctaggaagagaaggttgcagggggcattttttttcttttttctttctttctttctgtttttttttttttttgagacggagtcttgctctgtcgccccggctggagtgcagtggtgccatctcggctcactgcaacttcctcctcccaggttcaagcgattctgctgcctcagcttcccgagtagctgggattacaggcacccaccaccacgcccagcaaatttttttttttttttttttttgtatttttagtagacacagggtttcaccgtgttagccaggatggtctcaatctcctaacctcgtgatctccccgcctcggcctccccaagtgctgggattacaggcgtgagccaccatgcctggcctgcagggggcatttcacactgaggaaacagtaagggcaaaggctgcgggtgggtggggaagtgtgtagagctgtttgagaagcggtgagccaggctctcgaaatggatggagggacatggcaggaaacagccagaggcgagggtggggatccgctcggggaggctctgagtgtgttgccggcgagatgacgggtgccctggaagagcgggatgggggaaccgcctgtctccttggtgacttgggaaggcggccttgggagctttggggatggattgcggaagggaggagatgcttgctgtgctcctgaggaggggtggggcctgaatgtcctcttggctggggttggaggggagggccaggctagggtcctaagaaggtgaatcctgagcccaggcatctagcccacgtgcagcatgaaaggaggatttccggccgggcgcggtggctcacgcctgtaatcccaacactttgggaggctgaggcgggcggatcacgaggtcaagagatcgagaccatcctggccaacatggcgaaaccccgtctctactaaaaatataaaaattagctgggcgtggtggcgtacgcctgtagtcccagctacttgggaggctgagacaagagaatcgcttgaacctgggaatgggaggttgcagtgagccgagatgacaccactgcacttcagcctggtgtcacagcgagactccgtttcgagagagagagaggagagaaagaaagaaagagagagagaaagaaagaaagagaaagtcccatggaaatgggggtttcacatttgggggatttgcaaagtagtcacgtgggtgaggcaggagggaagcctagtagcagagaagatgatgccttcggccttgagtgtggtgcgtttgaggagcttgtggatcgtcccaggggtgtgtgtggttgggctctttagctcaggagagctcagctgagtggatacccactcgcacatccaacagctctcattcccaaagcgtgttctgagtgtgagtcctacaaaagtggacaattcagaccctgttgggttttgtggcactttctagtcagggaggcagatgagaacagaatgaagaacgcagatggtttcagacagtgcccagtcctgcgaaggaaatagaacagtgaggcgatgagggtggggctcggggctgggggaaggggctaccctgggtgggtggtcaggaagagcctctccatagaagggacatttgaggcctggcgcggtggctcatgcctgtaatcccagcactttgggaggccaaggcgggtggatcacctgaggtcaggggttcaagaccagcctggataacatggtgaaaccccctctctactaaaaatacaaaaattagccgggcgtggtggtacctgcctgtaatccccaagctcttctcccagcccacccggcaccagccagtttgagctctgactgggaactgggatctcattcatcccatctggtcagcatctctttggttgctttttatcagcttcctattagaaaaaaaaaaaatccccttgaaaaacaagggggagggttcatacacgatcggttgcagcaggcacgccagtgacggtgggggcccagggggagcgtggcagaggctctcaggctggaggccagctactgctccggccagcccttccctgtgggggagccacaagaggccgtccctgggcctgcaagcatgagatgagccgagcacttgaccaaaactagtttgggtcttagaatttaacttatcctgggccgggtgcggtggctcacgcctgtcatcccaacactttgggaggccaaggctggcggatcacttgaggtcaggagttcgagaccagcctggctaacatggggaaaccctatctctactaaaaatacaaaaattagcagggtgtggtggtgcacgcctgtaatcccagctactcgggaggctgagtcaggagaatcgcttgaacctgggaggcggaggttgcagtgagccgagatcgcgccattgcactccaacctgggcgacagtgagactccatctcaaaaacaacaacaaacaaacaaaaataatactgcgatttcctagcaatgcccagtgacttaccctaaattcagtgaaagttgaaaaaaaaaaagaagtggcatttgaaggagacccgaaggaagaaaaggagccagtgtgaagctgtctggggaagagcattccaggtggtgggaacaggcttggcaggtgtgaagatgaggaaggaggcccctgaagagccggcgggaagagcgggtggatgggaacacagtttccccgtccgccagcaggtggcactgttggcccaggactgcccgggcatggctgggagagcaggtggggccgcgggttctttgacctcaggtttgtgattctggctgtgggctcatcacaggctctacctccaccctctggggagataagccctggccgggggcagaagagcagttgtaatggtttcctggctgttctccttccccaacgggtcttgctttcagtgtttctttgcttgctccctctccagaggtgacttccctcccggtttctgggtatctgtgtctttgctctctccttttgcttttctttttgctcccttggtctcttctcctccctctctcattgctccctgggggggcaggttcctgtctcaaagattaattacttgctttttttttttttttttttgggaaacctcgctctgtcgcccaggctggagtgcagtggcacgatctgggctcactgcaacctctgcctcccaggttcaagcgattctcctgcctcagccttctgagtagctgggattacaggcacccgccaccacgcccggctaattttttgtatttttagtagagacggggtttcgccatgttggccaggctagtctcaaactcctgacctcaggtgatccacccgcctcagccttaaaaagtactgggattacaggcctgagctaccatgcccggccaattacttgctttcctgatgtagctcagatggagcgggtggtgacttaggatcaggaaggtgctgtttctcatcccattgcctacccttccttcccgtggcttcagatctccataaagggctggggctggggtcgtgaccccgtcggtagaaaatggtcccagcgacccttctctcctggagcccatggacccacctcccagtgccatgccctgctcacctccagcccctctagcaggcagccctgtcttcatgtgagaagggagaactggatggcaaagcagatggcacagaacagctgcacaagagctcaccgaagggcttgttatgaaagagtcatttttgtcaacagaagtacgcttctgccctatactccgtgctctgtgaattatttctcaggggagactaagctggccagagcctggtggtggcctcctggctgtcggatgtcagagttagggctgcaggttgaggggtccttggctttggtctgtgagtaccatggtggttaagagcctggtctctctctcttaaattttttttttttttttttgagatgagattttgctatgttgcccaggctagtcttgaattcctggcttcaagagatccttctgcctcagtctctcgagaggctgggattacagttgtgagccaccgtacctggcagtctctttattttactttactttttcctctaaagttaaagtttacagtattttattttgttgtggtgagaacacataacatgaactctaccctcttaacagacttttaagtgtacaatacattattgttgaatgtaagtaagagtttactctcttaaagcctcccactgggtgggaagtctagcaccttacaacaggaccctgtaatcccagcactttgggaggccgaggtgggcggatcacttgaggtcaggagttcaagaccagcctggccaacatggtgaaaccctgtctgtactaaaaacacaaaaaaattagctgggtgtggtggtgcatgcctgtaattcgagctactcgggaggctgagggaggagaatagcttgaacccatgaggcggaggttgcagtgagccgaggagatcgtgccattgcactccagtctgggcgacagaggaaaactccgtctcaaaaaattaaaaaagatggccgggtgtggtggctcacgcctgtaatcccagcactttgggaggccgaggcgggcagatcacgatgtcaagagatcgagaccatcctggctaacatggtgaaaccccgtctctactaaaaatacaaaaattagctgggcgtggtggcgggcgcctgtagtcccagctactcaggaagctgaggcaggagaatcgcttgaacctgggaggcggaagttgcagtgagccgagatcacaccactgcactccagcctgggcgacagaatgagactctgtctcaaaacaaaacaaaacaaaacaaaaactaaaaaaaagattttgaacagtaaatgtatttacatggttggttctaaaaccaaaatgatataaaaatatatgtggtagaaagatttgcttgtactccaatccgccctgtccctacattctaaaattcactttgaggttctttccagtgcttctttattcacatgtaagatgagcatatccttttcttacctccactccccttccctcccttcccctcccctccccttccctcccttcccctacccttccctccacttccctcccctcccctcctctcccctccctttccttcccctccctcccctgcccttccttcctctccccttccctctttctttttctttctttctttttttgagatggagtcttgctctgttgccaggctggagtgcagtggtgtgatctcggctcactgcaacctctgcctcccgggttcaaggattctcctgccttagcctcccgagtagttgggactacaggcacctgccaccacgcccagctactttttgtatttttagtagagatgggatttcactacattggccaggctggtcttgaactcctgacctcaggtgatctgcctgctccagcctcccaaaatgctgggattacaggtgtgagccaccatgcccagcctcctatttctttttcttaaataaaaggtaatatcctacaaaacactgttttacatcttgcctttttctctggagaattcctgtctgaccactgagagctgctgctgcctctgccccattccttttaaaaataactgtgtagtatttaacggtgtggatttaattttagagactgatgattcctttcagaaatttaattttgtataacgtaagtaatataagaatacatttttggctgtgcatggtggctcatgcctgtaatcccaggaccgtaggaggccaacgtgtgtggattgcttgagcccaggagtttgagaccagcctggtgggggggcagcatgacaaaacctcatctctactaaaaataaaaaaaattagatgtggtggtgcacacctgtaatcccaggtactggggaggctgaggttggaggatcccttgagcccaggagtttgaggctgccatgagctgtgatcatgccattgcaatccaggctgggtgacagagtgagaccctgtctcaaaaaacaacaacaacaacacaaaaaacaggctgggcgtggtggctcacgcttttaatcccagcactttgggaggctgaggcgggcggatcacgaggttaggagttcgagaccagcctgcccaatatggcgaaaccctgtctctactaaaaatacaaaaattagatgggcttggtggtgggtgcctgtaatcccagctactcgggaggctgaggcaggagaatcacttgaacctgggaggtggagtttgcaatgagctgagatcacgccattgcattccagtctgggtgacagagtgagactctgtctccaaaaaaaaaaagaaaacaaaaaaacccaaatcattttccttaaaacaatcagaacattaaagataaagtctcggccgggcgcggtggctcatgcctgtaatcccagcactttgggaggccaaggtgggtggatcacgaggtcaggagatcgagatcatcctggctaaaacggtgaaaccccatctctactaaaaatacaaaaaattacccaggtgttgtggcgggcacctgtagtcccagctactcgggaggctgaggcaggagaatggcgtgaacccaggaggtggaggttgcagtgagccgagatcgcgccactgcactccagcctgggcgacagagcgagactccatctcaaaaaaaaaaaaaaaaaaaagataaagtctcctatggccagcagtgacattccctttctctcctccccagagtagccactgttcagagtttggtacatacttttctagatatttaaacagggctgggtgcagtggctggccaggtgcattgactcactcctgtaatcccagcactttgggaggccgaggcgggcgatggctcgaggtcaggaattcgagtccagcctggccaacatggtgaaaccccatctctactaaaaatacaaaaagtagctgggcgtggtggcacttgcgtgtagtcccagctactcggtggggggctgaggcaggagacttgctggaacttgggaggcagaggttgcaatgagcgagatcgcaccactgcactccagcccgggtcacagagcaagactgtctcaaaaaaacgaaaacaaaaacaaaccagtatttttacatgtaccttaagtaaccatcaatgtccatacatacacagttagctcattccttctaatcacagtttagggtccagcttacaaatataccacaccctgcttatctgtttctcctgtaaatggttgttcttgataattttttttttttttttagatggagtcttgctctgtctcccaggctggagtgcagtggtgcaatctcggttcactgcaacctctgcctcctgggttcaagcgattctcctgcctcagcctcccgggtagctgggattacaggcacacaccaccatgcctgatttttgtatttagtagagatgaggtttcaccatgttggccaggctggtcttgaactcctgacctcaggtgatccacccgcctcagcctcccaaagtgttgggattacaggggtgagccaccgcgcctggcctgttcttggtatgtttttactcttatgaaaagtgccgaggtcaggagatcgagaccatcttggctaacacggtgaaaccccgtttctactaaaaatacaaaaaatgagccgggtgtgttggcgggcgcctgtagtcccagctacttgggaggctgaggcaggagaatggcatgaacctgggaggcggagcttgcagtgagccgagatctcgccactgcactccaacctgggagacacagcgagactccgtctcaaaaaaaaaaaaaaaaaaaaaagaaaagtgccacagtggacatcctcatagttgactgtctacacatgaaagtgtttctctagacttgagtgaatcctagatgtgagattgctgggtgatagggtaggtgactttctatttcatcatactgcaaattgcctgccaatttctatgccactagtaggagtgtacatgttgcttgtctgttgggtgaagcatcctgtctccttgctgtggttgcattccctgatttccagccctctgagcagctctggctgtgtcctgcgtgctgtaccctccgcccagagaagcactgtcctccgtaagtcaggtggactctcggcctctgaagttcctgcacccgcctggtgtctttgcagcatggtcttttgctgagaataacctcgaccttctccttttcaaaagccctccagagggctttactgaccagagaggtggctagagagttggctgtgggattgaccacactgacttccccagacccatcttaagaggctggctttagattttcatcctatcccagttcttaagatgtaagttctgccctgagggcccctgggggaagccacagcttaaagctcaaatgcatttcccttgctgaaggagctgagccagccaattccccttgtgctagttcaggggttttgtctgccaatctcaaacccaggaacaagttctaagaactgggtcccttgagagacctagagtctggcagttgggtgggaagaggattgaccttggagacagtttctgtcacctacacccacctcctgagaaataacttcaagagaggaaggaccatcttggtcgaggtggtatctcacacctgtaatcccagcactttgggaagctggggtgggcagatggctcgagcccaggagtttaagaccagcttgggcaacgtggcaaaaccccatctctacaaaaaatacaaaaattagctgggcatggtggcaggtgcttgtagtctcagctactcaggaggctgaagtgggaggactgcttgagcccacgaggttgaggctgtagggagctgtgatctcatcactgtactccagcctgggtgacagagtgagaccctgtctcaaaaaaaagaaaggaccatctcatctggtcctctgcctcagttcctaccccatttactataccactgaatccttcaccatccacctgacctttatttaaattaaaataaattaaattaattaattattattattattttttgagatggagtctcgctctgttgcctaggctggagtgcagtggcgtgatctctcctcactgcacactccacctcccaggttcatgccattctcctgcctcagcctcccaagtagctgggactacaggcgcccgccaccacacctggctaatttttttttgtatttttagtagagacagggattcaccgtgttagccaggatggtctcgatctcctgaccttgtgatccacctgccttggcctcccaaagtgctgaaattacaggcatgagccactgcactctgccattaattaatttttctgagatggagtctcgctctgtcacccaggctggagtgcattggcacgatcttggctcactgcaaactccacctcacgggttcaagcgattctcctgcctcagcctcctgagtagctgggattacaggtgtgcgccaccacaccctgttaattttttgtatttttagtagagatggggtttcaccatgttggccaggatggtctcgaactcctgacctcaggtgatccgcctgcctcagcctcccacagtgctggaattacaggcgtgagccaccacaaacttgttgttaatggtcactcattgtccgtggttgtcacatctcttttgtctctttaaatacagaacagagctgggtgtggtgaactgtacttccagctattcaggaggctgaggtgggaggatcattggagcccaggagtttgaggctgcagtgagctatgatcgcaccactgcattccagcctgggtgcattccagagtgtgaccctgtctataaataaatatagaacagcagacctggcaaagttgtttagtagaacgtctcacattttggatttatctgaatgcttcctttttttattccccaacattttcctggaatagtccttgattttacggaagaaagatgaaatgagtagcttgtgtgctgacagtgaagaggaagggagacactcctgttttatctgctggggccagatttgtgccagccctgccttttccttgggtgtggttgagaggactgtgcgcagaccgcccccagccagccactggcggggtgtgttggtgcatctggcactggcggggtgtgttggtgcatctgggtgttaggaggtaggtccaggggcttctcctgggaagttgtccccatgtcgccttcggggggtgctccctgtgggagaatgagtggtgtggtcgtcccccttgcctgaagctgttattttgttccctcctgtgtttccttgccggttgggtagaggtctactatgttcactaactaggttactagtgacagaaaccttactcaaactggcttaagaaaaaaaaaaagaaaccaaaaggaaaaacaaagtccatgaaaacttttgtaattggtaagtttaaggaacctggctttggccgggtgcagtggctcacacctgtaatctcaggacttggggaggccaaggcaggcggatcacctgaggtcaggagttcaagatcatcctgaccaacatggtgagaccccatctctcttaaaaacacaaaaatcagctgggcatggtggcgggcaactgcaatcccagctcctcaaaaggctgaggtacgagaatcgcttggacctgggaggcggaggttgcagtgagctgagatcacgtcactgcactccagcctgggtgatacagcgagactcagtctcaaaaacaaaacaaaacaaaacaacaagcaaacaaaaaactggcttcaggtccagctagatccaggtgggtgagacagcatcatcggaccatctatttgtacctatctcttggctctaattcctgcatttatttcattcacaggcacctctccccacatgttataaggcagccactggcagctctagtgtgagctttgaaaatctcagtaggtatgattaagctgcttccttctatagcacctgtaaaaatttggtgttcactctgtttggactgacgaggtgtgtgcccattcctgaagcaatcgtagtggattggtgaatagagtacatgaattgaggccagtaacggtggctcacacctgtcatcccagcactttgggatgccaagacaggaggatcacttgaggccaggagttcaagaccagtgtgggcaacaaggtgagaccctgtcactacaaaaaattaaaaaattaactaagcatggtggtgcacacctgtagtcctagacacccaggaggctggggctggaggattgcttacacccaggaggttgaggctgcagtaagctatgattgcgccactgcactccagcctgggtgacagagcaagactctgtctctggaaaaaaaaaaaaaaaaagcatgaatttgaatttgaattggccaagcctgcatcgtgtacctaccccaaagctcaggctgggtaggttgagaaaggggcagccccgtataaaccacaaaaaccaacagtggtgtcagagtgctccccaggggagcatcaaggtactgtcagctagaggaaggggcctgggcacggagcaggcagaaaggcatattccgcttcgtctggtgatgggcatcgggagtctctggccgagtcagctcctcgtttcctggggctccattcctcttcattttggatttggcggaagtcagtgtccacaggaccatctgtgtcagggtgtcagccctgcttctttttttttttttttttgagatggagtctcactcagttgcccaggctggagtgcagtggcgtgaccttggctcactgcaagctctgcctcccgggttcacgccattcttctgcctcagcctcctgagtagctgggactacaggtgcctgccaccatgtccggctatttttttgtatttttagctgagacggggtttcgccgtgttagccaggatggtctcgatcccctgaccttgtgatctgtctgccttggcctcccaaagtgctgggattacaggggtgagccaccgcacccggtctcagccctgcttcttagtggctgtgtgatcctggacagaagagttagcctttctaggtttcggtttactcatctggaaaggagtatgatgttcatgttctttcttttttccttttttttttttttttttttgagacagagtctcgccttatcacccaggctggagtgcggtggtgcgatctcggctcactgcaacctccgcctcccaggttcaagcaattctcctgcctcagcctcctgagtaactgcgattacaggcgcccaccactgcatccagctaattttttgtatttttagtagaggtggggtttcaccatgttggtcaggctggtcttgaactcctgatcttgtgatccgcccgcctcggcctcccaaagtgctgggattacaggtgtgagccacggcgcccggccttgtgttccttcttgatggggctgacaggatccagtggagtggtaggtgtggaagtgcaggcagctggcgacatgctgaacccagggggtggtgtgtgctgccctgcaaggtgattcttctgctccagggtgagcagggcctgtccttggacttgctctttggagagttgggatggtgacctgtactgggatggtgacctgtactgggttgttgacccctcgggatgtgtggggtgattcttccacagatgaacatagcatggggcagaacactgtcccactgcgggaaccctttgctcattctccgagctccagatgaggaagggaggcgggtggaattggatgaattggcgcagtgattccgaaattgtaaccgggggagatgacatttggtggtaagaggacgggacacagcattccccgaaactgatccccggagagaaagctgtttattccctttgcagttctctttctgtgcagctcatcacttcaaggagaatgtctcagttaggggctaatatatgtctttaacacctttctaacatttgctaaccttccttattaacagagagagtgggtctcaagcctcaggccttgggcaggcgacagtgtttagcagactgtaataacattattcaattttcattatatttaccttttttctggtagacatttttttttaaggtttaaaaattatagaaaaggccaagtgtggtggctcaggcctgtaatcccagcacttttggaggccaaggcaggtggatcacttaaggtcagaagtttgagaccagcctggccaacatggtgaaaccctgtctctactaaaaatacaaaaattagcaggacatggtggcggacgcctgtaatcccagctgctcgggaggctgaggcaggagaatcacttgaacccaggaggcagaggttgagtgaaccagtgagccgaggtcacgccactgcactccagcctgggcaacacagtgagactctgtcttaataataaaaaaaaaaagaataaaaaataaataaaattacagaaaaattaagagtacagagagtccccataggctctataatccagttccctacaacttacattagtacgatccatttgctataattaacattagtgtggtccatttgctataattaacattaatatggtccatttgctataattaatgaacctagactgatgtatgatcattaataactgaaatgcatggtttattcagattttagagtttttccctaatgtccttttctgttccaggaaccacattacatttagttttcacagctccttagactcctcttggctgtgactgtttctcagactttgcttgtttttggcagccctgacagctttgaggcgtgcttgtcactcaatttagatttgtctcatatttttctcatgattagactgggtattggtttttgagaggatgactacccaggtatagaccaggtatagaaccatttttctttttttaattttttttgagacggagttttgctcttgttgcccaggctggagtgcaatgcgtgatctcggctcactgcaacctccgcctcctgggttcaagtgattctcctgcctcagcctccggagtagctgggattacaggcatgcgccaccacgcccagctatttttgtatttttagtagaaacggggtttcaccatgttggtcaggctggtctcaaactcccaacctcaggttcgcacccggcagaaccattttcgtcacatcctgataaccactgttgatgttggccttggtcacctggctgagatagtgttttgtcagatgtctccattgtaaagttattctttatttttaaatttttattgattgattgagatggagtctcactccatctcactccagtgtcactggagtgcggtggcgcgatctcggttcactgcgacccccacctcctggattcaagcgattctcctgcctcagcctcccgagtagctgggattacaggcgcccaccacaacacccagctaatttttgtatttttagtagaggtgggtttcaccacattggccaggctggtctcaaactcctgacctcaggtgatccgcccaccttggcctcccaaagtgttgggattacaggcgtgagccacagtgcccggctgttattctttattttcttccatccgtagtatactgttcacatctaaggagcagggcattatattttctttcttttcttttttcgctatgtttcccaggctgggctcaaactcctgggctcaacttgatctcctgccttagcctcctgagtagctgggactacaggcatgagccatcatgcctggcttatatttactttaccttctatttatgagaaatgattatatccatttatgatgtgaacataaagtcttggctgggcaccgtggctcacgcctgtaatcccagcactttgggaggctgaagtgagtggattgcttgaggccaggagttcgagaccagcctggccaatatggtgacaccctgtctctacaaaaaatacaaaaattagctgggtgtggtggcctgggcctgtagtcccagttactcaggaggctgaggtaggaggattgcttgagcccgggaggtggaggctgcagtgagccgagattgcgccactgcactccagcctgggtgacagggtgagaccctgtttaaaaaataaaaagaccggtgtggtggctcacgcctgtaattccagctgcttgggaagctgaggcaggagaatcgctcgaacctgggaggcagaggttgcagtgagccgagattgcgccactgcactccagcctgggcaagaagagctaaagtctgtctcaaaaacaaacaaacaaacaataaaaaacatgaagtctttataatattaatttataaaacatgaagtcttttcagtatttaatttaaaaattaagtccatttaaagaaaaatattaagtagagagaaaagttacaagagatatggggaattttttttttttttttttgagacggagtcttgctctgtcgcccaggctggagtgcagtggcacgaactcggctcactgcaacctccacctcccaggttcacgccattctcctgcctcagcctcctgagtagctgggactacaggcgcccgccaccacacgcggctaatttttttttgtatttttagtagagatggggtttcaccttgttagccaggatggtctcaatctcctgaccttgtgatctgcctgcctcggcctcggaaagtgctgggattacaggcgtgagccaccgtgcccggccgatttggggacattttaaaaagcaggaaagccaccctggaatggtagatgtcagagaaatgctgaaggcaggaagatgttgagagtatggtctgggaaaatggctggggctcagtgtcatctcctggcctgtttcccaaatccccttaagacaaggaacaggaagtgactgatgtagcctctgagaagtctcagacacagcgcagaggggccatggctaccccagggacgggtgtgatgactccctggggtcacggcttttcctccctcccttctctcgggctcctcctgaccccacagcattcccagcagtttctggcaggcaggtgaggagacctgggtcaggcaggctgtggcagctgcctgtgcaactggccctgtggcgtgcaagcctcaaccctctctacagctcagggtctgaaaggcggtgccaggtactgggtccttccgcccatgttatctagtttcctccacaacctgggggagtattggggtccttgtcattctcatcactcaggggaagagacctgtccaggtcaccagctggtcagggcccacgcttgggtaataggtgaatatttgacctcacacctttggatgtgaaacaagttacactcctttatttttctaaaaagtcttttaaaaatatgggctagccaggtgtgtggtggctcatgcactttgggagggcgaggcaggcaggtcacctgaggtcaggagttcgagaccagcctggccaacatggtgaaaccctgtctctaacaaaaatacaaaaattagccaggcgtggtggcacatgcctgtaatcccagctacttgggaggctgaggcaggagaattgcttgaatccgggaggcagaggttgcagtgagccgagatcgcgctactgcactccagcctgggtgacagagcgagattccgtctcaaaaaaaaaaaaaaaaaaaaaaataccacttttactaccctctaggaatggcatgaaatacagtagttttggagccctcccctccctagagttgcctaaaagccgtgggtgccctaagagagacctttgagtcgagccactgctttgacacctttccttggcaggctggtggtgtgaggctctgggtgtgagcatcctttagacgcccatctgagtttatgcctccagtgtcagggccgaaggtgggtctccatcctgagacctcgctgtcccaccctctcctcccctccagccaatccaattctgtcaagtcaaaagcctgggaaagtttttctggggcagaggaagctgaggctccagaacatggaatcctccttcttttctctctcttcctcccttccgtctttccccttcttttctttccatggtatttattgagggctagcgtagagcagacgccatcctgagtgtggggtagggcgatgactaaggtgtacacggtgtctgcctccgtggagtatacattccaccgggggctggtgtggggcaaatagacaagaaaacaagcacacagacaaatcagcaacaacaaaaaacccaaaacctcaacctggaataatacatgaagaaaacaagccagcggctaggtgcagaatcactaagggtgtgtcctgcaggtgagtggtcaaggaagccctctctgggaggcaacatgcttttgggataggtctatggtggagaaacaactcagttaatttccctttttttttttttttaatggtgtctcgctctgtcgcccaggctggagtgcagtggcgcgatctcggctcacggcaacctccacctcctgggttcaagctattttcctgcctcagcctcttgagtagctgggattacaggtgcatgccaccatgactgactacttttttgtatttttagtagagacggggtttcaccatgttagccaggctggtctcgaactcctgacctcaagtgatccacccacctcagcctcccaaagtgctgggattacaggtgtgagccaccgtgcccggcccaatttccccatttggtggttcagttacattgcatcattaataaagtctcctgcctcccactaccttgcagggtggggcggggtggggctgagatggtttccgtccaggttctccaagaaagacaagagcttcgccttcccagagtcatgctgagtgtacttcttattgctgacatggggccacgtgaaggtcactactggccttgcctgggcaacatctttccccctgtgattgggaggacgtgattggcacacttaagtcctttagttatcagctgtgatccatcatttgtgacccacagagcccctgattctgccttgtgggtacagtgagcgaggggttgggggcgggggtggaggaaatggacagaagcaaagagtttggagcgttgggtaaaaggaagatggccggcgcgcttttttttatttttatttttatttatttattttttgagacggagtcttgctgtgtcgcccaggctggagtgcagtggctcgatctcggctcactgcaagctctgcctcctgggttcacgccattctcctgcctcagcctccggagtagctgggactacaggcgcccgccaccatgcctggctaatattttgtatttttagtagagatggtgtttcgccattttaaccaggatggtcttgatcccctgacctcgtgatctgcccgcctcggcctcccaaagtgctgggattacaggcatgagccactgcgcccggccggccagcgcggtttctgaagctgctttgggacttggagggttcagagagtgggaactgaatttttttcccctaagagtagagagggagttgcttacacgaaagagctttgattacaacaggagtgatggaggctagacagctggaaggattttccttatggaaagggggtggaaaagccccagaaagcaggcctggtggaaagcttgcacattgcagacctgcagttgctcagcaggaggtttggagctcagctcccggctgggtgaagctctgggagtctgtgtcaacacctagggaagatgagctttgtgtttaccttttaggctaaaaggacttaatgtcggggtgggaaggatcattaacacatcagtgactcagagtccagaaggaaactgttgtccttccttctgtcacgaaggaaactgtcgttggctaagccaagccggaaagtctttgattacacccacaaagaggggcattttcccctggacccaacccagagttctcttcagggactgatagaggagaaagagatgaattcagacaacagggaaataaattagaatttattaggagtcgggtaaaagggtccccaacctataagttttctagttagtcaggcgtgtgagctggcaaccaacccctgccagtttctgcagtccacggggtggtccccaggaggttgaatgaaagaatcagtgtccccgcctcatctggtcccggcctgcacactgtgcctagtaccctcatccctgcacatgtatggcactgactacataagttctagcccagaggcacccagcagtgcctcagtctttttttgttgttgttttttgttttgagacggagtctcactctgttgctcacgctggagtgcagttgcatgatctcagctgactgcaacctctgcctcccgggttcaagtgattctcctgcctcagtctccagagtagctgggattacaggcgcccaccaccacgcccagctaatttttgtatttttactagagacggggtttcaccatattggccagactggtcttgaactcctgacctcaagtgatccacctgccttggcctcccaaagtgctgggattacaggcatgtaaatgcacaaatcttcattatacattttggacaaatggatccttcttccatcctgatatagaacatttctgtctgtccagaaaaatctcccacatccagaggcagccattgttctaatgtttttgtatcttagattgttttaaaacttcttatcagctgggtgtggtggctcacgcctgtaatcccagcactttgagaggctgaggcgggcggatcatgaggtcaggagttcgagaccagcctgaccaacatggtgaaaccccatttctactcaaaatacaaaaattagttgggcgtggtggtaggcgcctgtaatcccagctactctggaggctgaggcaggagaatcgcttgaaccctgtaggcgaaggttttggtgagccgaggtcgcaccactacactctaacctgggtgacagagtgaggctctgtcttaaaataaataaataaaataaaataaaataaaatttcttatcagccgggtgtggtggctcacgcctgtaattccagcactttcggaggccaaggcgggtgaattccgaggtgaggaattcgagaccagctggaccaacatggtgaaaccgagtctctactaaaaatacaaaaaattagtcgagcgtggtattgggagcctgtaatcccagctacttgggaggctgagactggagaattgcttgaacccgggaggtggaggttgtagtgagccgagattgcaccactgcactccaccctgggcaacagtgcgagactctgtctcaattgaaaaaaaaaaaaaaagttctcatcaatggaatcccgttgaagcattttaagcattttttggtgtctggcttctttcacttagatcttgcttttgaggtgcttccttgttgttgcatgtgtccatgttttgttcccctttattattgggtcgtattccaccgcggggatgtaccacagcttgttgatggacacttgggctgctttccgactttggcggtttgttttgttttgttttgtttttgagatggaatctcactctgtcactcaggctggactgcagtggtgcaatctcggctcactgcaacctccgcctcccaggttcaagtgattctcctgccttagcctcccgagtagctgggattacaggcatgagccaccatgcctggccaactttggctattttgaataaaatggtgatgaacattgtcatgcaagtctttgtgtagagcatgcatgttcactgaatccttgcagtagctaataggttggcactgttgttattcccattttacagatgaagacactgaggcacagagggggtgaattcctagtccaaggccgcatgcatagtaaaagctgggggtaggattctaacccaggttcgtctgactgcagcatatgtatttttattccctcactgtagtgtctttgcaccacagctgtttggggccattaagcctagggacaagtgggcatctcctctcaatggcctgtcaattcctaactgcattttagctcacaatagtagttgataataatggtagtgttgataataatggatttgagtcaccacaaaaagattccatcaaacctgcctttatttttatctgtttatttttgagacggagtcttgctctgtcgcccaggttggagtgcagtggcgcgatctcggctcactgcaacctccacctccctggttcacgcgattctcctgcctcagcctcccgagtagctgggattacaggcgcccgccacgttgcctggctaatttttgtattttgagtagagacggggtttcaccatgttggccagactggtctcgaactcctgacctcgtgatccacccgcctcagcctcccaaagtgctgggattgcaggtgtgagccaccgcgcccggcatcaaacctgtctttaaaggacaacagcatttggaggcgtttgagagaaatctctagctagggtcattacagtaactaacagcaagcaaggaagcaaacaaaaagtcttgctacccaaagccctagtcgcctggaaatctcacatagttgtaattcgtcatctcccagagaagccaggcacagaaggcgttactggatatataaaatagtatataaataatacatgtataagaaaccactctgttctctgtagagccaaacagaatagggttttggagagtctgctggttctcgctttgaaagatgttgctaagcaatgttgctaatattatggaaagacagcttccctcccggcttttccactcagcctcagaaactctggaagaggtggaagtggcttcaggagtagcagcagctggggaggtttggtaatcagtgaggcgggggccgggggaccttgggttggagagggactgtgctgtaggccacccagccctcagcctcatccgctcctgattctctgtactgactcctgggcggcctctatgcaaaataacacctcttcctgttcgtcagaaatttcacacacagaaggatccttttgaattttttcactgtgggaaaaattactgtagtcatgcagcttagcaaaaattcaaaaatccataaatgaacttcaaaaaaggaagtattttaaataacttcagtaacccaagtgatatatgaagaacttctttattcctccctctacccactctccataatccctgaacaggaagtcggcagggttctgattgacatcacgtactgcaggccccaccttcatggctctgggtaccagagcgcagggtgcccgccactgagtgggatctgtgggtttcctcagcgtggtttcctttccttggagcttggaaatgccacacaagtcacagagatccgtttccaaaacctgagccagtttagatcctctgcttaatatgacgtctgtggccccaggaaagttgggctgagctgaggtttcccaggcttgtctttgaggcctccgagtcctggcctgcgtttatcacggaacgaccctattgtggtgggatggacctcttgggggctggtcatgggttctgtgaggggattttagaagctgggaggagagtcagtatgttggcagagagttttcctgcatctctctcttttccttctttttttttttttaattagttatttatttatgagatagagtcttgctctgttccccaggctggagtgcagtggcacgatctcagctcactacaacctccgcctctgggctccagcaattctccttcctcagcctcccgagtaactggtattccaagcgcccgccaccacgcctggatgattttcgtatttttagtagagacggggtttcaccatgttggccaggctggtctcgaactcctggcctcaagtgattcgcctgccacggccttccaaagtgttgggattacaggcgtgagccaccgcacccggcccagctctcacttttcaaaaatagaaactgcttcccgacctcagatgacttcaatctttcccttcccccgacgccttcctgcctccctcttccccctcctctgtcttcctcctaagggggcatcccagagacgcaactgtgctgtggcccagcagggggcgctgatgtacctgccaagagtggaggtgtcttagcacaggtgtgagcgttcagctgtgtgcgagcgggcttcagagtgatatcccagagcaggtgtgtgtatgtgtgtaccctcaaaggcagaagagagcgggggtgctggaccgtcctgtccaaggctctgtttataacccttgcgttgtcccaaaggttgtgtggtccatggaatagctgggaccctgcccgtggaggggaggggcaaggcgtttgaagacatctggttttcatcaaaggccccaccctccttgctccatggcccccctcgcccccacccacccccaatcccagcccagaacggtggcagtcattctgcccagcagtggggcgctgggagttggtggctgggtggggcgacgaggtggcgtctgctgcaggctggctctctgacgaggggcacggggattggggctgattcccgctttctcatggatatgtctcctggagccggttcccaggcacagaaggcccttttcttcagggccaggcatgcgtgtctgtctgcctcaacccactggcccctcaggaacgggctgtgcagctgtctgcgctctgttcatgattaacttcgctgtctcccgccccaggcctgattcccacccaggccccctcagcctttggagttcccctggactggaagagagacctgggctggcagctgccgggcactttgttctctgggactgtgagctttggaggctggaacaggccatggaggtcctgagagctgggacgccgtggggcataagttgggtgaggtgagacctgcaggaagaccccttctctgccgtcagagacttctgccgtcctcatttcctgcggtctgcatgtatccagctttctcagcccaccccaaagtgcctcatgaatgtggccttggagcagagtaatgtgaaaattcttccctgtccgttctctttcgaactgtgatttcttcaagaacagtgccttggtttggcgcaggtgtgtcactaacacctaacactgcctgctttttttttttttttttttgagatggagtctcgctctgttgcccaggctggagtgcagtggtgtgatctcggttcactgcaacctctgcctcccgggttcatgccattcccctgcctcagcctcccgagtagctgggattacaggcacccgccaccacgcccggctaattttttgtatttttagtagagacggggtttcaccatgttagccaggatggtctcgatctcctgacctcatgatccgcccgcctcggcctcccaaagtgctgggattacaggcgtgagccactgcgcctggcccgcctgcttttttaaggaaggtacttcaagcttagagcctttgtcaggcaacagtattgaggcagaacttaataaatttatgtttgttttcatggtaggaagggcaagtgataatggattttcatttagggttgcaataacgttttcttttaaaattaagtaaaggcagccgggcgctgtggctcatgcctgtaatcccagcactttgggaggccaagatgggcggatcacgaggtcaggagatcgagaccatcctggctaacacggtgaaaccccgtctctactaaaaatacaaaaaaaactagccgggcatggtggcgggcgcctgtaatcccagctactcgggaggctgaggcaggggaatggcatgaacccggttggcggaagttgcagtgagccaagatcttgccactgcactccagcctgagggatggagcaagactccacctcaaaaaaaaaaaaaaaaaaaaattaagtaaaggccaggcgcgatggctcacacctgtaatcccagaacttgggaggccaaggcaggcggatcacctgaggtcaggagttcgagatcagcctggccaacatggcgaaaccccgtctctactaaaaatacaaaattagcccgatgtggtggcgaatgccggtagtcccagctactcaggaggctgagccaggagaatcgcttgaacccaggaggtggaggttgcagtgagccaagaccgtgccattgcactccagcctgggcgacgagcaaaacaacgtctcaagaaaaaaaaaaaaaaaagtgaaaaagtaagttgatgtaattaaagcaaaattataaacagcagagcagcatgacactaagacaaagaattatgaaggaggtggcgtgtggcccaattgtgggaagctttggctgggctaactgcacacactggctggaaatggtcttcttttgaggtttggagtgtgttaaccctgtttgtttcgggcagggatggtcttccatttttctttcttgccctggtctcttgcataaagctggacatactgtacatgtttaataaatgctggtggaatgggtaagcctagcattgatggttgttccagtctctgctattgatgggttttcttgtgctttggggtcccctctgtggggtgtgggtgtgatgggctgtgggggctggagtgggagttaagaggggaaattgctgtttatgcaccaaaggtggcgagcttgtagggcaggggcagaaggatgggacctctcactgccaggaaaattctacctcttagagactcaggagtcaggggctgagaggttacgattttttgggggacagccttgtgtttgcagtgacactgggcttgtagaaggacttagagggctgggaaccccagaataagagaatgaataatggaacctgcatggtggattttgtgccttcatcatcccaattccctgttgtagttgtttggagaggtggggtctcactatgttgcccaggctggtctagaactcctggtctcaactcaagtgatccacctgcctgcctcggccttccaaagtgctgggattacaggtgtgagccaccctgttacccactgtgcacttgacctgaactagctcccacactctcacctgctgggaaggaggatcaggccttccgttgaggtgcagccttctgtgtgtgggtaaaatacacccaacgctaggatagacctaagccagcgccctcatcaccttccctgccatctaactgaagcggtccatcagctaacctgtgggtcctcgggtgctgtgtgctatagcgcggtgggagagaggggaagagaagctctgggttgcatgctgctgggagctcttcccttttctctaccaaggacactcattttattctttttccagaccaattcttaagtcactactggcatagtacttgcagcctgcctaaccgccaatctcaggagtggggcccgggtcattcaaatctctagctataaaaagatgtccatggctatctatatctctgatcccccacaaccccggcagggagggggtgggggtgggggtggggggcacaaggccagtggtaacggctgcttcataaatagaccaggtgcatttaagaaccaccctggggcttcctcccctccaccccaactccagtgccagcaggaagctgtgggcattggagaggcagggctgaagcctcaggccctcgaattcgtttgcagtccctctcccctctccacccagcatggtcccctccctgcctggattttctgtgtttgcttgaacaccagactattaaaaacaaaacaaaaaacaaaacaacaacaaaaaacaaggcaaattgcctcagggggaacctcttcggccccaaagatggactaattggcttgttctaattcctttcagccccctgcccacttccttttccctagaggggcaaagctgtgagtgatgcttcggaggggtgaggcgggagggggctgggaggctgggcagcacctggaagtggatgagggcgattgtgagcgaggccccgcgccgatggtagggaccaggccacagccctttccccaggagccggcgcgaccttccgaccttccgaccttccgcccttcctttccgaaggagatgaggctcgcgcgcggctggcaggggcgggagggaccacgcgacgagtgcgcagcggccaggcccgggtgggcgcggggagggcggagtggggggcgcccggcccgccaggaggaagcggggtcgccgtgaagttggttattgaacccatgtggagtcaaactcccagggccgggagagccagtgttcgcggggagccgaccccagcccactctgcatcccagctcggcgatccttgcgccgactctgcggggaggcgggggcagaattccgcctcgttcctcccatccgcaagctcccacccggggacccgggcccgggagctgcgagccggggcgggcgccgggctcaggtgccccctgtaagcgctgggcggccgggaggggacggggaccgcgcgcgggcagtttcgtttggacggaggaggacgcgcgtttcctcttggtgcctgttttctctccctctgttttaaaagcagtgacagcatcggggaagtatccggggccgggccggggagggcggcagccgcctctgcctggggagggagctcggggccgccggcgggagtgcgggcggggaccagaaggagcgggcgaggggaggcagggccggggccggggagggcgcctgggagccgggcaggggggtcccgggagcgctgtccgcctcctcctgcgcttcgcccgctccctgtgccccgcgtcctccaccatccgggcggccgaggccggggcgcgggaggcggggccggggcgggtcccggcgcgggcggcgcgtctgagcgggagccgggagccgccggcccgggccgcgccccgagcgagcctcggaaatgcccgcgccgggggagcggacggcggctgccccgcgggccccgaggagacgctgaaggtcgccgggagggaggggagagcgcgcggtcacctgacccccggggcgcacctaggcggggcggggcccatgcgaggcggaggccgggggccggggcgcgggctcaggggccgggtgcggagcgcgcggagccggggctgcggggacgcgggcgggcgaggtcgggcaccgcgggcggcctcgccatgtcccagcccgcggggaggaggcattgccgaaaggcggggatccgcgccgccgtggtgctcatcggactcctgcacaaatcccggaggcagaataaagagaaaaggtaaacccctgcagcgccggccgcttccctccgctctcctgctgcatgccagttttctttggggtggacttttccgatgggtgtttggttccgtgttggttagaaaaaagcctcctctccaggtaccgtcgtgcgaaccgagttcggagcttcgccccggaccctggctggtgcgaggagcctgggcaggaccttggcggaatcggagggccgctgggagggcgcatcggggtggatccctgacggagggaccccaagtccgtcgcccccagaccctttgcagaccgcgaccccgttccccaagcctgcagccgcggatgccattgatccagcccaggcggctccatgcgccggtgttgccatttgcttcctgcaacttggctgagccctcgaggtgcctgcctggccgagatccgcttgctctgcgctcggtgccggcaggcgaggagcaagtttggaggttgttcgctccccacccaccctctcgccccaccgccatagggtgactttgcctcttcgcctttctggcgtttgttctttcgtttgctcctggatattgaaaatagttttctttagctatttcagagacattttggacgacctgtgtggtgggaggtgtggggtttggagtaggcaaaggaggttctgaggaagctttctaggctgcaaccgcagctgcaggtctgacatccaccagaccccaaggagctaccaggcaggtcgttggcacaaagcctccctgttctgctagggtgcatggcagagcctccagcaatggggggaggggagtgcggaagctgactgcccacagagatgttgccgggatcaggatttggggtagcttccagtgaccctgctggatcctagtttccagaggagttttggaatggttaataccgcaccctataagacacgggcagtggaaccagagacacctgggggtgaccagcagcccctggatatgcccacaggtatgaacgtacctggggtggtggtaggcagggaatacgggggactttgagaagctggcatggattgcccttgtggtgggttgtcccccattcctctcgtccccccttcctataatgtgtgtaacaagatgttgcccgctgcacagaatgaatttcccgtgaaaatgacataaggtggttcagcatgaaataacattgagtcacctagtgagaaagttcttcccttttcagttctctgcgaatccttgtgatttctttgaggggaagtttcaggtggatgctagtctgcctttaacacattttaaacacttgctaatcttccttttgtaattaagagagagcagacctccggctcccggtcctctgagtggggaacagttgcctggctagaacttaggttgtttttgtttttgtttcatttatttttaggattctctcctggttaatggccagtggtactgatgtttttccatttgtggtagtgatataaaacatctctttaaacatatgaagtcacaagaattaatctattttatttatttatttatttatttttgaggaggagtctcactctgttagcccaagctggagtacagtggcgccatctcggcccactgcaacctccacctcctgggctcaaacaattctcgggcctcagcctccggagtagctgggactacaagtacccaccaccacgcccagctaattttttgtattttagtagagacgggggtttcaccatgttgcccagggtggtctcaaactcctgagctcaggcgatccacctgcctcggcctctcaaagtgctgggattacaggcatgagccaccgtgcccggctgaagtgaatctatttaatagaaatagtagtaataataatacaagtgttaacaaatatagtggaaatcctgcaagtggtctaggaatggctgatgccagcgacatgtgtgtctagcagaagaagctgccatgggaactctggagtgcaatgttccagggcctgagtccatcttcccctggacttggattcccttctgttttctgcccttcagcattttatctgtagagtggtggtgaacaggtcaactctgagacagcctgggcctgctttgagggctggaatggaaaatgggcttgatagaaaggcagatgcgtgggaccaattcctgattctgagtatagaatgggtggtggttggggggtggagaggaaaagccccctgcacagagagcgagaagttctcttcctggctcatctgttgactgtggtgtgatggtagatttcatctctgggaacctcggtttctgcctcaccacaaagggctgtgaggctcaagtcagatcatgtgagtggagacaggacagaaaggtacaaagtgctgcataaaggtaacgggggtttgatcggaactgttccccctcttctctccctgagcctgtgctcctggtgaccaaggtcagatgtccggtggtgacagccccaccagtagcagtcaagaccagccatgcatgggccaagggggcagccaggtgggtttgagcctgggcagaactagtctgtgggtggtgggggcaggtgcagtgaggcccagggaaggacccggatagggacagggagggattggctgggacccgggtaccccaggcccatggagtcctttatttcttcctgagtgcactgtgctcttaagagcctgcaatgcaggcagacattggtggccttcctagcccctggcttcatcccgttcttctgtcgctccaaccatcctggtggctttggccatggacttaacctacccaaggagaaagagtgattgatttcatcatggtgctaagtgacctttgcttccctctctgtatctggagtttctttgtctctttaagcgtctgaaatgagtgcagcaagcactattgacccttgctctgcaggtgctggtggccacgggaggcctggagcaggctgcagctgccagcctctcttaagcatcccccatactccatgctgggcgttacatttgatgagctcttccttccaccacctctcatcacaaggtggggtcaggctcaggccccttcttctcctcccagaaggcttgatccatccatcgatcttcccagcacctgtaattgacaggcttgtgcagataacactgttggctcttagccttaagggttgaaatggttgtgtgtggcttgcagggaccacccagtggtctttttcatcctcctgctctctccaggccacttggaaatattgcgtattaggggacagggaggtgtgccagccagggtagtcatgagacagatgtcccatatagtcccagaactaggagactcccagctagtcttggtagttcccaagaactgtgctccaggctccaacttcaatttccgttttcgagaaatgggcgtggtgatcatcatgttggacttgaccgtgctctacgggagctgtggggcagcctggaggttatgcctttttctgcccatctttcagggtttctggcacatgggatcctgtaaaagcagtggcgtgtctgagaggggattgggtttgagtatggctcccaggagacacctggatgaagccttcctcagagactgcggtttggaaaccactttgattttcagagcctgcttcttatggatgtgggtagtggggagcttggctccctgagggggaaaacaggcagctttgctgggaaggacggaggccgaggaacacgatcaaaatatgtacgttcttggccgggcgcggcagctcacgcctgtaatcccagcactttgggaggccgaggtgggtggaccacctgaggtcaggagttgaaaaccaccctggccaacatggcaaaaacccatctctactaaaaatgcaaaaagtagctgggtgtggtggcgtgcacctgtaatcccagctattcaggaggctgaggcaggacaactgcttgaacccgggaggctgaggttgcagtgagctgagattgtgccactgcactctagcctgggcaacacagcgagactctgtctcaaaaaaaaggtacgttctgaaagatgtggataaagtcactgtggccttgggtgtgactttctgaactggagagaggtcatttagcataaatgaaaacaagtccacttcttatggtgggtagttattttgagacagctcccatcatggagtttatgaggaggaagatatggattctctcatcatttagcaaattctggcaggctgtcaggggagagctcgaatctgatgaatgtgatccctttgttgtggagtatcatacctggtgggttattcctgggtagaaaaagcctatcgcaattcttgtttaaaaaaattttgttgtgaaaattctcaagcatacacaaaagtagagagaatagggtaacataatacctactttcagccattatcaacttacggccccaatcttgtttcatttatgtaccaatgcactcctccacaagattatttttttgaagtaaatctcaggtactagatcatttcattcttaaatatttcaatttgtatcttaaagataagaattcttggccaggcacggtggctcacgcctgtaatctcagcacgttgggaggccaaggtgggaggatcaccactggagcccaggagttcgagaccagcctgggcaatatagtgagactcatctctacaaaaaaaataaaaaaacatagctgagcatggtggcatgtgcctttggtcccagctactcgggaggctgaggcatgagagttgcttgaacccagaggcagaggttgcagagagctgagatagagccattgcactccagcctgggcaacaggaaaaaaaaagttaagaattcttaaaaaaacccccgtaacactaccgttattataccctctaaattaacagtgatttcttaataccatatttagtcagtatttgaatttccccagttgtctcgtaaaagttttcaaaagtttttttgagtcagaattcaaacaatactatgtgatgggtgatgtgtctcttaatctgtattttcctccaactcttttttttttttttttttttgagacagagtcttgctctgtcacccaggctggagtgcagtggcacgatctcggctcactgcaacctctgcctcctggtttcaagccattctcgggcctcaacctctcaagtagctgggattacaggcgcctgtcactacggccggctaatttttgtatttttagtagagatggggttttaccatgttggccaggctggtctcgaactcctggccttaagtgatccacctaccttggcctcccaaagtgctggaattataggatacatgagccaccctgcttggccctttcaactcttttaaaaaaattttaatttaatttttttggagatgtggtctcactctgccacccagggtggagtgcagtggtatgatcttggcttactgcaacttccgcctcctgggctcgagtgattctcccacctcagcctcccaagtagctgggactacaggtgtccgtcacaacacccagctaatttttgtactttttgtagagatggggtttcgtcatgttgcccaggctggtctcgaactcctggactcaagtgatctgcccacctcggccttccaatgtgttgggattataggtgtgagccgctgtgcatggcccacccaactctttttttcttacaatttatttattgaagaaactggactgtttgtcttgtggagtttcccacagtcaggattttgtggatggcatctcctggtgttatttaacatgttctgctgtcccctgtgttacctgtaagttggtatttagttctagaggcaccatcagatttgttttttgttgttgattgtttgttttttttttttggcaagatcgtgccattagtaattgtgtagttgtctctttttgcgacgttagtcattgttgattgatttgtttctagggtgtgaacctggtatcgggagattacctgtgtcctgccattgcaggcagccccatgagctggctggacatgaggactgtgcctggggtttgtccagaattctggccttgcagtcccagagtcccagagctggaaggggcatgagacaggagccgatccactccctggtcccagaacagatggctgcttgttctctccttaggaggcagctgggtcctgccctttctggaagggcctgtctcctgtcctcttctgtctgatgtttgaatgacacccggtgggctgtcgttgctttaaagaacaaacacctccctttagccagcttcccactattcacttcaccaaaggtctgaggccttagaccattcgagttgaagggacagaatgtgaggtgcaaatgagtttaattcctcctgagccactattttaatctcctgcttggtctcctggcttctagtctcccttatcctctctccttatggtggccagagtggagtttaaaacattcaaatagaaccaggtctctctcctgtggaaagctctccatagactttccattatacttatttatctttttttttttttttttttttttttttgagacagcatcttgctctgtcacccattctggagtgcagtggcgcgatctcagctcactgcagcctccgcctcctgggttcaagcgattctcctgcctcagtctcccaagtagctgggattacaggcacgcactaccgtgcctgggtaatttttttgtattttcagtagagatggggtttcaccatgttggccaggctggtcttgaactcctggcctcaagtgatcctcctacctcagtctcccaaactgttggaattacaggtgtgagtcaccgcgcctggccgactttccgttatactttaaatgaaatcccaactccatagtccggcccacaccccctgcctgcttctgtgacctcacctcccaacttgtcgtcctttcctcctggtgatcaccatgattctgttgcggaggcctcctttccacacttggaacatggcaggctcgcccctgccacaggccctttgcacctgctgtttacagtgagctcattggctggtgcttcctcatccccggactcttcactcacatggcatctctttcaaaaggcctcccctgacgatccaatctaagcagctccctccagtcattactgctttaccctgctgtatttcctccatggtactcctcatttactgatcgtatctagtgtgtgcaataaatagttgattggctgtttcctcccctagaatggaaactgtttcagagcgggaactttgccttctttacctctgggtctccattgcccagaataggagatgctcagtaaatatttgctgagtgaatggatggaagcccaagaggcctcctggctcccctaagtagaacgtgcccattgcctgtttctctggggtcttttttttttttttttgagacagagtctcgcccaggctggagtgcaatggcgtgatctgggttcactgcaacctctgccttccaggttcaagcgattctcctacctcagcctcccaagtagctgggattactggtacccaccaccatgcccagctaatttttgtattttttttggggggggggacggagtctcgctctgtcgcccaggctggagtgcagtggcgcgatcacagctcgctgcaagctccgcctcccaggttcatgccattctcctgcctcagcctgggccctcctcccgtgctgagtagctgggactacaggtgcccgccaccatgcccggctaattttttgtatttttagtagagacggggtttcaccatgttggccaggctgctctcgaactcctgaccccaggtgatccacccaccttggcttcccaaagtgctgggattacagacgtgagcctccatgcctggctccctggggcccttttaatactcagcgccctttcttttgtctgagattggggactgtctcccttctctctcctttctttccttctggaagagattttgtagagaattgcaaatgatcacttgcccgtgtgtagctctgtcattatgccttgcctctgcatagctttgggacccgtagacgtgagagggaccaggctcagccatgaccgtcctgaagctggggccaggagccagggctcttcttgacactgcgttcctaagtcttgggtcctggaactgccgcctgattggcagaggcagcctcccttcatttatgccaaagaggggcagtgggcgtctgaattagtggacagtcgccattagccaatatatatatttttctaaatgcagttttatctctttggagcttgtgtggtgcacagatggctgcttaccaggatgttgccaaatagagggcttgtcaggcctgttcggtgaaatcaacgaaaagcacttctgttcagacgggggctgctgaagggcccaggaagtctctcagtcattttaagcagatgaagcacccccacgccccccaactccctgcccctcaacaaactcagtttctttgcctactgaatccataaaaagtaagtgaggtaggcaagatgatttcaggtggacaagtgctttttattttaatagctactttaagaaatgaatcctggcaagtgatactggttttccatgtatgatagttatataacgttagaaaacccgaatatgggctgtgcacagtggctcacgcctgtaattccagcactttgggaggccaaggcgggcggatcactcaaggctgggagttcgagaccagcctggccaacgtggcgaaaccccgtctctactaaaaataaaaaattagctgggcgtggtggcgtgcgcctgtaatctcaactacttgggaggctgaggcaggagaattgcttgaacttgggaggcagaggttgcagtgagccgagattgcaccactgaactccagcctgggtgacaaagccagactctgtctcaaaaaaaaaaaaaaaaaaaaaaaaagtaaagtcaggcccatcactttagggattccactaagagtgtctgggtggtgcccggggtaccctttatacccatggcagaaggaagaacatggctggtatttcataagctgagatttctgagtgcgggggtcctggttgaaccctgaagagggtctcgaagaatccaagctcatttctaggggtgagtacacttgatcaaccttcccttctccttccaggcagactagtgggaacctggagcagacgctgtgtttattcagtgcccttggagcaagggtggattgaaaaattgtcacttgcttttaagcttatcagttatgaacactgtatttcatgaaggctggagctccagccaagtcctttccagagtcctccagggctgggcagcctggctgggagctggggacgcctctggagacatgtcggccccatgtgtgtcctgagacagctgaccttgccttatggttagtccatttctccaaaggcaggagttgcggggggcctgtggatgagagccacctcctcccttctttctccctcttctgcctttttctctttctctactgtaaagatctttatcagtcacactgaatgctgtgtggcaggatcagggcactgtgatgatacctgttgtcaagagggcttactctggagggtaaagcaacttgtaagaaccccataagggaggcatctctcttgtctttggttgatggatggggctgagttaagagtctagtaagagtggaggtagggccgggcacggtggctcacaccagtaatcccagcgccttgggaggccaaggcaggcggatcacctgaggtcgggagttcgagaccagccaacatggtgaaactccgtctctactaaaaatacaaaaattagccaggcgtggtggtgggtgcctgtaatcccagctactcaggaagctgagacaggagaatcgcttgaacccgggaggcggaggttgcagtgagccgagatcgcgccactgcactccatcctgggccacaagagtgaaactctgtccccctcaaaaaaaaaaaacagtggcggcgggagcccccggttcctcaccgtcttgtcccgtacgtagcagcatgccatcctgactgcggagagtgcagacagcagcagccctgccacctaggagcttgcagtctgaggcggaggtggggagtgggcccctgcagactcctcatatggttaggaagcctgtcctctggaccagacacagtcctaggtgctgaggacgcagcagtgggcagcagagaagcaaagccctgtctggctggagcgtccatgcctgatgggtgttattctgcccacatactttgttttttcctttggagctgatattttagaattggaagattccacattgtgaatctgtttttcagtcttgagaaatcagaagctctgggaacactggctggactggccttccctcattacacctcaacttctagctacctgatcagtacagggctggtagcctcctgctcactgcagcccacctacacctggccacacctttgctacctgccccttccctgaaggacgggacgtacggtgtggggagcaggaggctgggggttgggagctctgggtgtaaccctgtgaacacagaggctgggggttgcatcccagtcctgtgcgtcctttgggacttcttggtcttggcagatccattgcgatgagaaaggaggggtcccggcagcctagcggggcgccctgtgggagctgggctgcagaatggccactgtggatttgccttcaagtattcctcctccctccccctcctgaattacctccaaacaaaatgacagaagttatgggaggctgcgcgtcgcagtacagaaactcaggaataacgtgagaagggacagagacagaaacactcgtggatccccgctctgggcctgcacctgcctggtacttatgcttcacttacctcatttcattctctgcatgacactgatgatcattatcttcattcttcatagaggagaaagctgaggttcaaaagggatggcgtctccaatgtcacctagctcgtataacagagctgggattccaatctgtctggtgccaaattctatgctttttctcccaccaccaattatatggtgaccctggctgaggtacttaacacccccgtgctacagtccaatgaagtagattgaagtgcagctcagagagaccaggtgtcctggtcaagactccaaaactctgttttgggtctcctgttaaggagttaagaactctggcaccctagaacattctggttgtttttaaaggaagggatcagatgggtctctggaacagctgggcttcttttgaatgcttagcctgagctaaggggagggtggagcctagagcagggaaaggtctgtcctgtcaggtgtcagataagctgaaaggtctcctggctgctggcctcactaatgagaacagaaattctcacttctcgatatgaactggaaggtcccggctgcagcctgggttacctgtgccatctgtattttaatagaacgtctattttaataagatctttgagatgcacagacagaaacagcatgtaaatcaataggtcactgaaacaggccatctgaaaacgagatctgcaaatgtgccaggaagggcttttgagagtgacagcaataaatgccccttgtggatggccagaaggtcccccaagggtatggccacatggaggcaggactcagccgtggtgcaagtgatgggaaccgagatgcctggcttccacattgcagctcctctgacccccagcccccttctagaaagggctgccagccctcttggtggcatctgcccctctctttcccctccatgaatgcaaatgcaagctgcagtccctccttaaatggattgtgtcccaaacgttcattcactcattcagttcacctccatcaatatgcgggtgccctccctgcctccagcagcccatgctcctgaagcagagatcaaccatggaatgtgaatccaagacagaagagggaggtgtggagaagaggtgcagggagccctggaggtcagaagaaagggggaccgcccaaggaaggctgcctggagttggtggcatttgaagtgggcctcggggactggacaggatgtctgaagggagagatggagtgggaagcacatccccaaaggagacagtggaagacaaggggccaagataaaaaaacaggggcccgctcagatcccaccttggctgtggtgtggattccctgctggggaacgtgggagatgaggctgttagggcggcctggggccatttcgtgttaggtgttgaatgctggggaaagaagggcaggtcaggctgtgggaggcttccctgctccccgcctcccctagactcagggcagttggtaccccagttagaatacaaaaacagagtcagtcagtgttatacatgaaacaattctgtaacatttgtgttattgtgatttttattaaatagaggtttggggcccaagggcctttgtgttggtgaggcagtagataatacccccaaatgtcccttctgattggtaatttattttatttatttattttattttattattttttgaggcagcatctccctctgtcgccaggctggagtgcagtggtgcgatctcggctcactgcagcctccgcctcccgggttcaagcgattctcctgtctcagcctcccgagtagctgggattacaggtgtccgccaccaggtccggctaatttttatgtttttagtagagatggggtttcaccacgttggccgggctggtctcgaactcctggcctcaagcgatctgcctgtcttggcctcccaaagtgctgggattacaggtgtgagccactgcactcggcctattttattttttattttagagatggagtctcactctgtcacccaggctggagtgcagtggtacaatctcggctcactgcaacctccacctctcaggttcgaatgattcttctgcctcattctcccaagtagctgggattacaggtgcccactgtcatgtctagctaatttttgtatttgtagtagagacggggtttcaccatgttggccaggctggtctcgaactcctggtgtcgtgattcccctcaccttggcctcccaaagtgctgggattacaggtgtgagccaccgtgcctggcctctgattggtcatttagctgatttagtcaagaaacttttggtttgaagtggcaagccccaattcaaattaatgtaaagaaaaaatgaagctttggggtttaggtaactggaaggttcaagggggacggattcaggcctggctggatcgagagctccagtggggtctttggacactggttctttcaccccgtctctaggctgtgccttcctttgggttgccttcgtcctcaggtaccttatccacgaagatggacgatggctgccctgggctgaccttctacccacttagcaataccaacaggaagagcaaatctgtttcccaatcatttcagcagatgtcccagggatggctcaccctggacagaaagtgagtcacatacgcatccctgaactttggccagaggggtgggatacactgattcatgaagtctaggtcttacgcccaccgctggttcccgggatgcagggacttggctgggagtataggagggatgggtcacctaaggaaacctggcatgttgctctcagaagctcaggggatggaagctgggcagtaaaaatgccaacagctgtccactctgctggccctagtggcttagttgatgctgatcttggcacggtcttgtcaacttggctggtggctgcagctgctggtaccctcccagacgcaaggaggcttccttctgccttggctggatgaggtgtgctttcttcttcacggatgcagctcgcgggatccccaagcctttggtagtaaacacacttcctgggctgtcttttctctgagtccattctgaacatcaaagcattcagcctgtgaccgcgctggacctggtctgagaggacagcctggctttgctcggggttggctctcggctctgggattggataatgtgtccccttcctgttttgcttatgctttgtggcacccagctgccctccaccccagcaggtccggattccttgaatacagattgcccctccttccagacgtctggccagtggatgcttttggttacgaggccctggctgagagaagggctggctctctgctatccatccccctggtggagggccaggcccagaggaagtctcagaggtcttagagataggcacctctagatggcaaaaacacgactgcagaagggcagaggagcggcctcaggaaaaacccagggggatatatgatcttgaacgtacatggtgtcgaaactgcggcccttggctttcccatgtgtgaaatgcgactaagactaatgaaagtcttttatgtgtgtaggcaaaaatcttatttagcaattcctctaccaggtgcaatttttttttttttttttttgagatggagtcttgctctgtcacccaggctggagtgcagtggcacgatctcagctcagtgcaagctccacctcccaggttcaagctattctcttgcctcagcctctcgagtagctgggattacaggcatgtgccactacgcctgtctaatttctgtattttttagtagagacagggtctcaccatgttggccaggctggtctcgaactcctgacctcaggtgatctgcctgccttggcctcccaaaattctgggattacaggtgtgagccactgtgcccggccagaacagatagtgtttaattccactttgtctgtgtctgtttgagctgctatcacaaaataccatagactgagtggcttaaaccaacatttacttctcccacttctggaagctggaaagtccaagttcagggtactggcagatggggtgtctcatgagggctcaaatcctgcatcacagacaaccgtcttctcgccatgttctcacatagcgaaggggcaagggagctctcaggggcctcttttccaaggcactgattccattcatgagggcttcactcctcctgacccaatcacctcccaaaggcccctcttcctcataccacggcagtgttagttaggatttcaacacagaaattttaaggggtgcacaaatatagtctatagtctatctactcttatagtgtatagtatgcttatatgaggcacctagaataggcaaattcctaggggcagaaagtagaatagaggttgccaggtgttggagggaaagagaatttttgttgaatgtgtacaaagttcctgttcgggatgatgataaagttctggaaatggacaatggggttagttgtacaacgatgtaaatgccactgaattgcaaacttaaaaaggggtaaaatgatgaaaaaaaaaaaacctaaacaaactttatgcaaaaccttaatatgtacaatagaaaaagcgttcctctggttgaagatggggtgggctggctggtggttctcgcctggtctctgtgaatgctcagctgagttgggaaccaaagtgccttggggactccagggaagcagcagccctcccttccccaacagcccacgttctgaagttgaaggtccctcagggctctgtcctgcccaagctcacacccccactgagggtcacgtgttgctggggaaggtcaggtcccgggagcaggtgcgggcagcgctgggccaccttctgcgagctcccttctcatcctgacatttccctttcctgcagtcttgggctcatggccagccgtcagccagcaccctgtggcgctctcctaggaggctgatctggtgagcggggacgtatagggggtcagcaagtggcccaggtggaacgtggctccgggccacgtgagtggagggcttgagttttgtgaccacaatgtggatgccctctgtgacctgctggcctgctttgagatgggcagcagctactccagggtgcgttgacctgcagagcaggcctcaggggtgggaatctgtatggcccctgaccccggcatggcctcagaaccttcctcagagtgcactctgtgctgctgcttgacaatctttttttttttttttggagatggagtctcgcactgtcacccgggctggaatgcaatggtgcaatctcggctcactgtaacctccctcccaagttcaagtgattctccttgccttagcctcccgagtagctgggattacaggcgcccaccaccacacctggctaatttttttgtatttttagtaaatacggggttttactatgttggccaggctggtctcaaactcttgacctcgtgatctgcctgcctcgtcctcccaaagtgctgggattacaggcatgagccaccgtgccctgcctgacaatctggtttttgaaagaaatgtttattatattttaaaaatccttgttccttgcagaaaatttggaaaacacagaaaagcacaaggattaaaataaaaatcaccttcagtcccacaagggagactgtagagatattaacgtttaatattttttttgtggtcttttttttctatgcaaaagcacaccctttcacgtaatatacttacatctgcatctacgtctgtttctctgtattgtaacaaaggcgggattatactttaggtacagtacattagtcaagacccttggtggcaagtgacagaggcccatcttgaattagccaaacaaaataagggggtttattggctggggtaacccatctgtggaaagggttgggcctcagaaacagctggatccaggggcattggcagaactcctctctgtctcgtcactgtgtctctttgtgttggcttcattctcttgggccatctgtctccatgatgttggatccatggttgtagatccttgtgggctaaacgtttcattttattttattattactattattcttttgagacagagtttcactcttgtcacccaggctggagtgcagtggtgcgatcttggcttactgcaacctccgcctcctgggttcaagtgattctcctgcctctgcttcccaagtagctggaattccaggcatgcgccgccacacctggctaatttttgtatttttaatagagacgaggtttcaccatgttggccaggctggtcttgaactcctgacctcaggtgatccacccacctcggcctcccacagtgctgggattacaggcatgagccactgcgcccagccaagggctaaacattttaatggctgaatttcccccagagaggaaggaaagctcctttccaacagctctggttagatacattccagggaggagttctgattggcctggattgtgtgtccatctcagtccctatgtgcaggggtgggagcggggagccatgattggcccagggagagtcaggggcgcactctggtcagagtggtgttgtgttacaagagtcctgtccagcgggagaggggcagttccctaaagcagaggtggggagcttcattacagaggagggagaggcaacagcggtagggccagcaaacaccatagacaaaagctgctttggagttggtgccagccacgggggtgccagcacggcgtgttgggtgagcacgtggaccctcaccttcatgctgatttcattggggttcaattggtaccatcccatgggcagtacagtttggcagtagctgtctccattatccatgctatcctccttgacccagtgagccacctctggggatctgtcagatgtgcatctttccacacacgtggaatgacgtagaatgaggtcattcacggcaatattatttgaaatagcaaaacactggaaacaaccaaatccctattcatagtgaactggctgcctaaattatttcacattcataccatggactaactacttaaaatagaatgatgaggccaggcgtggtggctcacgcctggaatctcagcgcttttggaggctgaggtgggtgaatcacctgaggccaggaattcgagaccagactagccaacatggtctctactaaaaatacaaaaattagctgggtgtggtgatgcacgcctgtaatcccagctactcgggaggctgaggcaggagaatcgcttgaacccagaaggtggaggttgcagtaagctgagattgcaccattgcactccagcttggatgacagaatgagcctctgtctcaaaaaaaaaaaaaaaaaaaaaggtgaagctgtctgtgtaactgcatcagcctaaaatgagtgacagaaagacgagttctccaaaacaaagagtttctttgggaatagcaaggggttgcaatctgaggtgtccatgctctgatggaccataggcacatccgaggggagtgggacaaggggaagcttttagaggaaaaagaaggtcatataagctgctttgaaacaaagaccgttggttacagaggcttatctcaggagggggcttttgttcttggtggtattggctgctgctaggagagggtcttcacagaagtggcttaactggaaagttccagcagggacagcccttcccggcagtttctgttacccgcagtcatgcgcgagggccttttcttcatggcttccttttgttagggtttgatgtaagccactccgtttttgatactgacaactttcacacttgatggaaagttctccctagatttttttttttacaaagacaaagttttgttctgtcacccaggctagagtgcagtggtgtgaacactgcagctttgacctcctgggctcaagggatcctcctgcctcagcctcctcacaggtgcacactaccatgcctggcaaagtttttgtagagactggatcccactttgttgcccaggcctggtctcaaactcttgggctcaagcgatcctccaacctcagcctcccaaaagtgggactctagtaaaaatacaaaaattagctgggtgcggtggtgggtgtctgtaatcccagctgcttgggaggctgaggcatgagaatcgcttgaacccgaggggcggaggttgcagtgagctgagattgcgccaccgcactccagcctaggggacagactgagactttgtctgaaaaaaaaaaaaacggaaaatagtacttcatctttgtgttgtgttggcttgtatttgcataaagaagctgcagtaggctgggtgcagtggctcatgtctgtaatcccagcactttgggaggctgaggtgggcagattgcttgagctcaggagttcgagaccagcctgggcaacatggtgaaaccctatctctaccaaaaatacaaaaaaaaaaaaaaaaaaaattagccggttggggcggggcatgcctgtggttccagctacttgggaggctgaggtgggaggatcgcctgagcccaggaggcggaggttgcaatgagctgagattttgccactgcactccagccagggtaatagaatgagaccctgtctcaaaaaaaaaaaaaaaaaaaaaaaaaaaaaaaaaaaaagcagcagcagctgcagaaaggtgtgtaaagatcatttcacaggctgaataagtggacagattgggacaaggataagacaaaataggccttctaataattttggcgtttgagccctgctaatgtattcctcattcaaaactcaacagaccagtttccttttggggtgatgaaaaagttatggaattagtggtggtggttacataacatcgtgaatgtacttaatgctactgaattgtatactttattatttatttatttatttatttttgagatggagttccagtcttgttgctcaggctggagtgcagtggcgcgatctcagctcactgcaacctccgcctcctgggtacaagtgattctcctgcctcagcctcccgagtagctgggattacaggcatgcgccaccacgcctggctaattctgtatttttggtagagacgcggtgggggggggcgggtttcaccatgttggccaggctggtcttgaactcccgacctcaggtgatccacccgtctcagcctcccaaagtgctgggattacaggcatgagccactgcacctggcctggctttctcattttctagctctctgactgtggacaagttacctgatttctcaaagaatcagtttctcatttgtaaagtgtggataataaaagagtctgtattctgcagattaaataagaggcataagattgagctctgtgcctggggaacaatgggtacaccctccctcccctttctcccctctgccaactggacatttgcatttaaatggggactcttgaagactaaaaacactctaaactccaagggaggaatggttggaatttcagaaaaattcatagctcttatctagggtaaggtctgggtcttttcctgtggagagttaagcttttaggtcctcctcacctgaggccccgggctgacggaggcattggaagcttgtaaaagtcagggctgagatgacctatctacaaagagcatttctggcaccctcatttcaagcaggtattcagtgtatgtgcataagaatgacgtggagaggaaaggagaaagaggtggaaaagggggagggagaaaggacccgatcaaggtcaacagcctgaaccagtcagaggcctcagcctggggctggattctggaggaaatgagacggtaggtgctacatcacccatggaaacaaaggagcagccacccagccaggaaaagccccaaacccttgaaaccccacgtttagcttgcgagctctctgctctcctgtatagcagaagttcttgaagttctgcctctgcttctcaccaatgcccagcagccactctggttctggacccggtggtcaccctctgccctcagtttggcatccctcacacagcctcatactcgcttctcaaaaggctgtctccattttgctcatgactgtcgacctagagaaagaaacagagagaaaattaatatagagagtttgctcgggccaaagttgaggacagctgccagggacgcttcaaaattaccttggggacggcgcccttcgacatttgttaaaagcaagtttttgttttgttttgtttcttgagatgtagccttgctcttgacgcccaggctagagtgcaatggtgcgatctcggctcactgcaacccctgcctcccgggttcaagcaattctcctgcctcagtctccggagtagctgagattacaggcgtgcaccaccacgcctggtgaatttttgtgtttttagtagagatgggatcttgccatgttggccaggctggtctcgaactcctgacctcaggtggtctgcctgcctcggcctcccaaagtgctgggattacaggcatgagccactgcacccggccacaagcaggtttgtaaaggcaaaggggacagggagtggggtgatatgaagttgttggatgggcattctaactggttacaggggtaacattggctgtgcgttgttgagctctagggtctgagtgatggcgtccagtgtatggctatgtggcatcagttagtttagggctcatgtagcaagtggcttcaagaagtgattacttagctcatggagcgggtgagagggaccgctgttgcttttcagtgcctctctgggcctgaccgtgacaggaggattgcatttctcagattcaacattgcctttttttctcacgacagtgaatgtcttgtcctcctggtttccctccgtctcgccgcctgtctgtctcatcctcctcctctgctggccttccacctgctgtcgtgcctgggccccttcctcttctctgtctcccttggtgatctccgcttggacatccgatagttcttccaagctgaacgtgtcccaactccaggtcttcattcttgccccgccaaagtcatccttcctgtagccttccccagcttgacttctctgcattgttttttgtttgtttgtttgtttttttttttgagatggaatctggctctgtcgcccaggctggagtgcaatgatgcgatctcggctcaccacaatctccgccccccgggttcacgccattctcctgcctcagcctcccgagtggctgggactacaggcacccgcccccacgcccggctaattttttgtatttttagtagagacggggtttcaccgtgttagccaggatggtcttgatctcctgaccttgtgagctgcctgcctcggcctctcaaagtgctgggattacaggcatgagccaccgcgcctggctacattgtttttatagatgaaaagagtccaactctgtaaaatattcgaagagatttattctgagccaaataagagtgaccaatgtagccccaggagatcccgagaacaagtgcccaaggtggttgggctacaggtggttttatacattttagggagacgtgagacatcagtccatccatgtaagatgtccattggtttggtctggaaggttaggacaaccagaatcgggggttttggagggtccataggtggattcaaagattttctgattggcagttcattgagtgagtttatctaaagacctggaatccatagaaaggaatgtcagggttaagataagcagccgtggagaccaaggtttcatcatgcgggtgacgcctccaggtagcaggtttccgagagatgagatagcaaatgtttcttatagacctggagtctgttctatgagtctttaggtccctgtgctgatgttgatgctggtcagctggggctgaattccaaaggcgaggagagcataaggaggcatgtccgaccaccccttcccatcatggcctgaaccagtttttctggctaactttggaatgcccttggctgaggggaagggtcatcagttggttgggggccttagaatgttatttttggtttacgttcttttttttttttttttttcttgagacggagttttgctctgttgccaggctggagtgcagtggcgtgatcttggctcaccgcaacctccacctcccgggttcaagcgattctcctgcctcagcctcccgagtagctgggactacaggcatgcgctgccacacccagctaatttttgtatttttagtagagacggggtttctccatgttgctcaggctggtctcgaactcctgacctcaggtgatgcacccgcctcagcctcccaaagtgctggaattacaggcgtgagccactgtgcccagccttggtttatgttcttattccccatgtccacttgtcagcatgctctgttgctgcctccatgatgcatccagagacggatcatatctcccatctccaccacggtcttttgaggccagtccatcatcagctgtcacctggattattgaggaacctttcagccagcctccctgcggccatgtttttccccttacagtccgtcctccgtaaggcagccagagtgatcctgtgaaactgtgggacacatcacatctctgctctgctcacaaatctccctgcctggccgggtgtggtggctcacacctgtaatcccagcactttgggaggccaaagcgcgtggatcacctgaggtcaggagttcaagaccagcctggccaacatggtgaaaccccatctctactaaaaaaacacaaaaaattaactgggtatggtggcgggcacctgtaatcccagctattcaggaggctgaggcatgaggattgcttgaacctgggaggtggaggttgcagtgaactgagattgcgccactgtacttcagcctgggtgacagagaattaaatgaatgcctgaaatttggttttagtgaatgaatgcttgaaatttggttctcatggtgagggtgacaggaagccatttcaaggccttagatagggggctcatatgatcaggttgacattttggaaggtccctgtagctcctgggggagacagtttgggagtgggaccagagtgggatcctggagattggctgggaaggtgtcagtggcttggagatgatggtggagggggattggggtgcattgactgagctgagagacgtgtaggaggcagagtgaaaggcttgttgttagagctgtgcttaatacactttcatggacacacgcgttacctggcatcctctggaaatgcagatgcgtaaaggtgggtctgggctgggtcctggagtctgcttttgggtgacattatgttgccggccggggacacacttagagtagcaaggggttgggtgtcaggcataagggaaggggagtcaggaacacattgtgcctttaattgcaagagaacctaggaggaggagcaggttgggggaaacgatgaggtcatttagggacacattgggttcgaggtgcctgtgagacccccccggggatgtggcatctggagctcagcccaggctggcggtggaaaatgaggagtcgtccttgggttggtgggtgcagccttggtgtgggtgaggctgagtgggagagggcatagggagggtggtcagagctgcggaagcccctgtctgtatgccgtatcgctgactcgaaaggtgcatcacctaggcaagggcgttggttaggtggtctaaccaccaccccttccgatcatggcttaggtggtctaaccaacacccttgatttagggcaggggtttctctcgctggttcctgctggttcatcagcctaactaaggaagggagcaggagcctctcccctgaaggaggcggcagcctgtgggcccatgagggaagccagccaaccctggctctctgcttctgatgcacctgtcccagtgggcctgtccggaagcatttgggtatccctgctgcccaggagccccacggtggactcaggcaaacctgggccccagagcccacttagccacttggtagctgcgtgagcacgcgcaaggtgctgcagcttgctgggccccggttttctcatccgtgtgatggggtaataatagtgccctcttcccgtgacggttgtgacgatcagtgagatggggtgtgtgacatgctgagcccggaggccggcgctggccagtgctcagtgaggttctgttatctctggagggtgtggcaaggtcaggatggacactggccttgcctcctccttcctgccctacccactgcatgcacctggcttggccccacctccaagcccttctttttttttttttttgagacagagtcttgctcttgtcactcagggtggagtgcagtggcgtgatctcagctcactgcaacctctgcctccccggttcaagtgattttcctgcctcggcctcccaagtatctagttttacaggcacccgccaccataactggctaatttttgtaaacttagtagagctggggtttcaccatgttggccaggctggtttcgaactactgacctcaagtgatccacccgcctcggcctccccaagtgttgggattacaggcgtgagccactgcgcccggccacaaagcccttcttacattgaaagtcccttggctgggcgtggcagctcatgcctgtcatcgcagcactttgagaggccaaggcgggcagatcacgagatcaggagttcaagaccagcctggccagcatggtgaaaccccgtctctactaaaaatacaaaaaatagctgggtatggtggtcggcgcctgtaatcccagctactcaggaggctgagacaggagaattgtttgaacccgggaggcagaggttgcagtgagctgagatcgcaccatggcactccagcctgggcgacagggcgagactccatctcaaaaaaaaaaaaaagaaagtccctgcttcctgttgggtcctcctccttgccttgagccctctccctccattcagatccatccccactgatgtctcctgctcgtctcttgtccattacttttttcctcctgagccctactgtaatgcttggagagtttggggggctggtgagggcaggatcatctgctgtctgttcatgtctcccaagagaccgcagggtccttcaggctgggtgggtgctgaatatccaatggggaccaggtaggcctgattcctgccctcctggagctcaccgtccagcgggaaggacaggcatcagactgatcgtgacaactgaggggctgggagcagggggctgggagcagggtgccgtggtggcagagagcacggggactgatggatgacatcggaagggagggacattcaggcagagacctggaggatgattaggatacaggaagacgaaggcttgggggggatgggagtgtgggtgagagaagggtctagacagagggagtagtgtgagtgggagggctcatcacaggaacccacaggctgtgtagaccggttggggcaggtgtggagaggaagtgagaggggtgggagatgaggctgggtggggccgttgggacaagggggtgcggagagttgggtttgagccacatggtcatgggagccatggaaggaggacagaataatccacctcacatttatttttcaccttcttcttttttttttttttttattgtggtaaaatacacatcacacacagtgtctcacttgaatcattttaaagtatacggttccgtggcatcaagtcctgttcacagtgttttgggatcctcactaccattctccagaccatgttcatcatccagatggaaactgtatccattagccgtcactcccacccccgcctcccccatcccgaagcaactaccatctactttctgtctctatggatttgcctcttctgagcatttcataatgcaggttgggtgtgtcttatctgacatgcttgggaccagatttcatattttttttggattttgctgtatttccattgtacttagtggttcaacatccctactctgaaaattcaaaatctgaaatgtgccgaggtcaggcacggtggctcacgcctggaatcccagcactttgggaggccgaggcgggtggatcatttgaggtcaggagttcgagaccagcctgtccaacatggtgaagccccatctctactaaaaatacaaaaattagccatgtgtggtgatacatgtctgtaacccagcactttgggaggccgaggcaggtggctcatttgtggtcaggagttcaagaccagcctggccaacatggtgaagccccatctctactaaaaatgcaaaaattagctgggcatggtggtgcacgcctgtaatcccagctactcgggaggctgaggcaggaggattgcttgaacctgggaggcagaggctggagtgagccgagatcgtgccactgcactccagcctgggggacagagtgagactctgcctcaaaaaaaaaaaaaagaaaaaatgtgccagtgagcatttcctttgagcaccatgttggcactgaaaaagtttaggatttgggagcattttggatttcagctttttggatttgggatgctcagtgtgtagatggaatcacacagtaggtggtggtctgtgtgtggcttcttccacttagccagcattcatccacattgtagcacgaatccgtaacggcacttcattccttttcagggttgaataatgttcctttgtgttggtgtgccacgttttgtttatccactcattcgttcatggacatttgtgtttctttcacctgtgatcattgtgaatagtgttgctatgaacacttgtgtacatgtttttgtttggaaatgttttctggagtggaattgctgggtcatatggtaattgtttgtgtaactttttgaggagcgtccacacttttcaacaatgggctacagtttctctgcattcttgataacgtttattgttatctgtttttttgcttttttctttttttctcgatgatggccatcctagtgggtgtgatctgcttttttttatttgtttgtttttgagacggagtctcgctatgtcgcccaagctggagtgcagtggcgcaatctcggctcactgcaacctctgtctcccgggttcacgccattctcctgcctcagcctcccgagtagctgggactacaggtgcctgccaccacgcctggctaattttttgtatttttagtagaggtggggtttcactgtgttagccaggatggcctcgatctcctgacctcgtgatccacttgcctcagtttctcaaagtgctgggattacaggcatgagccactgtgcctggcctttttttttttttttttttaattttgagatgtagtctcactcttttgcccaggctagagtgcagtggtgcgttcttggctcactgcagcctccacctcctgggttcaagcaattctcctgcctcagcctcctgagtagctgggattacaggtgtgcaccaccacgcccagctaatttttttttttttttggcatagagtcttactcttgtcccccagggtggagtgcagtggcacaatctcaactcactgcagcctccacctcccaggttcaagtgattctcctgccttggcctcccaagtagctggggttacaggcacgcgccaccacgcccggctaatttttgcatttttagtagagacggggtttcgccacgttggccaggctggtctccatctcttgacgtcatgatccacccaccctggcctcccaaagtgctgggattacaggcatgcgccaccacgcctggctaatttttgcatttttagtagagatggggtttcgccacgttggccaggatggttgattggcttttcatttcagcatggtccctgtgtctccttcctggagaatgggttgctcagtgcagtggctggagatgggctgggatgcgggtgccgttgtctaggtgagagatcatgcttcggggtggagtgatggaacagttagggaggtggcgaggactttgtgataccatggaggccacgggtgagggaagtagggactcaaacgtgactgattcgtgtcatgtccccagcggctagcgctatgctggcacaccgtcggtgctttacagatactcgcggaatgaatgtcagatccccaagaagaaatgggaacctggaagttcttggtgctctttctgaaggcccctcccctgtgggccccctgatggtcctgggcttgggcagcccctcttctgagggaggctgcggggttgtcttggtcggggttatgtgaaggtggggtgggcagcagagcagcttccaggggctacctccatcttctctgtgttcaagctccacagcccccaggagaccacgtgggtggtgctggggagctggagaggatggtcttttgggaggggcgcatttgagggctgcactgtgagctctgagggggcagcaaagcctttcctgagctccccaaggctggtgtgaaagcactttctgtctgcaggtcggtgtcccagcccagggacgctcctccattcttggcatttctctcggggttctgggagggtccagaaaggcctcgcccagcctttgcggttccctttcctctggcttccactccacgtgctgccctgctctcggcaccttccccagccgggcagccttttaacggatggattttggccttgatggagagggaagcgccttcgatctaaaagcttccaaaagcttctctctccacccttctgtctttcctctctctctccctcattttctcctctcctgttttctttttttttcctcacctgtgttctgtaaatctgtaaaacaaacacactttaaaaatgtcacttgtctcttctatctgcggcctagagtggggtaaagctgttacctcccttgggagtcggcttttgagctctgggcatgagtcagccctgttcctgatggccgcaggatgattggcagagaatcccagggtggctgcctcatggcctggggcctcgccagctggggcttcaaggctgtgacccagatagggaggtgggtgaccctttctgcctattccctgctcaccttctggtccagggagggacccagaatggacaggcaggggcctaggactttagccaaccttcgagcaacagcaaaaactctagacaggcccctgtggttacccacgtcagtgtgaactgtgggctcctgtcagccttcacctccgcctcctctctctccagggagagcaggtgtgtcctttctgggccagtcgggaatctcttgttcagcactgttggaggtgtgggggatgcatggggcacagggtgtggtctccagaaacttctagtgtgcattgcaagtgagaagcatcctcttacgccaggactctgattgggcagggaatactcagcgtactcaattccaggctttgctatggggctgagagaacgctcgctgtggggtgcagtggggctgcagtggccctttcattcattctttgcttcttcaatcactccttcactctgtatgtgaatgggcgagacgggtcggacacagctcttggagtcagagttcttgagttgttttttttttttttttttgagacagaatctcgctctgttgcccaggctggagtgcagtggtgcagtctcggctcactgtaaccttcgcctccccggttcaagcgattctcctgcctcagcctcccaagtagctgggactacaggcgtgcaccactatgcctggctaatatttgtatttttagtggaaaagggggtttcaccatgttgcccaggctggtctcaaactcctgacctcaggtgatccgcctgcctcggcctcccaaaatcctgggattacaggtgtgagccactgcgcccagcctagcgttcttgaatttgaattctgtttcttccactgactagctgtgttcctgttagcaagtcattcagcctttcccaagcctcagccgactcatctatatataagatgaaaacatcactccttgtcctgatcttcctcacggaactgtgcttggcagaggaagtaatcatacgcgtcacagcaaattatgacacaagtgtaaagtctttctgcgaacagatactttttgagggccttcagggtaggaatgctgcccttgaccctgtgggctacatggagatggtcaagacagtccctgtcctcatagccgttacggcctggcaggccaaataggcacatttcttttatttctttctttttttttttttttttttttttgagatggagtctcgctctgtcgcccaggctggagtacagtggcacgatctcggctcactgcaagctccgcctcccaggttcaagtgattcttctgcctcagcctccccagtagttggattacaggcacccgccaccacgcctgactaattttttgtatttctggtagagatggggtttccccatgttggccaggctggtctcgaactcctgacctcgtgatccacccgcctcggcctcccaaagtgctgggattacaggcgtgagccaccgcgcccggcagatagacacacgtcttggcagatccggctggaaggttctcagcatgctttctcatggggcactgatgcaacagagcccctgagcacctcagttcatccagcacatagtccctgcatgtccacaggagccaggagctgttcagaggctagatcggtgggcttggagtacgttggaggtgagcaatggtgaggcccggctacccccaccaagtctcgcagctgcaaccagctcctccagcaggaagagcctctgtgttctctccctttggcagctcctcgcatcccaccacgtacactcagttctgggtctaggggctgaagcagtgccttttcacttgggtgattttctggctggcctaggaatggcctcttcctgtcaccatttggttgagccaactggggcagggagaggatctgggaaggggagacagagatcctgaagagggccccttaattctcagtggctccagctgcctggcgaggccaccctcatgcctcctggggagaatatcgccgtgtctgtggatagtcccttccagcattattgacattgatgcatcatcttgtcacttaggtgaccagggcagctggaaatgattcggcaggaaggccgaaatgccggccttttctcagccctgattccctgtggcaggtgctgggtttgccccctggggcctcctgctctgggttgagatgtcgcatgagaagagcagaaggcagatgcggcagggccttccccacaccccgtccactttactagatgcctctggactctgaattttttttcccaatgaatatgtatttatgtgtgtgtgtgtgtgtgtgtgtgtgtatatatatatttttttttttttttttttgagccggagtctcgctgtgtcccccaggctggagtgcagtggtgcgatctcagctcactgcaacctccgcctcccagatttaagcgattcttttgcctcagcctctcgagtagctggtactacaggcacacgccaccacgcccagctaatttttgtatttttagtagagatgaggttccaccacgttatccaggctggtctcgaacttctgacctcaggtgatccacctgtcctggcctcccaaagtactgggattacaggtgtgagccaccgtgcccggccatatgtatttatatttacaataaaaatttaaaaatcagaaaacagaatgatagtcagtggtgccctttgtaacaatccaagaatgggttattggtatttaacaggatacttttgtaggcatttagcgaagcaaaaataactttctcttagaaaaacataacgcctgtctcaggcgctttcccacgcagctttgcttgtggacttcaggtttgtctaggtgggtgtttgcacggcccttgaactacccattccccagcagacggcttgatgaatgagcccagtggctcagcacaccagagcggcaggggtcggggagtgggactgaggccgagggatccaaagcagcagtgcaacaggcaagtcatccagggattgcccctccgggtccctcagaatcccagctgtgccacttacttgctgcaggaccttccagaaatcacttaccgtctctgagcctcagtttcttcatctgcaaaatgggagaataattctgtatctaccacataggggtgttgaaaagattaaatgaaataacgtacataaagagtttagtatagtgctaagcaaatattagctgatatgatgatgatgacgaataatagtttttttttttttggagacaggatctcgctctgttgctcaggctggagtgcagtggcgcattgcactctgcctcctaggtccaagcgattctagtgcctcagcctcccgagtagctgggactacaggcatgcaccaacacgctcagctaatttttgtatttttagtagagacggggtttccccatattgcccaggctggtcttgaattcctggcctcaagggatctgcctgccttggcttcccaaagtgctactattacaggcatgagccaccgtacctggctgatgatgaagaatacttaccttttttttttttttaagatggagtttcgctcttgttgtccaagctggagtgcaatggcgtgatctcggctcactacaacctccacctcctgggttcaagcgattttcctgccttagcctcccgagtagctgggattacaggcacacgccactgcgcccagctaattttttgtatttttagtagaaatgggtttcaccatgttagccaggctggtctcgaactcctgacctaaggtgatctgcctgcctcagcctcccaaagtgctgggattacaggcgtgagccaccgcgcttggtttttttgttttttttttttgaaatggagtctctctctattgcccaggttggagtgcagtgatgcaatctcagctcactgcaacctatgcctcccgggttcaagcaatccccctgcctcagcctcccgagtacctgggactacaggtgcataccaccacactggcaaatctttgtacttttagtagagaaggggtttcaccatgttgggcaggctggtcttgaactcctgacctcaggtgatcctcctgcctcggcctcccaaagtgctgggattacaagtgtgaaccgctgcgcctggcctaactattatctctactatctgtgtccagacaagaagcccgaggccaggagcagaatcaatccccagggaatagcaggagcttggtaacagaccaaataggtggggaagtggttaactctgtctcagagtttttaaaaattttgcttttatcatgatcatgatttctaattgacacataataattatacctattttgggggtacagtgtgatattttgatatgtgtatacaatgtgtaatcatcaaatcaaggtaattagcatatctgtcacctcaaacgttgatcatttctttgtattgggaacgttcaaaatctgctcttctggctatttgaaaatatacaataaattgttaattatggtcaccctacaaggctacagaatactagaaatgattcctcctttcggtacttttgtatccctgccaacctctccctaacccctctctttcctgcccttctcagcctctgctgaccactattctgctttctacttctgtgagatcaacttttttagcttctacgtttgcatgagaacccacagtgtgtgtgtttctgtgcctggcttatttcacttcccataatgtcctccagttttatgcatgtcgccacgaatgacgggatttggttctttttttatggctggatagtatcgtgcatatataccaccttttctttttctttttttttttttttttggagacggagtcttgctttgtcaccaggctggagcgtattggtgcgatctcagcttgctgcaacctccgcctcccgggttcaagtgattctccggcctcagcctcccaagtagttgggactacagtgtacaccaccacgcccagctaattttttttttttttttttgtattttagcagaggtggggtttcaccatgttgcccaggctggtcttgaactcctgagctcaggcgatctgcccgccttggcctcccaaagtgtaggattacaggtgtgagccaccgtgcctggcctataccaccttttctttgtacattcttctgtttatagactcaggttcattccacacctgggctgttgtgagcagtaaacacaggagtgcagatggctcttcaacaggctgactgcctttccctcagatatgtaccctgcagtgggatcgctgggtcatgtggttgttctgtttctagtgttttgaggaccctccgtgctgtgttccatagtggctgtgctcacttacgttcccaccaatcgtgtctcaggctcttgagcagggagatgaggtcaaccaaagcactgatgaaccaaattgcagtggtgatgagccgggtgccagctcagccgagtcctccacctcttggggtctatgagctccccatgtgttacacatttttgagttcattcagtgccaggccctgtgctggggcaggccagtggtcagggtgcgtgttagagcccagccagaggcctctgttctctctgggtcagaggtaggcttggccgggggagtgagtttctgctcatcacgtggagatcttgatcacccagtggagctcccggcggctgagccctctttctgaactttccagccgtgaaatactgcaggggccatggccagattccagtatgcccctggaggctcttgcaggtatcttgtcctttcttttctaatgtcccagagaaagaggccagcactgggaggaggcaggaggtttgatcgatctgcgctggattttttttttttttttttttgagatggagtctcactctgtcgcccaggctggagtgcagtggcacgatctcagatcattgcaacctctgcctcccgggttcaagtgattctcctgcctcagcctccagagtagctgggactacaggcgcacgccaccacgcctggctaatttttatgtgtgtgtatatatatatatatatatatatatatttttttttttttttgtagagatgggttttccccattttggccaggtgggtcttgaactcctgacctcaagtgatccgcccgctttggcctcccaaagtgctgggattacaggtgtgagcccccgcactggcctgcgctgtgttctgtaggttgggttagagcatgctgttgagatgagatcccagccctggtccctgggagccaaatcactgatgcttggttgcatggccatgggtggaaccccttgttctggacactcgtcttccaggaatgtaccacggtcacaagcaagaaaggggaggaacgaggatgggccaggtgccctgtctcagtgctggaaaacagcttcatgcatttgtctttctaatgagtgagaataacattattatagtaattgaatagaccaggcagatttaccctgaaatgctgtagtctgtccccattgaaactgttatttagtttgaaccaatgatggaagctcctaatccattatgtcaccaagtaatcttattcagaagagttaagacttaagacacagtcttagagcggagtggagcagtggcttagctggaaggccggttggctctgtgatagggaaactttcagtgctcacagactgctgggggatttcttagcatggatggtttaacacgcctctgtgctgggcactgtgagacggggctccttttcttcttgggcttgccgggaattcagccaacacatgggaccccttattacacagtgtatcctcccagtagcaccagtttttggtccaattcaatggtcagtgtttactttttttttttttttttgagacagagtcttgctctgtcacccaggctggagtgcagtggcgcaatcttggctcactgcaagctccgcctcctgggttcacaccattctcctgtctcagcctcccgagtagctgggaccacaggcgcccgccaccacgcccggctaattttttgtgtttttagtagagacggggtttcactgtgttagtcaggatggtctcgatctcctgacctctagtgatctgcccacctcggcctcccaaagtgctgggattacaggcttgagccaccacgcccgaccaatgtttactttttatgactgtgtaaatgttattcattgttatgtgagagggtaccataattatgttttctttcttgtataacttttcatgtttcttggagttaatgattaactcctgtttctgccattagctttgttttctatggacctatctttctttttcttttttttttaatttttgagacagggtctcactctgtcacccaggctggagtgcagtgccacattcatggcttactacagtcttgacctccagggttcaagcgatccccctacctcagcttcccaaatagctgggaccatgggtgcttgccaccatgcctggctaatttttgtggagagacatggtctcactatattgcccaaactggtctcaaactcctgagctcaaccaatcctcccgccttggcctcccaaagtactgtaattacaggtgagagccactgtacctggcctatttttctacttttatttttttctaccacaattactttaatagatggcccctccctaccctcccccatctccgccaagcttgcatccatcagataacctgtcaattccattctttcccccaggagatctcacttccagagcccccccatcctctagtgatagtatcctcccaagaaagggtgcaagggtgtgaatttttttgagctcttgcatatttcagaatgtctttattggttgatagtttgcctgggtgtgaaattttaggttgaaaataattttctttgagaattttgagagttataacatcattgcctactagattccagagttgctgttgaaaagtctgatgatatgcagattcatatttcttttcttttttttttttttttttttttttttgagacagagtttcactctcgtctcccaggctggagtgtaatgatgtgatctcggctcactgcaacctctgcctcctcggttcaagcgattctcctgcttcagcctcccaagtagctgggactacagtcatgtgccaccatgcccggctaatttttgtatttttagtagagacggggtttcactatgttggccaggctggtctcggactcctgacctcaggtgatctgcctgtctcgacctcccaaagtgctgggatgacaggcgtgagccaccgcacccggcccagattcctatttctctgtatatggtatgtatttatattttctctctggtgtcactgagaatttttcatttgcccaggtgttctgaaatttcctgacagtgtttgggatggatcttgtgtctttactgtgctgtgtacttggtggacccagagactcaggaccttcagttctggaagatgttcttgtactatttccctgctaatctttctgttatggtgagacaacagccattttattatgctcaagttctgtgggtgaggaattcagctagggcgtgttggagatgatggcttctctctgctttcacaacgtctggggacctcatcttgggtggctcagatggctggagatgactgcgacggtccactggggctgtatgtccgggagctgggctgtgttctcatagcatctactggagctgagatgcccaaggtggtttcttcatgtgcatggactgggatgtttggagcatctgggcatctctctccatgtagcctctccatgttcccagctgcagcattgacagtctcagtcaggcctttcacgtgcaggcttgctttctctggagcaaatgttcctagaggtagaggtggaagctgtcctgtgactcattcctgaaagtgaggtaatgttacgtctgtctcattctgttggtcaagactgagtcacagggccagcccagattcaagaggggagcacacaaagccatcagcaccaagagatgccagctttggataccagctgccagctcccctcccctttctctttctgggaactttcttggtcggctatttgatcttttttctcttccctcttttgttttctgtatctttatgtttttgttctactttttgggagatttcctcaacttagtcttttcatcatatttctttttctctttttcttttttctttttttttgagatggagttttgctcttgttgcacaggctggagtgtagtagcgtgatcttggctcactgcaacctctgcctcccgggttcaagtgattctcctgcctcagcctcccaactagctgggattacaggcacccgccaccagctactagcccggctagtttttttattttttatttttagtagagacgtggtttctccatgttggccaggctggtctcgaactcctgacctcaggtgatctgcctgcctcagtctcccaaagtgctgggattacaggcgtgagccaccgcacccagcccccttactgttattttaatgggcttcagaagaagtgggataataaatgcgtgtggtcagtctgacaggttcatcctggaagtctcaacaggcttcagaatatctctatttatatctcctaaaggaagtgagggtacatagttatcactgctgaaacatgattttttattgtgataaatgttatacatccacactgaatgaatcataagatgaatgcgcctttcctcgccatccaggtgaagggcgtttacgggctgggaaaatgctgatagcccacaccttgtgactcccggcttttgtgagtggtttctgaagctgccggaggccgtgaccttgtgcgctggctgcctctgctctgaccatgacgctgctccccccatggaggccaggcagtgccaggcagagccgctgactgcgcccgggaggggaactgctctgtcggcagtttctgagtgacggagtgcgtttgaagggctgggtgcgtaggcacctggcttggtgatttcttcagcgcaggggaggtggagcctctgccaccccctgcttggcacgcgctcttccctgagcaccgcccttccagcccatcccagcaggctgccttctcacctctccttccctgccccttggagggctcctgttcatttttgctttatgaaagccggccaggcgctcatgtctgtgatcccagcactttgggaggccgaggtgggcagatcacctgaggtcaagggtttgagacgagcctggccaacatggcgaaaccccgtctcaactaaaaatacagaaaaaaaaaaaagttaggctgggcatggtggcccatgcctgcaatcccagcacccagcactttgggaggccaaggcaggcagatcacctgaggtcaagggtttgagaccagcttggccaacatggcaaaaaccccatctctactaaaaatacaaaacttagccaggcatggtggtaggcacctgtagtcccagctacttgggaggctgagacaggagaatcgcttgaacccaggaggcggagcttgcagtgagccaagatcgcgccactgctctccagactgggtgacagagcgagactccgtttcaaaaacaaacaaaaaaccccctaaaaccccaaagccctacatgctgtccctgagggcctccacccctcccgtggcctcagcttccacctctgttcttgttacacctgtctttctgcttaggttttagtgctgttctgatcccatttgggtgtcccaggggcccctggcttgccgtgcgtccagaaagagagccttatcatctgcctctcgcaaagcgactctcctcctccgtctgtatcacggctgaagcgtccgtcattctgttttctgaaacccaggttacttggtgtgtttagctctcggccccccctttactttctgtcaccaagtcctcttaattttgctcccgaaatgccttatgactctgaccctttcatgtcatttctgtggctgtgagcgcagtggagggcagcgcccctcggccccgtttcggtcttcccctggcccctcccttccagccgctccgttctctctctgctgcttgcagagtcctccagcaaagctctgcaggtcatgggcaccccgcctcgggccccttggcttccttcctttgccctcgagagagggttcagcatgcggcaccttttcccagcgtccgcacagcgccggcactgtttgtactgtgtgtgtgtcacctgtctcaggcccataatgttttccttcaagcggctcaggtgttacaacttcagtggacttgtttcagaaggcacctttacgtcactaccataaaaggaaaatcagggtggcctcccacaaagagggtctctgtcaaagctcagtaagtgactgttacagtgaagaccaccccaggtgccctcgggggcccgcggggaggcaggcgtccactctgggaagccgtgggccatgggatctcctccccagcgggccccttctcctcctcagaggcagtgtagcaccgtggtaaacgccacagaccctggggccaagcctgcgcccaagcctcactctgctcctttccagcaacatgatcttggtccgcttaacctctctgagcctcattttccctgctgtaaaaggggttaatactatttccttcagtggattgtggtattaaataagagagtgtacatggatcacttcacacagtgccctaacccttgaggcctgtttgctggcatttgcccttccccgctactttttttttgagacggggtcttgctctgttgcccaggctggagtgcagtggcgcgatctcggcttactgcaacctccgcctcccgggttcaagcaattctcctgcctcagcctcccgagtagctgggattacaggcgcctgccaccatgcctggctaattttttgtatttttagtagatatgaggcttcaccacattggccaggccggtctcaaactcctgacctctagtgatctgcctgcctcggcctcccaaagtgctgggattacatctgtgagccaccgcgcccggcctgccctccccttttgccagcctgctgtgccctcgaatggtgtgatgtgtctcctgggcattgcgacactggtggtctctccgtcatgctggtcacgttcctctgcgtcctgcttctgtgccctccccttccccgcttctcccgtaggtcactgctggcctcttctctaggcctagatcagccgttgcctcctgtgcgatcccgtagctggtctcccaaggagaaccagacctctcctccctgtgacctcatggcacttgattctgtatctcttgtttcaccccatgaccccacagtccatgtttggcactcgggtctttcaggtgggtgtgccgtgcctgcaggatggttttctgcattttgcccggatcattttctcagatgcttgtgaatcacacagacgtcgcctcccacgctgagacactacccttggtccccaagaactcaaaacacacaagaagacgtttggccactgtcccctcctcgctccctgctgtggtacttgggccaggtggagctggctttcccatggcagtgggaaggagcaccggaatgggagtcagagatctcagggttgaggtccagctctcgtattttctgactctgtgaccccaggctcacatagaactcggaatctctgctggcttgggtgtaaaccataaagcacgcatcagttctaaaagctgcttgtgcggtaaaggcttattttcccagggtgaggatttgcccatgtgggtagattggtccatcgctctgagatatgtgcacgagggggccccaggtgcccccaaccacagggctgtggaggggctgcagaggttctcccaggtggtctgcccgtagggtcctgttcctcccgcctcctgccctttttcctagccctggtgcagtttaggacttcaggtcctgtcctcatctaatgcacctggagggcagcaggagtgtcttctgaagctgcagcccgagtctggcccgggcctccccttgtgcccacgtgcagccacagggtcctgcgcagggtgtagcctgcagcagagactccagccggctcatctcctgcacagcctgggcctcctgctctctgtctgctctatgcaggggaccagtagccccctttgaccctctcccccttctgtcccctcacttgagggccttggcactttataaacgggtgtccaggccaggtgcgctggctcacgcctataatcccagcgctttgggaggctgaggcgggtagatcgcctgaggtcaggagttcgagaccagcctggccaacatagtgaaaccctgtctctaataaaaatacaaaaaattgtttgggcgtggtggcgcgtgcctgtaatccaagctgcttgggaggctgaggcaggagaattgccggaacccaggaggcggaggctgcagtgagccgagattgtgccattgcactccaacctgggcaacaagagtgaaactccgtctcaaaaccaaaaacaaacaaacaaaaaaatgggtgtccagaagccagttgtgcttcctgacacgttcctcctggagacttttttttttctttgagatggaatctcgctctgttgcccaggctggaatgcagtggcacgatcttggctcactgcaacctctgcctcctgggatcaagcaatttctggctaatttttgtattttgagtagagatggggtttcaccatgttggccaggctggtctcgaactcctgacctcaagtgatctgcccacctcagcctcccaaggtgctgggatgacaggcgtgagccaccatacccagcccctcctgagacttgctccccacttcccacaagcctgggccgaggtgatttggaagtggggcctcttccttggagaagagaagagaggctcactgtggggtttgggcggttccctcggctctccagcctccacgtgcttgtctgcataatgaggctgtcgggtggcatctggtgctttctcccacggctgctgctctctgcatccgtgaaccctgggattgaagtaggggtggggattgccattttgcaatttctgcggagtctttttttttttttttttgagacagggtctcgctctgtcccccaggctggagtgcagtggcatgattacggctcactgtagccttgatctcctaggctcaagtgatcctcccacctcagcctcctgaatagctaggactacaggcatgcacctggctcatttttaaattttttatggagatgggatttcaccatgttgcccaggttggtcttgaactcgtgggctcaagccatcctcctacctcagcctccaaagtgctgggattacaggtgtgagccacctcacccggccaacgggggagttttgaatcaccaaaggtctagagttggtgccccaaatctttggaatcctctcagagtatgtgctgggatgggctgtgaccccgaggtcagccctgccaggtaggaacaggtgcgcaacacctgctccttctcaagctacccattcactccacctgttggagccttttgttcctgaatccagtgtcctcttccctcccccacactctgccaggtctgctgggctcatgccctttctcccttccacactggccccagcacaggcatgagggtcatcagtgcccgcatctccatgtctgtccccttggggcttggaattgagccatgtgcatatacccggggcctggcggttcccacatggcagctgggctcccgtgtccctgtctcccagcttagcatccacagtatgtggggcagcgagtgcccagatctgaagatgtccctgcccccgtccacctctgccttctgatcagctttctgccttggcccctcctcctccgtgcccattcttcccgttgatttgagccttggcaacaaggcgaccagccatgtttttgcagcgtaccaggcactgtgctgagtgctttctgggccttcctcataacgccccatgaggcgaggagtagtcacaccgttttacagatgaggaagctgaggcatggagaggtgagataacctgaccacacagtgaatcaggagtggtgctggagtattgattagcaggagtattgattagcgattgcatcccgttcccctctccctgcagcccctggcaacctctcatcaccgttctgtctgtggatttgcctgttctgtggatttcatggaactggaatcacacagcatgtggccttttgtgcctggctcctgtcactcggcaccgtgcttcctaggtgcatccgtgttgtagcatgcatcagttcttcattccttttctttctattgtctttatagtcataagctatcagtttgtttttatttttattttattttattttattttgagacggagtctcactctgtcacccaggctggagtgcagtggagcgatctcggctcactgcaagctccgccttccgggagcttccgctattctcctgcctcagcctctcgagtagctgggactacaggtgctcgccaccacacctggctaattttttaaatattttttttagtagagacggggtttcaccatgttagccaggatggtctcgatctcctgacctcgtgatccgcctgccttggcttcccaaagtgctgggattacaggcgtcagccaccacagccagccacttatttttatttttttgaggtggagtctcgctctgtcacccgggctggagtgcagtggcacaatcttggctcactgcaacctctgtctcccaggttcaagtgattctcctgcctcagcctccttagtagctgggactacagacatgcgccatcatgcctggctaattttttgtatttttagtgagatggggtttcgccatgttagccaggttgttcttgaactcctgacctcaggtgatctgcctgcctcagcctcccaaagtgctgggattacaggcatgagccactgcccgtggtcctatttttatttttgaaaattaattatttttgcttcatttctttttatgggtgagcagtattccacagtatggaacaaccaaattttatttatctgttcgttggcggatggacacttggattgcttcccccttttggccattatgaatcatgtttcttgttccttttggtttggttttcccgagaagctctttgcagcccagctgtctgtattcctctagcttggctatttggaaagcaagagaaagcgtagctgagcgtgggtggatggctgggagcgggtgtggggaggggatgcaggaaaggggagtttcaggctttgggagaaccccgtgtggagggggccttacacctggccccagagccacctgctgctaggtgagtgtttttcctgtggttgattattaaccaacggttatgatcctgagagtagatccccaggctagaactggtgctcatttgagatgccagaaatgttttccaaggcatttaaacggccttggactcttgcttctgtctccacttggagaccacatcaacattttatgagttataatcatcatcatcatcatcatggtctacattgatatagaacttcatgttttatgtcacagctgttatttttttaaattaattaattcatttttttgagacggagtttcgctcttgttgcccaggctggagtgccatggtgagatctcggctcactgcaacctccccctcccaggttcaagcgattctcctgcctcagcctctcaagtagctgggattacaggcacccgccaccacgcctggctaatttttgtatttttagtagtgacagggtttcaccatgttggccaggctggtctcgaactcctgacctcaggtgatctgcccacttttgcctcccaaagtgctgggattacaggtgagagccacctctcccagccacagctattatttttaactccttggtactttattacccctatctttgcagatgaaggaaacaagacacaacgaggtaacttaaccaaggcctcacagctgggtagcaggcagagccaaacttgaacccaggaatcccttgattccaagtgtagggtgctctccatagcgatgtgtgagacatgacggttgcagtgacctcaagatggtctgaggcagagccctccgagggtggggaggcgaggagcctgcaggcctgggtgctgtcacaggggctccgccaggggtctgtctagctccgtctgggtgaatcatggcctttgacttctcagcttccactccaggcccctttgaccatttcctccagagatttgcatttggccaacgctggctaggacgcgtcctggtctccctgagcctccccatctgcccttggatctcctgtgcttctagggaggaaaagaatcccagagcagggaacctcagtgccatgtgagaaggggcagggcctccaggactcccccaggtggcagaggctctctgacctgcccttccagcctgcccttgccacccttctctttgaactgagtatgtaatcttcctcttctcttcctctggcttctctccatcctccttttcccttctctgctttccaagctgtccccatctccagcccctcctctcatgggtccttgtgggtccctgggtgggtctggggccccgcgtcgttagagttgcatgcgagtatggggctgggtcgcttgagggctgcggttttcaatctcagtgccatgacatgtggcaagatagatccctgtgggtcacaaagaagttgtcacctcggctaaggatttaccttttgcttctaattagagcacattcaaggttatcccttgatataatcacatcactttcacctcctcgtgtgtgatatgtttgcctgagtgggagaaaaagggataaaactgcatcaagcaccgcgtcacttaactctatcttatctcggtgccagctggtggctgggctgggctgtgcctggctgtccttgggagggtggctcatgtgtaaatgtcattgtcctggggcaggacaaggctgagcatagctgatcagagcaggggtggtgaggcagaagcaggatttcatcttcactgtttttggctctctaggccaaggctagaacctggggcctgggcactgcattcatttcctagggctgccattaccaaggacctcagatggcttaaagccgcagacatttattatttcagttctggaggccagaagtccaaaatcaaggtgtcagcagggcgacgctccctctgcaggctctagggaagaatccttcctcgcctcttctagcctctggcggggtcggcaagcctcagcatgcgttggcttgcagccgcatcactcctgtgtctgcctgagaacacggggcattctcactgtgtgtttcttcacattgttgccttcccttcttttttttttttttgagatggagtcttgctctgtcacccgagctggagtgcagtggcacgatctcagctcactgcaacctccacctcttgggttcaagcgattctcttgcctcagcctcccaagtagctcggatgacaggcacacgccaccatgcctggctaatttttgtatttttagtagagacggggtttcgccacgttgaacaggctggtttggaactcctgacctcaagtgatccacccccgtctcagcctcccaaaatggtgggattacaggcatgagccaccgctctgggcccagttcagatgtttttgagggtggcagtcatgccttctgcccaccctggcaccccctctggagtcctggacacagcgctggagcttgcatgaggctggtcaccactggtgctcatgtctgctctagcgccttccaagctcccaggcatcatttgggaaatccttctggtcagaagctgccatgtgctccgacttgagagtctgcctcgcttcctagagaccggccccaggagcttatccagtgtccagtagagaccggccccaggagcttatccagcatccagggggaaaaggcaggggagaggggctcagctcagggagtgttggatgctgcgcccttttgaccgggactcagggccttgaacaataatcatatgtgccctggtgccatgagcgtggacaccttgtgcctgatggggaaaaatagacagcatgactgtgtgtatgagcgtccagtgaccggtgatgttaaaaccagctctgtcctcctctggactgtgtgtttctggagagccagggctgctgtccatcaaggtgcctgcgagccatctccagaggccctctgctaagcccagagtcgccctatagcatctggtgggggcttgttttacttcccctccctgcgtgcttttccttgctgggctcctagccttacaggggagcagctgtcattctcaccatgggcccgaagaggacctgagggtgatgccctcctgcttgatcattcttcctttcccccatcatggctcttaaaggccaggcccattgaggaggagctgtggctgcttgggagagggccaggtggaggaggcggtgagcctgtgctggacccagctctgttgtgcacacaggcaggtgagtgtctggcagagcagccagactggagcctacggtggtaatgtccaaggccgtacatagaaggaggctggcagctctagctgagaggtagcaggagctggtgcctgcttttgtgtgtgtgtgagagtgtgtgcacacacctaggagctatctcagccctgctggtttcttgagccagttacagcctggatcaggcgggagagtcccccctctccagccatcaaaacttacatcaacaaggtccaggaagaaagaaagaggaagggagatggggagcaggagacagggattgccaggttcaggttaatggggtggaatggattctctgccaagccaggtagtccccaggcccctgatgtggctccctagttggccacagggagggctggctggtcaactgcaggggcaggcaggggtacacatgacccaggcctagcctggaagtgttctcagcctggtcctgctccgtgggctcagggagccaggcaggatggggtctgggcctggaaacctggagggctgggctctgtagggagggtgggtttctgtcatgaagaaggtgtggggttggaactgtcgcttcgctggcaggacttgggctgggaagaggggcagaaggattctctggaggtggcagtgggggtgctttgatcatttacgcaggacctgggggttgggctgactctctctgctgcttcagagcggggctgtagaggaggacacacttgtaaagttgggggctttgacggctcagcccggccctcttcggcttttaatacggttctcccagccccctcgtcccctcctgggtacagccagagcttgttcaggacactggagtccctcacccgggaattccccaggctctgcccagctggccctgttgtgcagccgtggctctgaaggctgatcccatgccaaaccgtctgcttggtgatgggaccgcacacagcactccccggtcaccagcgagggccagatggaaagtggggagtgtgtgagcgcggcaaacttgtcgcagtcatgttgccatggtgacacaactctgtttagctgcctctctaccgtcctagcccacatggactaagttaagttttacctgcggttgcacggcaggcagccctgtctcccgaggacagctttttgaccagggcctgtgtgtgtgtgtgtgtgtgtgtgtgtgtgtgtgtgtgtacgtgcagaggggctcaagggagaatgaatccgcgtttctcccctcctcttctcacacccagccccagtcctggatctctttagccccgtggttctcagactttgccgtgtagcagaatgacctggagagctcgttggagcgcaggttcctgggctcatcactggagagcctggtgtgcacctgcaaatgtgcatgtctttcgagttcccaggtgccgctggtggtccagggaccatacttagagtagcactgctttagattttggtgcattggagtaaagaaaatgctcccaattctggtttctgcattgtatttttttttttaattggaaacggagtttcattcttgttgcccaggctggagtgcagtggcgccatcttggctcactgcaacctccacctcccaggttcaagtgattctcctgcctcagtctctctagtagctgggactacaggcgtgcaccaccacgcccagctaattttttgtatttttagtagagatggggtttcaccatgttggtcaggctggtcttgaactcctgacctcaggtgatccgtctgcctcggcctcccaaagtgctgggattactggcgtgagccacccaacccagcctgcattgtatgttaaactgtgtccgagagcccagtcactcttggaggagagaagggaaggcgcaggcaggtcctcactcacctcttttggcctcttcacaggaagcaggagctggccaacagctcggatgcgaccctcccagaccggccgctctcccctcctctcacggcacctcccaccatgaaggtaagaggcttcgattcaggaaggcagggaggggagagtgtggggaagttgtgaggccttgctgtggctttggctccaggcccagcagcgtccgtcgcagtggggctgtggagtgtcctgacacctcggaggaggtgatgttcagttaagcaccagtgcgggggaagcatgacaagagactcagggtgtctgtgtcaaggggcggtgaggacattggggttgaaatggggttggcaggactcttggtaattggtagtggagtttgggaacaaggggcccagccaggaggaagccgggggatagaaggcagctgcccagaaggactgcctggggctgggctgtggccctcctgggacttgaagggcatttgcatgctggtctgccggcctctggctggcccttctgagctgggcctgttcacggcagtccccatggaagggttggctggaggttcgggtcggggtggcagttattttcttatcagcacttccttcgtgagcctttttcctggggagaccacagtccaggctgctaggcccaggaccttctcactcctggacgggagccgagggagcagtgcccttctgccaccatgaccttcccccatcacttttcagtccgacgcctcggcaggatggccacacaggcctgagctggtcctcagaggagacttttggctcagccagtgtttctgcataggctggcatgcacgctctccctccctccctccctgcctccctccttccttcacactctgtggagtgagtgaggactagtgctgaagaagtcacctgcctcctgagtcatctgaggggacatctaggccagctcctctctgtcctggggctgtgctctgagtggctcacagggagatcatcaggcatctcttcctcactgctctgcatcacccctcctcttccctgaacctaatcttttgcaagatgacaacccataggaagcagataaaacccatccatcttcctgttgttgtcctgtatccgatacccatcacatacagagccatgtggtatgcctcgaggagcctgtgtgttgaggggtagccagagcctgccctgggtgggttaagtggtcagcggtgggcgggggggcaggacagggtgcagggctgaccaaggagagctgtgctgtcttccttgtgcagtacccagagggcagtggaagccagaccaccttcactagcctagtgcctgccccagcacccagctcagtgttggtatctgagccgggtgctgggccagctctttgcacagggtaatgctaagaagcctgtcaccattccgagtgtccccttggtctacaaaggtggctgtgggatgcttgtctctgtcctcacagatggcaggagtttgcagggagaagtctgacagtctcctaggaggagtccctgaattctcttggcagattttacttactcatgtactcatttaattcatttaatacccagtatttatttgaattttgtattagttaggactcttggttgtaagtgacagaaacataactcactctggcttagtcataaaagggtattttttgcctttgtaattgcaagcatagacggcaggcatgactgcatccgcaagatcagtctcattctttctctcttctgtgttggtttcattctttgtcaagctgcctttgtggcagccgaagggtggtagcagctcctacctgtgaagtaaccccagtgaaaagaaaagtatttttttcccccagtagttctaacaaagtcccagggaagaagctcattggctggcttaggtcacatgtttgtccctgaaccaattaccggcaccagaaagatgaaaggctctgattggccagacctgggtctcatgaccgcccacctaaaccataagaactgagaatgagggaggggtaggtcctagagggaaatggcggtggtaccatgagaagaaggggaagggatgcggggcaggcaagacccacagctttccgccacatgtgcgcatgctcagccaggcccagtgctcggttctggggaccttgtagtaaaccagacattgtggtccctgctctcctagagcttgtcgtctagctagggagccaaaaatggaaaaataatgtcaggaatgagggctgcacagttaaacgtggtgaatattctaaaggtgaagcacagcatagctcagggggaacgtaaggttaggaggtggggggactctaacctagtctcggagagggtcaggtagggctttttgttaggaaatgatgtttcagctgagccctgaaaattggataggtgctagttaggctaaggtggagtccgagtggaggagagtgttctagattcttgctgttcaaagggaggccaagggaccagcaacacctgcaccatttgcgagccccttagaaatgcagaatctcaggttccaccccagaccactgaatcagagtcagcttttttatttttttgagacagagccttgctctgtcgccgagccagagtgcagtggcgcgatcttggctcactgcaacctccacctcctgggttcaagcgcttctcctacctgagcctcccgagtagctgggattacaggtgcgtgccaccacgcctggctaacttttgtatttttagtagagacggggattcaccatgttggccaggctggtctcgaactcctgacctcgtgatgcgcccgcctcggcctcccaaagtgctgggattacagtcgtgagccaccacgcctggcccagagtcagcattttaccgtcattttccggtgatttgtatacacagggcagcttgagaagcactgctgtgggcctctgcacatgcgttcaggcagccgagagagagaaggcgacagcaagaggaaccggagggagatcagaacagctggtgaagccggagttagtgttggagaggctgggcatgcaggcagggaccagatcaagcagacgcttggacattctgctgaagattttagagtttattcctagttaagagcactggagtcattgacgatgttacccagaggattaagatgagacctttggaaaatcacctggcgtcatatggcgaatgcatggcagggaacagagtggagaggggatgagctgaggctgctgcaggatccaggggaagagatggaagcctgactcggaggggccggtggggttgtttggaagtggttggagctcagattttgcaggtggtgaattgatgagatatgagatttggggagaaggaggcggcgagaatggctcccaggtttgtagccagtagatacatgggacaaccattctctgagataaaggttggtgcaggagggaggattaggattcaattcttcttcttttaaattaaaaaaaaattttagggacagggtcgtgcgctgtcactcagcctggaggatagtggttcattccaaggtcactgcaacctcgggctcaaggatcctcccatcttagcctcccgagtagctgggaatataggcatgtgccaccgagcccagctaatttaaaaattttctgtagagacaaggtcttgctgtgttgcccaggctggtctgagactcttgggttcaagccatccttccgccttgacctcccaaagtgctgggattacaggtgtgagccactgcgccttgtcgaggggtcagctctaagcactgagttggacgtgcctgaggctcagaagaacattctgtgctggaggtaaacatctgggagcccttctcctagagaagggaatggaagctttgggatgagtgagctctccagggagaggatagagcaggaagagaggttcctgaggcggcacctcgaggtggtgctggggtctctgcagaggaggctgggcccggacatggagggagaagcatttcacggtggtgggaccggcagcagtgccagctgctgctgagaggccaagtatggtgcagagtgcacagtggccactgggctccgcggcctggcagttgcaggggatgtaactcagaccagccctgggaggggtggggcggacagcagatggccgtgtgttgaggaatgggtggagatggtcagagtcagagggtgtagacggtacttgtgaggtggggagcctggagtgtgaggaaatgtggaaaggagggagtgaggcaggggtgctcaggaatctggaccacagcagggattatttttaacatattctttcaaaaaatgatttgtgagcatccactgggtgcctgcccctgctgcgctctcccatgacaggctgtcgggaggggcctcaggcaggcccggagcagagcagcctcagggaaagctcagcagctgcagtcaggaggtgtcccttcctcctcctcccccgtgttctgtccttctcccctttgagctcagctcagcaatttcccagcctgtgactttactgcccaggccccaagcacaaggtcagagctgggaagggaggaaggggtgagggattgtcctggggactcagactgggtgggggtccttctgtggttggggttgggggtcagtgtgtgtggtgtgcctggcccgaggggttctctttgtgactgtcatttgggttcattctgtggcttagcctgtggctgcagttaggagtctgtctatggcgaggaggttttttccctttgtgtgaaagctaaccacccatgagggatttaaaaccacaatcctcaccttacaccagcctgctcaccacaggagtgtcccatcacaaaagtgatgacattgatgaaataatattgcagctcctgcttgcaggctgtccgattctttccttaacttgagttccctgagcatagcgactgtgtcctattctttagggcccccaggccctggcttagggtggggacctgggacttgtttatggttgctgacagtaagggacatctcggtcagaggaggttgttctgctcctgaccctccactcctctgcttctggctggatcctatatcccagcaggcctgggctccacctgccacatccctgtcctagggtgaggccaggcctctgcttggttgacacatcccaggttattatagcacactgaggccagagacgccctggatggaggctggcctctctccgagggtccctggccctgagggttcatgaatcagttctctgttctttgagcctcgggcagtgggagaaggcttcacctggttctcttggcagtgcaggctcagggagggtgtggcaggggcacccctttggttgattagcttgggagtcacagaagattagggatgggcgatccatttcctttataggtaaaccagaagccccaaggtaggaaatgactctcccaacgcaacgccgttcctcctcgagtcaacagaataagttacattctttatttttatatttattttttgagacggagtctcactctgtcacccaggctgaaatgtaatggcgcgatctcggctccctgcaacctccgtctcccaggctcaagcagttctcctgccccagcgcaccaccacaccccgctaatttttgtatttttagtagagatggggtttccccctgttggccaggctggtctcgagctcctgacctcaagtgatccgccagccttggcctcccaaagtgttcagatgacaggcgtgagccactgcacctggcccacgataagttaaattctaagacccaaactagttttggtcaagtgctcggctcatctcatgcttgctcatctcacgcttgcgggcccagggacggcctcttgtggctctcccactgggaagggctggctggagcagtagctggcctccagcctgagagtctctgccgcgctccccccgggcccccaccctcactggcgtgcctgctgctacccgacctatacgcaccctcccccacctctttgctgtttgttttgaaggggattttttttttttgctaatatgaagctgataaaaagcaaccaaagagatgctgaccagatgggctgaataagatcccagttcccagccagagctcaaactggctggtgccgggtgggctgggagagggacttgaggctgcgtctgtgggaataccgtaggtggtttccaggcccatatttttttttggaagctgattttcatgccccaatggatcagcaggcatttagggaggggcagttgtatgcccagaattgtgctgggtcccctgggtcacatcgaagctgcagtcctccaccctcagagagcctgccgtctacaggggccctgactgagccggagaaaccagatggctcagtgtgacaaggctcagatgtgaaatgtggcttctcagtggggaggagaggagggggaaacgctatgtggggaggtggggtgggatggggcggggtggggcagccggaaggggccctaatggcaagcatgggggtcagggtgaccccctgggaccatagacagtaaaaccttcccaggccccgtgaagtaaaggggttgattctcctgattctctcgacgctcatgggaaggacacagagcatttcactgaagtccactctgctgggacttgacctgaccttgtccctggagccgcaccgggccctgagctggctcggtcagctgggaggtggcccttgctcagccttccacacccctctttgtgcaagtctgagggcagcccctctcagaccttctcctttccagaagaggataatgtgcgcttggagttcccactgcagggaccagcagaacgtctggttcctcccttgctccttggcacgtggctctccacggccagggaatgcccccaccgcctctatggtaggtaaggcaggtgtgcaggcttcctatggcagggaagaggatggagatcagaggagcctcctccttgcccctctctatccctctgggcagagctgggctgggcctccctttctggctcatggattacccaccggccaccctctctccctggggttggggggtggtgtgtgggggcttctgttccagcttgtagcacagcccccggcctgatttcgtctcttcttttgctcctggttcctgcctcctgtcttctgttaggctgtgcagggagacttgcccctcatcagggtggagtgacagtgtcagccccccatacatccaccagctctggatggatgaagggaggaggcatttgtgggagggttgacgggagcctttctgggctggggcaggaagggctgaaggacatcagcaaggaggtttggtttttccctcttcaagaaaaccctgtgtagggacaggagaggacagatatatattccctccatccctactgctggagggaggcccttgctgaagctctgtgggtcctgggagagtcacctctggtctccacatcgattgtgtttctgttgccgctccggacatggttgggatacaaccccatctcctcaggagccactgcccattgttctcttgactccatccaggagccaaggaagttcacatctgatttaatgcaggcatgaggaagggcttatttggctactgagggtgaggatgctaactaggaggctttaagaacatggagatgttggctgggcatggtggcacatgcctgaaatcccagcattttgggaggctgaggcaggaggatcccttgaggccaggagtttgagaccagcctgggcaacacagtgagaccccatttctacaaaaaattaaaaaattagctgggcctattggctcatgcctatagtcccagctactctggaggccaaggtgggaagatggattgagcccaggagattgagcttgcagtgagttatgattgcaccactgcactctagcctgggtgacagagcaaaatcctgtttcaaaaaaaaagaaaaagaaaacatgaagatgtctgcatgtgcacctacttacctgcatgcatttccctcctcacctgtgcacacctgagcatgtgcctattttccctaattctgttctcttttttttttgagatggaatctcgctcttgtcacccaggttggagtgcagtggcgtaatctcagctcactgcaacccctgcttcctgggttcaagcgattctcctccctcagcctcccgagtagctgggattacaggcacacgccaccatgcccagctaatttttgtatttttagtagagatggggtttcaccatgttggtcaggctgctctcaaactcctgacctcaggtgatccgccggcctcagcctcccaaagtactgggattacaggcgtgagccaccacactcggccttctgttcatgttttaaggccaacttgcttatgcttctggaagattactctaggtgtaactggatttttaaaaatttgcagacacagaaatgcgtaagtcttaattgtattgtatactttgactaatgatacacccacgtgagccataccttgatcaagaaacaggacatttctgcaaccccagaaagttcccattgtcctgacccagtcaatcataactgcccccttgaggagcaaacagtgttctgatttttttcaaaagtgagttttgtctgttctagaacttaattttttttttttgaggtggagtctcgctctgttgcccaggctggagagcagtgacgcaatctctgctcactgcagcctccgcctcccgggttcaagggattctcctgcctcagcctccccagtagctgggattacaggtgcccactaccactcccggctaagttttttgtatttttaatagggacggggtttcaccatgttggccaggatggtctcgaactcccaacctcaagtgatccgccttcctcaggcctcccaaagtgctgggattacaggcgagagccaccatgcctggccggtgactgtttatatgaaactgctacactgtttgccaaatggtcaggccatcttatatcctcaccagcagtgtcatttgagttctcgctgctctgcatcctcatcaacatttgccattgttggttttgacaattttagctacttgaacggtatctcattgtggttttaatccacattttctcatgactaatgatgttgaatatttttcatatgcttattgactattcttatagttcttttttcccttcctccttcctttaaattcggtagtcttcttgtaggcgttctttacatattctagtcaagttcgtttcttttcttcttcttctgtttttgaggcagagtctcgctctgtcgcccaggctggagtgcagtggcccgatctcagctcactgcaagctctgcctcctgggttcacaccattctcctgcctcagcctcccgagtagctgggactacaggcgcccgccaccacgcccggcaaattttttgtatttttagtagagacggggtttcaccgtgttagccaggatggtctcaatctcctgaccttgtgatccacccacctcggcctcccaaagtgctgggattacaggtgcgagccactgtgcccggccacttctttttttttttttttgagacggagccttgctctgtcacccaggctagagtgcaatggcgccatctcggctcactacaacctccacctcctgggttcaaacgattctcctgcctcagtcccccgagtagctgggattacaggtgcccgccaccacgcccagctaattgttttattctcagtaaagacaaggtttcaccatgttggccaggctggtcttgaactcctgacctcgtgatccgcccgcctcggcctcccaaagtgctgggattacagacgtgagccactgcgtccggccttcttctttttagaaatagagatggggactcactatgtcgcccgggttggtctcaaactctggcctcaagtgatcctcctgcctgggctcccaaattgttgggattacaagcttgagccaccatttctggcccatttcttttcttgtttttattttttggatacaaggtctcactttgttgcccaggctggagtgcagtggtgcgaacagagctcactgcagcctcaacctcctgggctcaagccatccttccacctcagccccccgagtagctgggactacaggctggtgccaccacgcctgactaatttttgaattttttgtagggagagacagggtttcaccctgttgcccaggctggtcttgaactcctgagctcaagcgatccgcccaccttggctttccaaagtgctggtattacaggcgtgagccaacgcgcctggcccatttcttttcttaacggtgtctttaatgagcagaagttttaattttgaagaagtctaattatggactctttccttttatgtctgtagctttgtgtgtcctaagaagtctttgcttaccccagctcacaaagatttccttccatgtattcttttagaagctttatttttatttattttttttgagacagagtctcgctctgtcaccaggctggagtgcagtggcgtgatctcggctcactgcaacctctgcttcctgagttcaagcgattctcctgcctcagcttttcgaatagctggaactacaggtgcctgccaccacacctggctgatttttttgtatttttactagaaacggggtttcaccacgttggccaggatggtctcagtctcctgatctcgtgatccgcccgcctcagcctctcccaaagtgctgggattacaggcatgagccactgcgcccggctagaagctttattgttttagctctaggtctaggataaacttgttttaatttaattatgtatggcagtatgttggggtctaggttcatttattgccatatggatactctgttgttccagtactgtatgttgagaagactttcctttccttgctgaactgctttggtgccttagtcaaaactctgccaggcatgtaagtgtacacgtgtgtttgtttattgtctctccaaccatggtgtttctctgcatcagggatggaaaatacgtgccatccgtgccgtcagtccaccgtttggctcccgtggcagatactggtaattgatcatggcactctttcccaagagcttagacgtggtctcagaatcctgttcaacaaagcaccgtaggcagccactggcagtcatttggagttgtcatttgagataaatcacttctggcatctctgattgaaattgtcacaagaggttatttgctgaaggtcccacagctggtgagtggcagagccaggatgtgggctcaggtttgtctgtgtgggtctgaagcctgtgctgtcttccccacctctacagactgctctgcgtgaatcatttcaacaggtcgcttcatctccgtgacctccagtctcttcacttgcataatagggacggtggccaccgggaggagtgggtgtgggcagtaatgaggtcatccacagaatcgctagtggagcatctgatacgcaggtgctccgtgatggactgtgacgatggcgatggtggcgatgacaaccatgatgagtgagatgcagatgcccttgagaaacacacagtcagggcttctctctagggaacccagagtagctggctcatcagagtcccttgcctcttcttatgtatcttcgggcccgtggccttccaagctggaggccccagagcggagccacgcttcctcaagtttgctaatagggtgcgagccacgggcttcggcctaggcgtctaggccagctgagctgtgctccttctctctttgtgggaggaacagctggctgggttcgtagaattctctttctgggaaccttcttgccctctctgttgattctccagcccatctttctttcctttggattggccacatgatcctgcctgccacaggggcgattaatccagctccttcgacctggtcctggacccctctgaggttcttcttaagaagttgaagcaatagagggttgtagctaagaatacagtttctggagccagtctgcctggggttaaggcttccccacttcttcttctttttttttttcttttttgagacagagttgcgctcttgttgcccaggctggagggcaatggcgcgatctcggctcactgcaacctctgcctcccgggttcaagcaattctcctgcctcagcctcccgagtagctgggattacaggcatgcgccaccacgcccagctaattttatatttttagtagagttggggtttctccatgttggtcaggctggtctcgaactcctgacctcaggtgatccacccgccttgggctcccaaagtgctgggattataagtgtgagccaccgtgcccagccatttttggtatttttagtagagacggggtttcaccatgttggccaggctggtctcaaactccagatctcaggtgatcctcccacctgggcctcccaaagtgctggaattacaggtgtgagccactgtgcctggcccccccgtttttaaaattcatttttattttgagatggagtcttgctctgttgcccaggctgaagtacaatggcacgatcttggctcaccgcaacctccgcttcctgggttcaagtgattctcctgcctcagcttcccaagtagctgagattacaagcacatgccaccacacccagctaatttatgtatttttagtagagatggcgattaaccatgttggccaggctggtgtcaaactcctgacctcaggtgatccacctgcctcggcctccggaagtgctgggattacaggcataagccactgcacctggccaaagcttaccctcttcttagctgtataacctctgtgcatctcagtttcctcatttgtagaatagggatgtattagccctgtctcccattgctctaaagtaatacctgagattggataatttataaagaaaggaggtttggccaggcgtggtggctcacacctgtaatcccagcactttggaaggctgaggcgggcagatcatgaggtcaggagttcaagaccagcctggccaatatggtgaaacctgtttctactaaaaatacaaaaattagttgggcatggtggcgagcgcctataatcccagctatttgggaggctgaggcaggagaatcacttgaacctgggaggtggaggttgcagtgagtcgacatcgtgccactacactccagcctgggcaatagaatgagactccatctcaaaaaaaaaaaaaaaaaaaaagaaaggtttaactggctcacagttctgtaggctgtacaggcagcaggatgctgacatctgcttggctgttggggtggcctcaggaaacttttattcatggtggaaggtgaagggagaggaggcaggtcacagggccagagcgggagcaagagagcaagggagggtgccacacacttttaaacaaccagagctcgtgagaattcactcatgatcttgaggacggcaccagggaggggatggtggtaaagcattcatgagaaatccgccctctgatccagtcagctccctgcaggccccacctccagcactgagggttacagtcccacgtgagatttgagtggggacacaaatccaaactatttcaaggataataagagtacctgccctgggtggctgtagtgaagattaattgagataatatgcctttattgcttaaaacagaggtatgcagtaagtgctacataaatattagtcattattattcctccaaaaaactttgtttctgaaatgtgcggagaatagcaatgcttagagagaccatctagggggaagtacaccaggttttcggtgaatatagtttgtcaggacgccctgatttctgccctgccaggtgcccacagctgaggggcctgtctgtggaatgaataaggattgaaattgcattttgtgtgagtggccttccaagagccttgtggatcagactccaaaccctgcctgataaatgtggatgcccttgagggtcttggaaaaaggctaaaaaccaggatccagcccagcatctgagccagacctggaggaaggaacatctttctgggttgtgctttcacctcttgccttctgaatctgacccaaacaggggtctccagggtggcagaaagaacctgcagggtcgccatcctcatgaaggtttttgggactagactgagtcgagacttggataattcggggctgggagcgtcccaaggctggcgttggaatgagttttatgagcagtttgtccctatcataagtttctttcctaacttcttttgcctgcagctgatattaaaatgagtctgtatttcggggacagatgctgaccttgtggggaacacgggaagtgggggcagggcctaaaagccatggggggccaggcgggggagcagctgccctttcagcctgggtggcccatggtctggggggtctgggctgatggtaaaggtgaccggctgccaggccctccttccttagccctctcctttttccttttctcttttttttcttttttgagacggagtcttgctctgttgcccaggctggagtgcagtagcgcgatctcggctcactgcaacctctgcctcccgggttcaagcaattctcctgcctcagcctcccaagtagctgggattacaggcaccgccccatacctggttaatttttgtatttgtagtagagatggggtttcgccatgttggccaggctggtctcgaactcttgacctcaggtgatccgcccgcctcggcctcccaaagtgctgggatgacaggcgtgagccgccgcatctggcctccttttttcttttttttttttttttgagacaggttctctgtcgcccagactggagtacagtggtgcgatcagggctcactgcagccttgaccttctgggcccaagcaactgtcctacctcagcctcccaagtagctgggaccacaggtgtgcaccaccacgccctgctaggcttaaaaaaaattttttttaattcgtagaagcagggtctccctgtgttcctaggctgtcctttccccttttctcgtcgtgctctcctcctctttctgcctgttggtgagggctcggctctgtctccccttgatggcattcagaagactgatagagcacttggcattcagggcgtcacccaggggatgcccccaggggccccccaacccccgccccaggcatgccacctgcctttggaagcctgaccagccatcccaccccagaacttagcccctgggtctgtgacatccctgcctgttttcaggccctgcctcccccgctggatggtgctgggtctggggacagagcccttgcctcttcctgggatttagaaaccaactgtgtgacatcgtgcagttcagtcatcttctgtggacctcggtttcctcatttatagaacggagctcaccctgtagggttactgcagggattaaaggaggaagcaggcggacgagggcttcgtcaagtgccaggcttctgcaggtgtcgaatatcggcacataatggacaccagtggttgttatcatggtcaatatgccaaacacgcatagggtggtttcattgataatcccgcccttctgctctgccaactgccatagactctactccactgagaccggctcagcagcgggatgctgccagattctgtgttctgccacccacccccatccgctaccctcttccatgagtgtcatttacccgacactcaagcctgctgtgtctgggacttcagaggccagtggatggtgggttctgtgttgcttcgtgaagggatgtcccctgcgtagatctgtgcctcagtgggttcctcctgtgtgtgcccctcccgctggcttcttctcccggagcccccccggcagactctgctcttggcggagtgtggagctggagtttcaggccttggggtgtagatttgattcctagggttgctgtaacaaattactgtgaacttgatgggttgaaataaaaggataaaaggaatttcttatcttttttttttcttttttgagacagagtctcactctgtcacccaggctgaagtgcagtggcgtgatcttggctcactgcacctttctgcctcctgggttcaagcaattctcctgcctcagcctcccaagtagcttgggattacaggcaccggccaccacacccggctaactttttgtatttttagtagagacggtgttttgccatgttggtcaggctggtcttgaactcctgatctcaggtgatccacccgcctcagccccccaaagtcctgggattacaggcatgagctaccatgaccggccaggaatttattttctcacaactctagaggccagaagtctggaattaaggtgtcagcagggccgttaaagtgtccgcagggcctttaaggtgtctgcagggtcgttaaggtgtcagcagggtcgttaaggtgtcagcagggccgttatgtgtcctcagggccgttaaggtgtcagcagggccgttaaggtgtccgcagggccgttatgtgtccacagggccgttaaggtgtcagcaggaccgttaaggtgtccttaaggtgtccgcagggccatgttcccgccagaggctcgaggggaagctccttgcctgcctcttccagcgcctggtggctccaggccggggactgcacagctctgctctcttcctccgtcttcttcacatgtctccctcctcttctccctgggggtctctcctctgtgtgtctcttttaaggacacttgtcattggatttagagcccacctgggtaatcgggatgatctcatctcaaactccttcatatcttaaaattatatctgttatctcagtctgttccaactgttacaacaaaataccttagactgggtaatttacaaacaatagccatttatttctcaccattctggaggctgggaaatcccagatcaaggctccaagagacccactgtctgatgaaggcccacgttctgcgtctaagatgacaccttcttgcagtgtcctcacagggaggaaggcggaaggacagaagggattcgctagtccctcaggccttctatgaggacgttaatcccgttcccgagggtggaacctttattacctggtcacctccctaggccttgccttctaattccatcaccttgggagggacatgtacattcagactgcagcatgggtaaagaccctttttccgaataaggttacacactcaggttcctggatacagacatatctttttgggggccaccattacggggtcagggctgccctctcctgggagttcctggtgggagcttggtgaggtccccgaggtctgccagcacctgctctccttgtgtagttgtaagtcattcaagtgccactgcaagggtgtgtgtgtgaggtacagggtgttgcggggctgggaggacccagtgcagctccagctcgcacaaatggggtagagcatgatcttcccatccctgctgccccgggacctggtacatatggggccatggcaggtgcttcataaacacttagtagttggtgcttaataaatactcacaataggttttcagtgaatcctcattgattgatccagccttaaggatgtggcaatgaacaaaaaagtgcccagtattttctttttgtttttgtttttttttttttttttgagacagaaattcgctgatgttgcccaggttggagtgcaatggtgcgaccttgcactaccttggcttgtggcacgaccttggctcatggcacgaccttggctcactgcaccctctgcctcccaggctccagcgattctcctgcctcagctggagtagctgggattacaggcgtccaccaccacacctggctatttttttttttttttttgagatggagtcttgctctgttgccaggctggagtgcagtggcacaatctcagctcactgcaacctccacctcctgagttcaagtgattctcctgcctcagcctcccgagcagctgggactacaggcacctgccaccacacccagttaatttttgtatttttaatagagatggggtttcaccatgtcggccaggctggtctcaaactcctgacctcgtgatctgcccgcctcggcctcccaaagtgctggggttacaggtgtgagccaccgcgcccggccttttttttttttgagacagagtctcgctctgttgcccaggctggaatgcagtggtgcaatcttggctcactgcaccctctgcctcccaggctccagagattctcctgccttagctggagtagctgggattacagacgcataccaccacgcctggctaattttttttttgtatttttagtagagacagggtttcaccatgttggccaggctggtctcgaactcctgacctcaggtgatccacctgcctcagcctcccaaagtgctgggattacaggcctgagccaatgtgcccggctgttttcttagataatttttatcagttttttttttgtgtgtgtgcaaataaccagcaaatatgaaacaccccagacaattttaaataaaatgatatatgcatattataaagttaaagcaattgtaaagtacagagaaaataaaaaaatgaataatgtcctaatcataatcctaccatccagaaatatccgttcttaccatttgctaatcgtccagacatcttggcatcatacacatagatagaggcaaacataaatgagatcacactgtttgtgctcctttgtaataaaaagagctaaattcaattttccttgcattaaccaatgaagaagaaataaacaagtggctcagaaggagttgctgaagtttagagaaatgtttcctctctgtaagagatattaatttctctaagagttctctaacagtgaggaaaaagattatgataaaaagaaccaaacctttggggtagagatattaatttaaaaaggtaatttcaactttatacatagagtttggctccctgctttgaatatgagagccaggtgattttggaggagagagggtgcagtctgggaactttgagagtgctccttttgaggggacctgctgttctcagaagagcaggctgagtaacggtctgcacctcccgatgcctggagggagtgttccgagccgaggctcagttacacgtgggaatcaagcagagcccatcccgggagcgaatagggtttgttagcaaatgacatggctgagctgatttgatttggcagcaggactgagaagtttctgaaatgtcagatgttaataggatggctggttgtctctaaacgggaagccagaagtgggggtggatggccaggtgacgtcatctgctgtagaggaggaatttgggagaaaggaaatcggaggtggggaggggaaaagagggaaggagggaaggaaggtggaagatggaggagagaggccagtggcattagaggtggagggggaaagcgaatgagatggggctggtggaggagttgggtttgcttccccgaggatcatacgttggggtgggctgagtttgtcctcaaatatgttttgtttggccaacgtgatgttaaaaaagtcatttcaatactctttagggggaatgtcccctccccaatcctatttcgtcttggagcctatctcctccctggcccctgaagacatctgggtttgagaccttcgccagatgacctgtggctctttctagagctctttcctccggggggctagtgggtggcccaggctcagaggagaccagaattgcatctcatctcagagatgccacggggatcaggagaattctgagaatcaggtgagatccccaatggtgccctgacctcaggccgctgtggattccagatgtggtttgggactgtatgtgagtgccccttggcggtggtcagttccgtggtctggagagctgggctgtgggagacaggaggcaggagctgttgttcttgtctgcttggcctcgtgcttggtgactcttggttgaaccgggaagatgtgatctctgttctttgaagacataatggccgtgaggaggcaaaaaccacagaaaccttcctccaaaagtgatgcaagatgagccattcgcacactgctgtaaagaaatacttcatcgcagtataaatagaagaaataccggagactgggtaatttataaagaaagaggtttaattgactcacagttctgtatggctggggaggcctcaggaaacttacaatcatgaaggagaagcatgtgccttcttcacaaggcagcaggaaagagaagagcgaaggaggagcttccaaacacgtaaacccatcagatctcatgagaactcactcactgtcacgagaacagcgtggggaaaaccgctccctcgctccactcgtggggattacagttcgagatgagatttggatggggacacagagccacacctttgccagggtaagctgaaaaggccaggaattccttggatgatgctctccctgccttttctctaagaggaggttgattctggggcttggaaggtacttccaggccatccttgaaggagctcagagtgagtccttcaaacaccagcatggaaaagcagaaagcaggccagcagccctggtcagatctggggagcaggaaggcaggtctgcaaagcctggggagggtccagtcagcgtgggtccgggccgggttaggaacctggtcaggccaggcccggtggctcatgcctgtaatcccagcactttgggaggctgaggcaggtggatcacctgaggtcaggagtttgagaccagcctggccaacatggcgaaagccctgtctctactaaaaatacaaaaattagctgggcgtggtggtgggtgtctgtaatcccagctactcaggagagtgaggcaggagaatagcttgaacccaggaggcagaggttgcagtgagccgagatcatgcccgggcaacacagcaagcctctgtctcaaaaaaaaaaaaaaaaaaaggaacctggtcagagcagagcaaggctgagccctgggggtaactgagcttagtgttactcatggagacaggagccaggaagcgcaggcctcccggcccatcggtgcagcctgacttggcgtggacagccccacctccacgggcagcgcccacgtcctcttcacacggcatgatctctacaacccatctggcagctttctccttgctgtgtgagtcttgggcctggtagaagtcaggagtgtacacttggttttttgaggagcagctcagagcttcaaggcagttacaacaataaagctcactgcacactgtgaatatgtgccccagagcatcgcagttttgaggatgggagtgagactagcagttcagaggcacggtgccagagtgtcacagttcctccctcccccaaagccagcttgtacttgaacctgtcgggaggtttctattagtttcttatggccgctgtcacaaatacccacacacttagtggcttaagacaacacaaatctatcatcttacagttctgaggttagaagtatggaatgggtctcactgagatcaaatcaagatattgccaggggctgggcgcgatggctcacatctgtaatcctagcactttgagaggccgaggcgggcggatcacctgaggtcaagagttcgagaccagcctggccaacatggtgaaaccctgtctctactaaaaatacaaaaaatactacaggtgtggtggtgcatgcctgtagtcccagctacttgggaggttgaggcaggataattgcttgaacccgggaggcggaggttgcagtgagctgagattgtgccactgcactccagcctggggaacagagcaagactccatctcaaaaaaaaaaaaaaaaaaaaaagatattgccagggccgcattccctctgtaggctctaggggacaatctatcctcttgtcttgtcagctcctagaaggccacctgtattctggccccatacctctgttttcaaggccagccacgctggagcaagtctttttttttttagacagaatctcgctctgtcacccaggctggagtgcagtggcgcgatctcggctcactgcaagctccgcctcccgggttcaggccgttctcctgcctcagcctcccgagtagctgggactacaggcacccgccaccgcgcccggctaattttttgtatttttagtagagacggggtttcaccgtgttagccaggatggtctcgatctcctgacctcgtgatccgcccgccttggcctcccaaagtgctgggattacaggcgtgagccaccgcgcccggctgagcaagtctttctcacaccgccgtctctcggattccctctcttctgcctccttctcattacagagactcttttgatcacactgggtggacctgggtcatccaggcccctcttcccatctcaggggcagccttaattctagccacaacctgaactcccccttgccgtgtaacctcacacattcccaggttttggggattgggacaagggcacctctgggtgtgagtgttggggggcagtatttggcctatcacaaggacccaccttcatgggctttgctcagccctgggtcctcatcggtaaaatgggcatctctacctgcttcctagaggaaacgctagccggcccaccgcatagcgggccttccctctgtgggattccgtagttctgggactaattcttcacctgcctgatctcattgctttgcgagcccgtgactgatgatacagtatcagatgtccttgccctgatcccacgaccatgagacttgaagggcagggatggaatatgtgcctaagcatttccacagagagaagagggacatagcacacacgctgcagcctagaggagctatgaccttggttttgttaccgtcagtcagctgcttgctgatcccccagcaactgatggaactgatggaaaagccaccactccttgagagaggaagaaaaaagacttatgttaagctttgcccagctctgatttggacttgcccaattttacttgaaggaaggtgccactgtccgcttcccattcacacatcgccgccttcctcctgtctaaccggaatctttcttgttgcaatttcagcctgctggctctccatgcggccggtggggaaacagcaaagctggttcccacattgataatgacacctaatcctgcaatctgcttctgtccggttctaatcacgccactgcttccattcccaggaggaccaggggcaccctctgtttcgtcctgacaaagtggactgcccatggttgacagcctgcgtgtccggggtcgcctgggggtgagggtgggaaggtgtgggagggacggaggcactgccttctgctcagatgagcagcacgtagataaccctccccaggtgacctgcctggcatggaaagtccttctcgtggtcccccaggtcagatagcgttgcctggctacggggcagtcagcgaggctccggcagggcgagtaaacaggcacacatgtttaaaattcaatatcactggcgggcaaacactccagcagcgccttccagcccaccgataatctctaattctcctcgcttgatgcgtgtgggggccctgcaccaagacccagatggtctcttctgggaattggtcgtcagctgttgtgagggatggggagtcggaggggtgggggtgcctgttatagcctcagcctcatgcagactatcatcctgatcgctctgggcaggctcctgagagacccaggggctggtctggattcactggctgggtggagcttccagggtggggagctgtctgggttcagtggctcacacctgtaatcccagcactttgggaagccgaggcaggacaattgtttgaagccaggagttcaagaccagcctgggcaacatagcaagacccctccatctctaaaaaacaaaaactagttgggcatggaggtgcacccctgtagtcccaactacttgggaggctgaggcgggaggatccctggagcccaggcatttgaggctgcagtgaaccatgatcgcgccactgtactccagcctgggcgacagagtgagactccatctcaagaaaaaaataaaaggcaggggcctttggggaagctcatgcagatttttgtctgccttaggctgcaaagaggctgtggagggggcagggcctgtggagggtgtgcacccggcacaggcgatgagtgagggctggaatctggcaatcccctggccccgccaggtgactgtgatgggcggcatttattaagaggaaggggcgctccatctgcagggtggaagaaggtaagccagcctcctctttgctggaggtgcacacatggctgcctggggcatctcctggggcagttggtgagctggttcctggtaaagtcattcctcgtagggatcgtttggcatcaacacggggagcaggtgaggttgactgttttccctgcatgtgcctcatgcttgccctcttccgttgcttaggcttccttcccttcactgcctttcatgtgtcaaggccaggttatgcccctggtagcgaagaccccgggactgccctgcccgctccacgaaggcagtgggctcttttcctgggtacactgttttccagaggcagccctgatccaggctgcctgatagttccaggagatgacggtcctgagggtgcgtgcccagcctgaggcttgtaggttcagcccagatcaccagtgcaccccgagatcaccagtgcacccacttctccagtagacatggcctgtccttcaggcctcggcggggggcagggccacgatgagcagactcgtcactcccggagccacctgctcacccttccctctgagtagcagtgtggccaaaggacctcttagtttagtgccttggggccatggtgtgtcacctgccctgtgtggctctgaaaggctcctggaagggtgtctgggactgtaagaggccagggctctcttcgagatggatctgccttgcagtcaactgcctcagcctcatccatcgctggctgggagatgactgggagcgggattgtcccagctgtgggtctggaccttcctacagtggctcaccaggcccccttgtggccaataccatcagtaccacgtgggagcctgtggctggggctgggggtctggggaggggtgacaagcccaccagctgctcactgtgccagctgggtagacccagagggtcaggcggccaggaactgggaccctgccctgcgtccactgccagcctcagtgctcaggtgccctggagacctcattagaccaggcctgagtgggggcgtggcagcttcctcactcggaatggaggcttctgttacttgccctgcatttcctacttcgcaggctcatccggagtttcagtcttgcctggcctgcagcttcagccgaggtctgcaaggcagcaccagctcttggagccaggtgggaatgccgcttcaaacacacgcacagaggcatcgctctcttttggtagaaaagctgtcggattgtaagacaaaggctgaggtctctaacgtgtcctcctttactctgggtgcctcttgtgttacctttgtgcttgagtggggggaccacaggacaggcaaattagaaactgcacgaaacaaaacaaaatgcaaagaaaaacaaaatcgaaacaaagaaatacaatataaaacaaaacaaaagagctgggcgtggtggctcacgcctgtaatcccagcactttgggaggccgaggcgggcagatcacttgaggtcaggagtttgagaccagcctggccaacatggtgaaacttcatccctactaaacatacaaaaaaactagccaggcgtggcatgccctgtaatctcagctgcttgggaggctgaggcaggagaatcgcttgaacctgggaggcaggggctgcagtgagccgagatcgtgcccttgcactctggcctgggtgacagagcgagactccatctcaaaaaaaaaaaaaaaaaaaaaaagaagaagagaaaccacaacagatgataactgtttatggcaggagggtgtgtgcagctgggtcatggtccccaccttttgggctgataaacctggctgagggctaggcgtgtatgtttgccatgagtgagtgtttcttgtgtgtgtgtgtgtgtgtgtgtgtgtgtgtgttgggtgaacgtgactgtgaatgttgtggttagttctttgttgtatcaagtgttttggatgtctgtttgggggtggatattgtgggacgccacgttggtgtgaatgtatctgcagctgagtgattcccccagccaggacagcggggccgggaaggacagcccattgtccctaccctaacctcgttagggcctcgtttgccccagcacccccttcttcagccccagctggcaaaagggggtggggcaatcgtgttatttaacatacagcttatagggaagagagctgttgagcattaaagcccccatgcggttgttcatgtataattaggctgtgggagcttggggactgactgactgttagaatcactcgggaccgaagcacttatttaagtaatcattaactggaagatgggaaaggaacagaacatgcaatttgcagatgtcccctcttcttgcaggtcagcctgaaatgaaactcccagcaagtgaggaggctggcgccttgctcagccttcctcttccctctggtgaggggaagggcaggttaggggatgctggggctgagttggggttatggagatggcatctctcaggcacatcagaagcacaagccccccaaaatttccagcttctcatgactccttcgctgacaccgccctttacccagcagcacaaagatatataatgatatattcagttctcagtccggcgcatttgatcaacacctgctctgcactaggccagggacggctccagcaaagtcccagtaatccgttgtcccaggtggaggaggatgttaacaggaagagcccagataattgaaattctggtttagctcatctgtaaatctgcttttgctgcttcccagcagtgctgatgtggtcatgggggatgggacgctgtgttttcctccttcgcgctgaagcagagggtgcctggctgggggtctctaggcaggagcgtgtgggagcggccaagttctggagcagttaaggctgttagtggtgacggggcacctcatggtctctctgggggacaactgcagccccagtggaggaggagggagactggccaactgcatatcccataacaagtgtgggacccggagctcagggagaggagagggaggaagggtgttcggtatgtggtgtgtgtcttggcatatgatgcctcttgctttggaaattctgtgaggttccatcctttttatttattatttattatatcgcgccactgcactccagcctgggtgacagagtgagactccatctcaaaaaaaaaaaaaaaaaaaagaggagctcgagaccagcctgaccaacatggtgaaaccccgtctctactaaaaatacaaaaattagccaggagtggtggcgggcgcctgtaatcccagctactcaggaggctgaggcacgagaatcacttgaacccgggggaggcagaggttgcagtgagccaagattgcaccactgcactccagcctggcagcagagcaagactccatctcaaaaaaagaaaaaaaaaaaaaaaaaaagagcagggaccacgggcagggtatgggttccatgtctggtctgtgatgtgttccctctggatgggcaaacccagaagcttcttcagcccctttcctcctccaggcacaggtcgaggctgggattgcgggaggaggggaatggcactgggatctggagtgcctggttctcaacacttgcttggcagaggggaggaggcccagtgtccccgcgtacagggcagcatggctgcggtttccctcctccatgagccagccagccagacagtgggcaggagagggcgggaagagagaagggcgagtggaaggaaatggagtcgtgtgggcgggtgagcaagttggaaagcgcctggtgtagagaggaacattgttggggagcagagaccactgtggagtgagggagggggccagctgtgcctcttgacacagccagacacctgcccgccagggccagtaaagtgcctggtgtagagaagaaccttgcctggggggcagagaccaccgtggagtgagggagggggccagccgtgcctctgacacagccagacacctgccttccagggccagttaggagagggtacaagctgcggagcccatggggctttgcattttccagggacaaggaagcttggagcgaagcagagattttccgggaggccaacacctcccttttctcccactctgtcagcctggggggctctttattcccattctttagagagagacacggtggagaagatgggaccacagctgtggctgctgggtagaccgaggccaaaccagccccctgctcactttcctgcctctaagcctttgcctgggctgttccctctcctagaatgcctaaccctctagttgaccctgttacggacctggcaaggttagtcttgaataacctgatgagatttccagagctgcttttttccagttcccccactaagaggcttagacctgaagctgagccccactttgggggaagactggaagtttcaggttgaagaccggatcaggaccaggagctcggccagctgacgctgcaaagcctgccttggagagtctgtggcgtaggaaccttacgccttaaccagcgtgggcagctcggaagcaggagccccagttgtttcttggaaaaatggggccgattgccccaaggcagccacgcccttacagagcctcttgcaaatacccacagggtcacccgtctttggtcacagccacggatggcgtccgtcatccatgcctcatctttatcctgtttgtactttaggttggttcagtacttgactgtttacaaagcacttttttttttgagacagagtcttgttccgttgcccaggctggagtgcaatggcacgatctcggctcactgcaacctctgcctcctgggttcaagtgattgtcctgactcagcctcctgagtagctgggactataggcatgggccaccatgctaggctaatttttgtatttttggtagagagggggtttcaccatgttgaccaggctggtcttgaactcctgacctcaggtgatctgcctaccttggcctcccaaagtgctgggattacaggcgtgagccaccgcacccggccttgcaaagcactttcttgaactcttctggttcttgcagaaaagaagaatgatttccccattgcgcagagaagaaaatgaaatactccttttagccagctggtaagacacaaacctgagtcttgagatttcaaatccactgttctttctgttaccccaagaaataattactgagtacaaataattactgagtgtctactactgtatttcattgcttcgaagacactttcttccctctcatttaacaactctgaaatcagggtgcatctcatgagcaatagcacaccgtaatttgtaattggaagcatttttgctttcttagcggagaacaaaataatgtgtaccttccagtggatgtccttttagtttgacgaaatctggtgcgtgcacaactgtggtgtgtgtaaatatggcctctgcctgcaaggtgtgcagtttagaggaaagatcagtcttagctattcgtgtgaaacagaatatgacgcctaccaaaaccaactcgagtgccgtgggaattccagctgaggggcttcagaaaagctttagggaagacgggtgggatttggcctctcagcatcctgtaccatctgcatcaaccagctgatttagacaatacacccaagccctgttagagtgaaggctcaaaacttggcccctggaggctgactatgggtttgcattgcctgtcgttctagatgtttaactctcagcctcagttttctcagtgacagagtggatgtgatgatagtgcttgcctcacaggtaggcgtgaggatcagataaaagaacatattcaggccaggcgcagtggctcacacctgtaatcccagcactctgggaggccgcagcaggtggatcacctgagatcaggagctcaagaccagactgaccaacatggtgaaaccccatctctactaaatacaaaaaataagctgggtgtggtggcgggtgcctgtaatcgcagctacttgggaggctgaggcaggataattgcttgaacctggtaggcggaggttgcagtgagctgagattgtgccattgcactccagcctgggcaataagagtgaaactctgtcacacacacacacacacaaaagagaacgtcccacatctttagtcaagggtctgacagatagagtgagagatcaataaatgtcacccccccgcccccatcctgaaattaattctataaatccagtacacgtagagccggcagacatttgtcgttcgatcactgttgcaatgtcaagcacgttcacatttgtggcctcatttgatcttcggaagtgccggaggatggggatcattactccagtgtcacaaaggaggcaagtgaggcgcgaggcctcacagctggccggtgaccgggctgggattcggaggctggtctgtctgacgctcagtcccatgctctcttcaccggattgcagctgctggagaaaaaccacaagcaaggaaggaaacgcggccgatctggcgggtttgctccagccggggtattttataaatgaatgatcactgctgggcatccttaatagtggggtttctggtttcgagagaagagaggtctcatttagaggctcaggaggctaatttgacggtggggagatgtgcgcagaccgccatctcctctccctgtctccacctccagtggccggtggccagttttgcctctttttttttttttattattatactttaagttttagggtacatgtgcacaacgtgcaggtttgttacatatgtatacacgtgccatgttggtgtgctgcacccattaactcgtcatttagcattaggtatgtctcctaatgctatccctcccccctccccccacccagttttgcctcttaagtactatttgtctcgctggccttcatgcctccttctttgcttggttgcctcccctggccatggagaggatgtcagagtgtggtcacactggtctctgctcatgaccctgccaggggctgtgggccttctccgccagccagattctcctttgtgccctctgaggttaacacagacaaacgcactcaccttcttcctccctcttcctctccttcctccctgcctcgaacctctttcactcagaacacctggctttgctagtaacaggctgtgtgaccttcagcaggccagttaacctctctgagctttagttaccctcccccggtgccccaaaatggatgatcatgagggtcaaatgggaggtggtaggaatgggtcctgggctctgatattgagtcttgctcttctactgtgtaccattagacgcagccctgacttcctttttacctctgtggctttatctccaaaacagagggaataactctctggaagtcctcccgggacccccttccttgcaggagagccattgcccactcctctgtgcgcccaggcagctgtgggctttacccatgctccttgctcttcgttttccggattgtaattatttgcttctatgattgtcatagtcaccagactgaagtcagttcctttcttcagttattcattcagcaagtgtttactgagcatctgtgtgccaggtgctgggattacagatgaaatgggggaaacagctaattaaacgagaagttttaaagctgagagttaaagtggttggatagggcatgtgtaggacgggagtaccaccttgggacagggaggagggtgcagaccaagagggcttcctggaggaggtgacctccaagttaagacctaaaggccaagtaggagtcaagcaaataaagtggagtgggaaggaggagagggaccgagggtgatcttccttggtctccagctccaagccagtgcctggcctggaggagatcagtaagttggttctccatctctcttcttccttgctccttctgaatgccttcctgcaaagaggcaggagcctggatccttggttttctggaccctgggatgctgtggccaagggggttgcagaagtgttctggatatggcatgtccttccagcttggggcacgccacgttcctgaggctggggctgcaggaacgggcatggcagcgtgtgctgggggacactgtgctgaatgattcactggctctgagtaggagtggagatgagccaggccagcagcacgtgcaggagggagctggaaggatgctgaggatgcacgagccttatcctgggtccctttttccaggggaaggagagaagggctcagtaggggacagcgaggctcatgaacttgacaatatcatttctccaagatagtcttttatgtcagaattttgagttggaaggaacattgccaggcctctctgcagctaggggtccctctagcacatggagcttccaaaggaagtgaggtggtgcagttcacatgctagagctatgctcctctcctcctttatgccctgacctccagcgtcattttaagcccccggggatggacctgtgccaaggtcttctctgcctggcctcgattaagctgtgtcttcccccagcccctggagacatttcctggcctctgttctcccttggaagactgtggggttctggagctgaagcaagcacaggatagggctgtgctggagagaggagacgggctttgtgcctggtggcaggctgggcaggagcagggagcgagcacggagccagggctgggaggaaggatcgatgatcatcacaatccccattgacagaggacatttcgtgtctcaccttgctctggacacagcacgtacgtcatgtcctattctacagccactttgcagagtggcttatatttctcccattttatagatatagaaactgaggctcagaggctgagtgaccaacccatgcagcttgtcagcagcagggccacgagttagtagcttgtctgccccacactaggtctggagctgtttctcccacaccacactgccttgttttgagggtttaaaaaattcattcctttccttccaagctggggaccttgctttcctctcaaagctggaacagaaccgagggccctggatgggtatggagcgtgacatgtcattagtgttggaaaaagactgtgagacccaggggatccctgggctgagccggggctggcttctccttccccacagcaccaagtgcctctgggccctgagctcatggtgtgtctcccccagccattcgctatctttaattttttttggtaaaataattacagggcatgagcactgctatctttatttaaaccatgttaattttttttaaaacagagtaacacacacacaaaacaccttggataaaaaaaataaatatctggctgggtgcggtggcttatgcctgtaatcccagcaatttgggaggcctaggcaggtggatcacctgaggttaggagtttgagatcagcctggccaacgtcgcaaaaccccatctctactaaaaatacgaaaattagccgggtatggtggcgggtgcctgtaaccccagccactcggggactgaggcaggagaatctcttgaacccaggaggcagaggttgtagtgtgccgagatcatcccattgcattccagcctgggcaacaagagtgaaactccgtctcaaaaaacaaaacaaaacaaaaaaaatgcttcaggctgttcctcaaagaaaacggttccctatgcctctgcacacccctttccagtcctccaagccaccacttattctttttttttcttttttgagacagagtcctgctgtgtcgcccaggctggagtgcagtggcacagtcttggctcactgcaatgtctgcctcccgggttcaagtgatcctctgcctcactcccccgagtagctgggactacaggcatgcgccaccatacccagctaatttttgtatttttagtagagacgggctttcgccatgttggccaggctggtctcgaactcctgacctcaggtgatccacccgcctcggcctcccaaagtgctgggatgacaggcgggagccgccttgcccggcgcacttactcttttagctctttcttcacacctcttaggtggtgtgaggtgcgtgggaatgcctcgaaagatgcaggcaccggtctctcttttacttgtttttatttttcttgcacagagagggcttcccagttcagagaagggaaaattgaggcccccaccaaggggagcctgctggagtctccaaacacacaagacccggggtctccttcaggcccaacactgtggctggtttcctgtgtcccagtcgtgccttccgtccggccacgcgggccagcagtgttgagaactcactcagggcagggatggaggggggaggcttctcacccctttaccttcctaggccccagtgggcgtccattcatcacctgctggcgtggggcctctcccttggaagggacccccttgcccttatgacgtaagacgtgtggcacctccatcagccctgggttccccagaaaaacgcccgcggcagaggacaggtcaaaggtcagcgctagtcagcgtggactaacagcttcgggcggacacccgagtcctgtagttccttgtttgatctgaaggaagttgtccagcgtcagcagcagccgccgccgtggtggtagcagctgcagtggagctaaaggcagcagggccccgactctcgggacccaggccctggcgggagatggatttcttaaagtaccttttcgtgagtgtccctgggctgtggagggatgcccgtccaggccctgctgcctggagggggtggggaacagagcctctcctgttgtcacctggctgggagccccgagtggctgtttgcctgccacgggtcatggaagccacccttcactcaggggaaggaggaaccgagaccagggacagaggggcctctgggtgggggatgtggagggcaggggacagactcagcacccgggcctttcctccctggcttggagattcgaggtgggtcctggcagagggctggagagaactcacttctgtgttcctctgggaaggcttctcggctccctgccggggcccgagggaacccactgccagccaaaggctgtgcataggtgggagttgccatggcgagagggggagggactcctcagctgggcttccgcctggcctggacgcttggagctggccaggctgcgggtcccgccctctcttctttgggctgtggttctggggactctgtgtcctgtcacggagcctcagagtgtggttagtgtgaggcccagcgaggagagtgtgagccgtggtcctctgctgccaagccacactgtccctgcaggctctgcagacgccccttccagctttggcagaccctttgtgcccgctcctggtgaacatggggggcccacgcggacttggccaggtggggactgtgaggctcttcgtctttcccctgcctgctgccagcccgggactggctgttttcttgcctttcttctccctccttggctgtgtcatctttttctctatgggagtcaagggtgacaattcagggacgagtgtgaggagtgacaggacacttgtttgtggggttggaccaaggagttccccaatctcaggctgcaccgccatgggctccaggatgctgtggggggaccggggaccttgtgaccagccagaaacggcccaacctctctggaccctggcagggtgtgggtagtggtatagtggagagttttaagctgcgaactgatctcacctgattgatgtttcaaaagaccgcgtgggccgggaacggtggctcacgcctgtaatcccagcactttgggaggccgaagcgggtggatcacttgaggtcaggagtctgagaccagcctggccaacgtggtgaaaccccgtctctactaaaaacacaaaaattagctgggcatggtggcacgtgcttgtaatcccagctactcgggaagctgaggcaggagaatcgcttgaacccaggaggtggaagcggaggttgtggtgagctgagattgtgccgttgcactccagcctgggcaacagagcaagactccatctaaaacataaattaaaaataaaatgaaataaaaacaacaaaaacaaaaaaaagaccatgtggctgttctgtggggaactgatttgagagggggttggaaggaggcaggagcccgaggcgctgtccagttgaggcaccgtgagatgagggaggcagtgcaggtaaggagaggtggtgagatgtgggatgccttgtgatggcggacttgccaggaggattggatgtggaggatgagggatcaagacatcagtgatgactcttgggttttttttttttttttgagacagagtttttgctcttgtcgcccaggctggagtgcagtggtgtgatctcggctcaccgcaacctcctcacagcaacctccgcctcccaggttcaagtgattctcctgtgtcagcctctggagtagctgggattacagacatgtgccaccacgcctggctaatttttgtattattagtagagacggggttttaccgtgttggtcaggctggttttgaactcctgacctcaggtgatccacctgcctcggcctcccaaagtgctgggatgacaggcgtgagccactgcatccagccgactctctgggctttgtcctgagtgtcactgagatggcttttgagggaaagaatgaatgagagttcctgttttggcctctaacttgggaagtttgaggtgcctgtcagacatgcacgtgagatgctgagttggcaaaccttgatggatctgaatttgaatcaggattcattctgggcaagttgcttaaccactctaagtctccaaccctccaggcctccctccccgagtacgtgtgaggcgtatggaaagtgcccagttcagtgccttatacctgcctggcacatcaccagtgcccaacagaggataccttgggacttcctacaacattgcttaatatcatctcatcttccagctcaggaacattcagtggcttccatagcttgaaacttgtgtttggggctgaaacttgggggctgatttggctcatagaatgattacgtttggtccacatagagatttttaaaattttgtgtcatccatgtacaaaaattgggagactcacacaaaaaattggatttctggcttattttgaaaacttcagcaacactgagcttgcctttctgctggacagcttagtgagagataagtaaatagtggccgccccctttggaatggccgtgtgctcttcagtgtaccattgtctcagtctcatgctctttttctcttttaaaaaaattggtgaaatttatataacataaaattaatgatcttaaagtgaacaactcagtggcgtttagtacttttgtgatgtcgtacaaccatcacgtctatctaattccaatttttattttattttatttttgagacggagtcttgctctgtcacccaggctggagtgaagtggtgtgatattggctcactgcaacctccgcctcctgagttcaaacgattctcctgccttagcctcctgagtagctgggatgacaggcactcaccacccacgcctagctaatttttgtatttttagtagagatggggtttcaccatgttggtcaggctggtcttgaactcctgacctcaagtgatctgcccgccttggccacccaaagtgctgggattacaggtgtgaaccaccacacctgacctagttccaaaatatttgatcatccccaaataaaacccctttaagcagttactccccactttctcctccccccaagcccctgacaatcacgaatctgttttctgtctttatagatttacccatcctagatattttatagagattgaattattaggcttctgcacagcaaaggaaacaatcaacagggtggaaaggcagcctacagaatgggaggaaatatttgcaaaccatatatcagataaggggtcagtttttaaaatgtataaggaactcctacagctcaataataaaaaagcctcacctgatttaagaagtgcactataggggtgggtacagtgctcacgcctgtaatcccagcactttgggaggctgaagcaggcagatcatctgaggtcaggagttcaagaccaggctggccaacatggtgaaatcctgtctctactaaaaattagctgggtgtggtggcacacgcctgtaatctcagctgcttgggagcctgaggcaggagaattgcttgaacgtggcaggtggatgaggcagtgagctgagatcgtaccagtgcactccagcctgggtgacagagcaagactctgtctccaaaacaaacaaacaaaaaaaaacaaacaaaaaccaaacaaaaacgtgtactaaagacttgaatagacacttctccaaagaagacatacaagtggtcaacaggtatatgagagggtcgttaatcatcagggaaatgcaaataaaaccacagtgatatatcacctcagacctgttaggatggctagtatcaaaaccacagaagaggccaggcatggtggctcacgcctgtaatcccagcactttgggaggccaaggagggcggaccatgaggtcaggagatcgagaccatcctggccaacatggtgaaaccagtctctactaaaatacaaaaaattagccaggtatggtggtgtccgcccctgtaatcccagctactcaggaggctgaggcaggagaatcgcttgaacccaggagtcagaggttgctatgagccgagattgcgccattgcactctagcctggcgacagagcgagactccgtctcaaaacagcaaaaccaaaaaaaaaaaaaaaaaaaaaaccaaaccacaaaagataacaagcattggtgaggatgtggagaaattggaactcttgtaacactgttggtagaaatgtaaattggtgcagccgctatgggaaacagcacggagattgctcaaaaaattaaaaacattaaaaagagaactaccaacttcattctttgcacgtggatatccagcttttttgcagcgccatttgttgaaaagactattctttccctaggattggtcttggcaatcctgtcaaaacacagttggccatagatgtgtgggtttatctctggactcttaattctactctgtcggttcatatgcctgttattgccaggaccacacggttttgatcactgtagctttatagtaagtattgattgggaaatatgagttctccacctttgaccttcctctttaagaaggttttgagtattctggatggaatttccctatcaaatttaggaggagcttttcagtttcttcaaaacatccagctaggattctgatagagatcgcgttagataggtagatcactttgaatggtactgccaccttaacagtattaaatctccaatccatgaacatggaatgtcgttccatttatttatgtcttctttaatgtcattgggcaatgttttgtagtgcttagtgtgccagccactcggttaaatttgttcctaggtattttattctttttaatgctattttattttttattttttgagacggagtcttgctctgccacccaggctggagtgcagtggcactatctcggctcactgcaagctctgtctcccgggttcacgtcattctcctgcctcagtagctgggattacaggcgcccgccaccacgcccggctgattttttttgtatttttagtagagacgaggtttcactgtgttagccaggatggcctcgatctcctgacttcgtgatccacccgcctcggcctcccaaaatgctgggattataggcgtgagccaccgtgcccagcctaatgctattttaaaatggaattgttttcttaattttctgattgtttattgattgtttattttaatttattatttttattatttttattgtttgtcttttctgattgtgtctctccgattgttcattgctggtgtatagaaacacaactgatttttgtactctgcaattttgcagacttcctttatcagctctagtagattttgtgcatgtgtgaaatctgtgaggtttttttgtgttggaacgtctcatctgacaatagagatagttttactgtttcctttccgtggtagataccttttatttctttgttctggctagaacttttagtacacccaatggtagtggtgaaagtgagtttccttgttttgttgctacttcatcttaaggggaaagcttttagtttttcatcactgagtatgatgttagctatgtctttttttttttaatgccttttatgtcaaggaagttcccttttattcttagttttctgagagtttatatcatgaaaggatattagcttttgtcgtgctctttctgtatcaattgagataatcatgtattttttcttcttcatcctgttaatgtgatacattgattttctttttttttctttattttattattattttttttgagacgagttttgctctttcgcccaggctggagtacagtggcacaatctgggctcactgcaacctctttcccctgggtgcaagcgattctcatgcctcaccctcccgagtagctgggattataggcacgtgccaccacgcctgggtaatttgtgtatattttagtagagacgggctttcaccatgtcggccaggctggtcttgaactcctgacctcaggtgatcctcctgcctcagcctcccaaagtgctgggattacaggtgtgagccaccgtgcccggcctattacattgattttcttgtgttgaactgagtttgcattcctaggataaattccacttggtcatggaatataacagtacgctgttggatttggtttattggtacttcgttgaggatgtctgactctatccataaagatactggcctgtagttttctgtggttcctttgtgtcactttgataacgctggcctcataggatgagttaggaagtgtttcctcctcttctatttttggaagagtgtgagaaggactggtgtgaattcttctgtaagtgtttggtcggcttcactatgaagccatctggccctggactgttctttgttgggaggtttttaattactacggattccatctctttacttctcccatcactcgtttaggttgcttgcctcgtgcctgaagtcattggcatcttctagtcctgtcttagaatttaaatatgagtctgcctaatttaagatgtcctataaaaacccaaccatcttcccacccttccccaccttgccacatctctgctctggtatctctgctgagagatggtccctcccacacagcagcagcattcaacatgatgaaccccataggtcagtggttctcacttgggaacttcttagaaacgcacattctctggccaagaatcagaagctctaggggtggggcctaggaaactttttttatttttgagacagagttttgctccttcgcccaggctggcgtgcagtggcgtgatctcggctcactgcaacctccaccccccgggttcaagtgaatctcctgcctcagcctcccaagtagctgggattataggcgcccgccaccacacctggttcatttttgtatttttagtagaaacagggtttctccatgttggtcaggctggtcttgaacgcctgaccccaggtgatccgcccgccttggcctcccaaagtgttgggattacaggcgtgagccaccgtgcccggccggaaactgtgttttaactagcccccaggtggttctgtggcattagcactgccacacttaacagagagccattgcaggctcctggccccagtgacatagtgaaatggcacctctgaaacgctccagcagcaaaggagccgtgagcatcaggagttggtggaaaaaggagaccagagaagggaaagaggagcaagcaggtggcttggcgggggtggtggggggagacttggttggaacaggacctgattctggaggacggttcattattgggagcacccactgggcatagggttggccatccagggtgaggggtgcagtctgtggtcagagcacagacagctgttaatagcagtaacactggcccgtccagccctgactctagccatcccaacaagcccgccctggccactcccaggccaagactcagccctcaccgcttgcttcgttgcatcttgcttagcagaatatttagtcattcatctggcaaatgtttattgagcatctactgtgtgctaggcagttctattaatagcacagggatatggcaaggatcacagcaaacgaagagctctgccctcgaggaccttctgttctgcagccagcctggtggccggctggttctcatcctgcttgccctgtggatggggacttctggaccggtagcggagtcgggcagtgtggcgtgctcggtggtcagacgacatgggacacatcccatcccgctcccagggcgtgccctgtttccccagctttccagaaacgggtttagagaactctccagaaatccttttccttggtcatgtcttccctcttcatccggatgagaaactcactctgacctgtttgcttctccccccagcactttctggcccgcatctccccccgattttcctgggacccacgtaggtgcaaaacacctgctcctccatccttgtcttctggtaatgtttttagtttgctgttgatgtagccttgtcccctccgtgtgtcctggattggggtgggcgggaataacgaggcgattgcaaggactcattgagcgacctgtgtgccaggctctgtacacgctggcccgtgtggtcctgccacagctctgtgagttagcggtcatgttttcagccccatgcaaaggcgcaagcactcagacagcgtggttctgtgaacatgagtgtgtggtgcctcccaggagcagggattttagcgaggctgctgacacataaacacacccccacctccagaagcagaggagaggagcccagggccagggcaggtagctcagcaaggacccagcatgctgcaggtggggccagtgagagtcacttctccagcgagggtcagagaggagagaggcaagagtgttgcaggggcgagggtctcatgagctggggtgcggcaagagggaaggaacaggtggatgcctgtctgcaggagaagctgtgcctgtgtgtagagctgctgtggaccagggggaggcagggagggcacagggtggtgatgagatggagagaaggggtcctggactcgggtgcaacaagagggaaggaagaggtggctgcctgtctgcaggagaagccgtgtccatgtgtagagctgctgtggaccagggggaggcagggagggcacagggtggtgatgagatggagagaaggggtcctggactcgggtgcaacaagagggaaggaacaggtggctgcctgtctgcaggagaagctgtgcctgtgtgtagagctgctgtggaccagggggaggcagggagggcacagggtggtgagatggagagagggggtcctggactcacacgagtgccatcttttcccgtcgcttcttctgctttgccgcctgggcagtgggctggcacccgaaccggcaagtaggggcattgggaaagatccctcaagatttcccaagcctaaattactccttgtggttcttgttcacgtctgcccctgctacctgggacctcctccagcatcctcctccccaaagacttctctgcctttctgaaggaagaccaggctgtttctgtatcgggaggtggtggggacaggggtggaacttggggcccagacggagttcctcagctgagtgctggctctgcgtggttatctattgactggctgtgaacgcagagtccacggggaaatgctggccgcccctctgatttgggtggcaagagctgctgctgctaatacattagacagctgcatggacgctgctattgatgaggagacccaattacatgcctctgtgaaaatccagcggctggcttcctggtggatggagaccccttccggaggctgtcccgggcaggacgttagtctctggggcaatgccagtgagtcagtgagcattaactgagcacctgctgtgtgccctgagcattaaccgagtgcctgctctatgccctgagcattaactgagtgcctgttgtgtgccctgagcattaactgagtgcctgctgtatgccctgagcattaactgagtgcctgctgtatgccctgagcattaactgagtgcctgctgtgtgccctgagcattaactcagtgcctgctgtatgccctgagcattaactcagtgcctgctgtgtgccctgagcattaactgagtgccttctgtgtgccctgagcgttaactgagtgcctgctatgtgcccttggctgtatgcagccatctcagggtgtgtggatgagggtgtgtccgaaaggctgagctgctgttcccggctggcctgagtcacgctgcttctgggtggaaaaggagactcactccctgccaactgtcccattggaaagtgcagcaagtcgctgagaagtggggccggcccagccaaggccatgctgccactggctgatttctgctgctgggcactgtccatgcagggatcatccacccagcacgttgctcatggctgaggctgaatcatagcccttctcaccaactgtgccagccccaggccatggggcatcttcattcagacccatttcttttcttcttcttcttcttcttcttttttttttgagatggagtcttgctctgttgcccaggctggagtgcagtggcacaatcttgcctcactgcaacctccacctcccaggttcaagtgattctcctgcctcagcctcccaagtagctgagatcacaggcctgtgccaccatgcctggctaagttttgtatttttaatagagacagtttcaccatgttggccaggctggtctcaaactcctggccttaggtgatctgcccacctcggcctcccaaaatgttgggattacaggtgtgagccaatgcgcccagccagactcatttctaacagtcttctaaagacactgtctctgggaagaccaatgaaatcgagaaaaagtatcttgaagctgctagcccacctccaacaggacaaagcatgcttccagagggagctttcccatagctccttctaggagctgctatttactgggcattcactgcagaccagaccctggctgggcacttcttacgcctgttctcacctcatctgcctaagagcgctgaagtcaggaactatttgcttcaatttttttttttttttttttttttgagacagagtcttgctctgtcacccaggctgaagggcaatggtgtgatctcagctcactgcaacctctgcctccaaggctcaagcaattctcctgcctcagcctcccaaatagctgggattacaggtgcccgccaccatgcccagctaatttttgtatttttagtagagatggggtttcatcatgttggccaggctggtcttgaactcctgacctcaagtgatccacccacctcagcctccctaagtgctgggattataggcgtgagccaccgcgcccggcctgcttcaattttcaggtgaggaacttaaaagaggaatgaagagaggttaacatgcctcatgcaacacagctgggcagtagcaggttgcccactccccagacctgggcttcgaccaccgggctctgctgcctcctgtgtgtttctgctgcacctaaacctaaatcactctgcatgaccttgcagccgaagcctgagttctggggttcagcatctctcaggcccaggccccagctttgctctcccatctgatcttcaggatgtctgacccagaggcctccagccagccgggctgatccactaacgcttcactgactgtgtgccgagctgcttctcttttctgtctttgcccattcagttcctgctgcccgagtgccacagtctcctcacccctctctatccagtgatttctcttgatcctttaaggtctgtctgggatcttgtgtcttgcaaaaagccttcgttgacattttggttttaagatgtgtccatgaattctttgatgcttctctcttcaagaggtcgaacttgttgtgtgcggtggctcacacctgtaatcccagcactttgggaggctgaggcgggaggatcgcttgagctcaggagttcaaaaccagcctgggcaacatgatgaaaccctgtttctactaaaaatacaaaaattggctgggtgtggtggcagtgcttgtagtccctgctacttgggaggctggggtgggaggatcgcttgaggccaggagatcgagactgcagtgagctgtgatcatgccactgcacttcagcctgggtgacagaatgagaccctgtctcaaaaacaaacgaaaataaaaagacgtgaaacctaggctgggcgcagtggctcacgcctgtaatcccagcacttggggaggccgaggcaggcggatcatttgaggtcaggagttcaagaccagcctggccaacatggtaaaaccctgtctctactaaaaatacaaagattaactgggtttggtggtgggcgcctgtagtcccaggtacttgggaggctgaggcaggagaatcgcttgaacccaggaggcggaggttgcagtgagccaagattgcgccactgcactccagcctgggcgatagagtgagactgtgtctcagaaaaaataaaataaaataaaataaatactgaaaagcacaaagggaaaaatcatctgtaccttcagcctcattttgttgtgtatcctttgggatatttttctccgtgggggtgatgcatgccctcagatgcagtcctgtgtctctctatacaaacacattctttatgtttcatggaaacaatgggatcatcttgttcaaaactctatttttctcacttagcaatgcactgtgaatctttgcagtagcatcatgagcacagacctcctcttgtcgtttattgtatgagtgtacccctgtgccttatttacttttcctttcacggttgggtacttcccccattgcttagactttttggcccttaaacagtgctgggacaaacatccttgtacatgtgttcttgtggcatggcccggatattgttctagggtaaattccttagagtgggtttcctggaccaaaggacgtggatattttaaacggtttggatacatggtgcctttcggaaagctgtatcaggtgtgcactcagcagagttcctgcagcccggggcctgcagactggacacagtggctgtactgtttctcattcctgccagctatatgttcctgccacatatccttgccaacactggttgatctgatagtgaaagatgttatcttactgtgatcttaatttctttcataactagagaggttgggtttgtttccatgtgttcattggttattttatgtgtgtcctttaatcatttgttcatgtcctttgcacatttttctgttttttttttcttttgagacagtctcactttgtcgctcaggctggagtgcagtggtgggatctcagctcactgcagcctccacctcttgggttcaagtgattctcatgcctcagccttccgagtagctgggattacaggtgtgcgccaccacacccagctaatttttgttatttttagtagagacagggtttcactatgttggccaggctggtctcgaactcctgggctcatgtggtctgcccgcctcagcctcctaaagtgctgggattacaggtgtgagccaccactgcaccagacccctcatttattgatataatggcttttggatagtttgaggtatggtcttccagatcattttctatgaatttatatgcatacattatatacagtatctttttttttttaagagatggagcctcactgtgtcacccagggtagggtacagtgtcatgatcatagctcactgcagccttgaactcctgggctctagcaaccctccttgcctcagcctcctgtgtagctaggattacaggtgtgaaccaccgtgtctggctgtttttataaaattgagattatattcaatgtattgtctctgatttcctccacccctcaacttaatatatcttggagagtgtcatatgtaagcaacatgaatctgttgctgtctttttgaatgattgtatagtttttttgaacagctttattgagatataatttacgtatcataaagtcacccatttaaagtgtacaatttggccgggtacgatggctcacgcttgtcatcccagcacttcgggaggccaaggtgggcagatcacctgaggtcaggagttcaagaccagcctggccaacatggtgaaaccctgtctctaccaaaaatacaaaaattagctgggcatgggggcgcatgcctgtaatcccagctactccggaggctgaggcaggagaatcgcttgaacccaggaggtggaagttgcagtgagctgacatcgcgccattgcactccagcctgggtgaaaagagcgaaactccatttcaaaaaataaaaaataaaataaagtgtacaattcagtggtttttggtggtattcacggagctgtgtaaccaccatcataatcagttttagaacctttttattgctttgaaacgaaatccgtaccttttagctatcaccttccaatcccccatccccctcagcttaagcaagcgctcatcttctttctgtctctatgaggttgcatactctggacatttgattaaaatggaattatggtcctttatctctgacttttgtcttttttaaattttttttgagatggagtctcactttgtcatccaggctggagtgcagtagcgcgatcttggctcactgcaggctccgcctcccgggttcacgccattctcctgcctcagcctcctgagtagctgggattacaggcgcccgccaccatgcccagctaattttttgtatttttagtagagacggggtttcaccgtgttagccaggatggtctcgatctcctgacctcgtgatccgcccgcctcggcctcccaaagtgctgggattacaggcttgagccaccacgcctggccttatgtaagagtttttgtgtggacgtgtattttccattctcttgtgtaggtgtctaggagtggcactgctgggtcatgcgggtacagaggcaggttcttaactgcttttctatacctcctcctgtagtgagggaatttgtcatccatttggttcacatatcagtacttatttatttatttatttatttatttattttacttatttactgagaggcagtcttgctctgttgcccaggctggagtgcaatggtgcgatctctgctcactgcaacctctgcctcccaggttcaagcgattctcctgcctcagcctcccaagtagctcagattacaggtacccgccgccaagcccagctaatttttgtatttttagtagagacggggtttcaccatgttggctaggctggtcttgaactcctgacctcgtgatccgcctgcctcagcctctcagagtgctgggattacaggtgtgagccaccgtacccggccctatctctaccttttttcatttggtgtaatgcactcaagggtcagcagtgttgtggcaggtatcagtatatgttatttttattggctgaatattattccatcgtatggatacagcacattttgtttattcgtcagttgatggacatttgggttgtacccaccgtttggcaagagtgaatactgcagtagtgaatgtttgtgtacaagtatttgcttgagtacctgctttcaattcttttgtgtatattcctgggggtcgaattgctgagttgtgtggtcataattccgtgttgaacatttccgggaattgccaaatgattttccacaatggctgtactgtttgacattcctaccagcaatagatgagggatctgatttctccacagccttgctcacgcctgtgatagtctgtgttttgatcgtggctatgttagtggtatgagtggtgtctcattgtggttttgatttgcatttcctgatgactaatggcttgagtgtcttttcatgtacttattgttcctttgtatgtcttctttgggtatatgtgtatttagatcctttgcccgtttttaaattgagctgtctttttctgactgagttgtaagagtttgtttttgtagagacacgtcctttatcagatatacaatttgcaaatatttcctagcattctgcgggctttcttttgactttcttgagagtaagtatgaggaattcgtattaacttttctttaaacgtttggtagaatttacaaatgaagccacctgggtctgggctttccttcgtgcgtcgtttttttgatcattaatttgatctttttatttgttatatgtctttagattttctatttcttactgagtcagttgtgataggttatgtttttcagggaatttgttcattttatcgaagttatctaatttattgacctatagtttatagtacttgtattttattctgtgagtgtagcttcttttaaccaattttctgcagacttttaagttgtttttatttttttactgttagaaacgatgctgcagtgaacatttgagcctgtctgtctttgtgcacattgcaagtgtgttagaggatggattgttagacgtggaatcgcgtgtcagaggtccgtgtatttaacatgttgattgcttctgttgcattatcctcctcctgttcatctttctatccgtattgattggtataagctctttacgtctgctaatcctggtctcctaagcctggagatggtaagaatgccccgcgtgggtggtgcatgtgcacctgagcaagttggaagaggaggtttggcatctggatgtttggcggctcacttctggtcaagggagttgggcgcgggtgccctaagcccacccctgtacattcacacgtggggtttctagatgccagatcctgaactgctggtaggtcggagctttttgcctctgacacgctggctttggcctgacagaggttgtctggagtcaacagcagggctgggtctctccagggacttcaccaggctccttcccagggcgggtctgggaattctgggagcagtgggagctccaggcagttctggcccatgggtgcctgcagaggtaggaagagtgcttggaggccccacctctgcctgaagaagaaccgaggacactgttcctcatccctgctttcttttctctcgtcttcactggggactgtctgttctgggcactcatgacctcccggcttcgcggtgcccagatgtgggcagtgacattagtctgaggaggagtagctgttttcaggggataggaagtggggtggcctctgtgtgttttgttggggtagagttgccagcccctcacgcttccattccgcttcccttttctcctttttgtttttcctggatacacaagggtggcaccaaagtaggtcaaaggtttggacaagtgcaattgggattttaaaaataacccatctaggctgggcgtggtagctcacgcctgtaatcccagcactttgggaggccaaggcgggaggatcacaaggtcaggagttcgagaccatcctggccaacatagtgaaaccccgtctctactaaaaatacaaaaaattagccgggcacgatggcgggcgcctgtagttccagctactcgggaggctgaggcaggagaatggcgtgaacccgggaggcggaggttgcagtgagccgagattgcgccactgcactccagcctgggtgacagagcgagactctgtctcaaaaaaaaaaaaaaagaaaaaaaaaatccctctaggcccctggaggcctcggttcaatggtgttcaggctttgcttcaccagctttagggtgccagagtggtgccttgtgggcaggggaccgggcaggcagaggcagaggtggcatagcgggccctccccctccttccctggctgctgtggccacagcgaccctgctttcaccggttggttttctgtatcagggtgtggaacgccgcttgtgttggacaccttggccccactgttgggttgaaaacatcctaaatatggctcctgccggaggctgaatgccgaggacgataggcgtttgcagaatttggctcttcccaggggccggcaggcccctttccttgacagaggctgagtgtctgctcccccagcaccattcatttgccagcccaggtgtgccttagcctctctcctgttgtatggggtgtttggccctctagccctgcaaaggcaaaatcaaattatcttctctgttgatccaaatgaattttgtccctggggaagccccaggctcagcttcctgatagttggtgaggaagaggcttttgctgtggacctcccggctgatccctgtctttctgtccccctgcttttgtctttcagtcgtcggagttctttgagatgctggagaaaatgcaggtgagtacgtacccccaccgtggcggggaagaagcccagccccagatgtgggtggcatagggaccaggcagaacccacgggcagaagccgggtgccctggacgggggtgcagagaagagacaattgcatccccttggcccagacaacctgaggccattttgctgttgaggggtacggagcactttgggaagactcctgcggagggacagggaggataaaagcagaacttccccagcagggcagctggggaggccataagccctgtggatgtggaggagggtttgaagggtccattgttcctagcacgagctggaaagaaggcctgaaagaactagctgcttcttggaggagtcatcttgcatagggaggcagaggggtggggtgggaggctggcttgtgttcaagtcctgcaccagacacttactagcaccagttcctttcctgtgctaagcctccataaataaataagaatgaatgcacccacttacatggtggttggggtgaaatgagataatcggtgtaaatacttggtagacactacataaaagttggtgtgtgatgtgggtttgggggttcttcgttgttcctcaccagggtcagggctcccaggtaagagctgctgccctggggagtatgtgcagaggcccggcagggttcattgacgtgggcgggaagactgggaagacaatgctgataatacacctgtagctcaagcacttcactgggctcagagattgacaggcgtcatttcttcctgctaaggccttcagaagtaggcatattattattattattatccccataggacaggtgagaaaatcgaggcacagaacaattaaaggcagcactcaaagggtgcgtggctcataagtagcttcagagccagagagtccagccattatgtcatgatgctttttaccataagtaggtgctccaggctcaagggaggaagattctgcaataatggtctggaagtcctaggaggaggggcaaatacagcacccacggcagtcctgagatgtgggccaagcagccaggtgtccctgagggtggggagggaggggagacgctgtttgaagggaaagtattgttactgccgtgtcaccgagagccagttattaaaattgtcctctgcgcccagcagcgtgtagatgacagactcatcttctacgcatttagggaacttatcatcagcttgcggaaaccaggctggcatgtgcctcacagtgaggggtgggagatggtatataatcaagtgctccattgcttggagcaaagctgggattttcgcctctagtcagtgggatcctggcactctgggaagctggcagggggtttgcagcccacccagccttctctccggttgctcctcagatcctctcttccttctcccccagctggagtccccttcccacaactttgccccacacagggtctctctgagcacagcattcagccccagttaaccagcctcagagtgttgtgttgtgtagaggctgcagggcttgtctgttcatgtagatcgggtgctttctagggtaggggtcttgttttattctccctctgtctgtgcaatggctgatccccctgggtagcgtgcctgttccctttcagttgagactgttgaagccaaatttctgggtgtttaagtccctaccatgtgccccctgggcccagcctcagagggttcactcttagtaagaagctcacgtatggggcactgctggccatggagtgcccgcgtgggccttgagcctgggctccatctctcttcatcttgcacgtgtggaaactgaagctcagagcagtgaagcgcccgggtcacttagctagttgtgaagagctgaaactggaatccgggattcccgatacctagcccaagagtctgggaactgggagaaggcagaagctttggattccttcagtcctgggttcaggttctaaccctgacgctttctagctgagtatcttcagtcaagtcggtttccccttctgagccttaatttcttcactgaggggagaaggggaaataaagataatacccattgtggccagttgcggtgtctcacacctgtcatcccagcacttgggaggtcgaggcaggtggatcgcctgaggtcaggagttcgagaccagcctggccaacctggtgaaaccctgtctctactaaaaatagaaaaattagctgggtgtggtggcacacgcctgtaatcccagctacttgggaggctgaggcaggggaatctcttgaacccgggaggtggaggctgcagtgagccgagattgcgccactgcattcagcctggatggcagagcaagactccatctcaaaaaaaaaaaaaaaaaacaacaaaaaaagacaatacctctagcaaaatagcacatggaggagagagggccccgtgctgggcagtggctctgcggtaggttattaggggagggagtggcgtggggaggggatgggaggaagtttgctctcctgccctcggggctgttcccagacagggatgactaatgcaggccaaacaaaacagactcctgccctcactgcccccacccgccatctgcccagtttgccagctgggacagggtctgtagggccacccaggtggctttgtgtgtgtgtgaggggagcgcctgttcagtgggaacggccctcccacgccctcctgaacaatgctgcaaggcgactcagcccagggaagtccgcagaggctgcatgtcaatccacccagttaacaggagccctgctgtccacagagtgtggggtacgtcacgcgcttggtgagccggtgacccggcttcaaatctaggccctgccactcactggctgtgtgaccttaggcaagcagcctccttctggggccccagtgtcctcgctggtggaaagtgctgtgagtttcaaaggaggccacagagagagctagcttgggaaggtcaaaatccctgtgcattagtgttgtgaccaggcagacgctgcttctggactccttctgcttcagaggggacctgtttcttctagtttgtgtaccgtctcatactgtcacccgattttctcagatagtcttggaaacaccacgtgttcccctcctgcacaacacggttaagtcagaactcagtgatagaactgctggaccagggccaggcgcagtggctcacgcctgtaatcccagcactttgggaggctgaggcgggtggatcacctgaggttgggagttcaagaccagcctgggcaacatggtgaaaccccatctctactaaaaatgcaaaaaactagctgggcatggtggcacatgcctgtaatcccagttacttgggaggctgaggcaggagaatcacttgaacgcgggaggtggaggttgcagtgaaccgagatcccaccactgcactccagcctgggcaacaagaatgaaactccatctcaaaaaaaaaagaagaggctgggtgcagtggctcacgcctataatcccagcactttgggaagccaaggcgggtggatcacctgaggtcaggagttcgagaccagcctggccaacatggtgaaacctcgtctctactaaaaatacaaacattagctgggcgtggtggtacatgcctgtaatctcagctactcgggaggccgaggcaggagaattgcttgaacctgggaggtggaggttgcagtaagccgagatcataccactgcactccagcctgggcaatagagagagactccgtctcaaaaacaaaaacaaacaaacaaacaaaactgttggacagggcactgctccccagaagtgaattcttcagatacctgtagataaactcccttagtccagtcccaggcatcatatctgatccttgcagtcatccttccattagtgagatgaaaggtgagcgtctaatcctcattttacagatgacactgggggctccaagaagctacgctttgtcaagggtcacaaatagtaagttcgcagcagaatgagggccagcaccaggcctcctgcctgtcccttgaaggcctgttggcgtgggctctagagcgctggctccgacaccaacaggcatgacttcctatgtttcccttcccttactggctctgtgaccctaaggattttttttttttttttttttttttaatttgagacggagtttcgctcttgttgcccaggctgaagtgcaatggcgcgatctcggctcactgcaacctctgcctcccgggttcaagcaattctaccgcctcagcctcctgagtagctgggattacaggcatgcgccaccacgcccagctaattttgtatttttagtagagacagggtttctccatgttggtcaggctggtcctgagctcctgacctcaggtaatctgcccgtcttggcctcccaaagtgctgcgattacaggcgtgagccactgtgtccgacaagacagctatttaagctttgaatgataataccgcctccttcatgatgataatgacccacagcatttattatataccagtcagtgttccaagtgctcaacccattgttaacctttaaccttcaccaccatagtcgatgccatcatcattcccattttacagatgagaacattgagtcacagagaggtttctgtgacttgccaaggtcatcaggctgataggtggcagtgttgggatttgaaccccggcgatctggctcaagtctatgctgttagcccagcggcgctgttgcctcacctgaggctgctgtgaggcccgcccctggccaggtgtgatgtgtgcaggcccagcacgggccagcttttgctgctgctcctgttactaaccccctgtaaggccaggtgctctttatctggccctgtcttctgacctttgcttttctgtggatcctgttttccttgtttctataggggatcaagcttgaagagcagaagccgggaccccagaagaacaaggtgggctgggtgggtgagggggtggccagacggccctggtgaggggctagggcgagaggaaggcaggaggggctgccgggatgctggggtcttctgtctcacacctgtctaactctgactcgcaccacgggccgcttcacgactgccttgttagaccagtgcacggtgggcagcagaggggtcctggcttgatgccttaggacagcttcagagcaggctgggggtggaggcctcggtgggacctcaggcttggccgtttggcccggctcttccctaccctgtgcagtgtgtaagggtgtcaggctctgtgccccgggttccagtgggcagtcagctctcagcttcccaacccaggggtgccgcttatcacttggaggtcagtccgcctgcctggaaaggggtgctgggggagactaggggtcattttccggaatgagcgttctaggatgagaagctggtatcacgaggggtgagaagttcagcaccttcggacactgcatcatcagctggcagggtttatgtttgggttctgtcagtttggagaagaacatgggggatgttagattccagagctgattctgagctgttcttccatcgaatgttcctccctcaaagcccccccacaacatatcccccttgcaagacctggaaacagtggtcagactttacgggcactgccgggactaacggtggcatcatctggtttgtcttgcaggacgactatatcccataccccagcatcgacgaggtaggtgccctcccctcactcccacctgccctgcagcctgctctgggtcccgtccctggggaaatgatggcgatggcctgtgcccagccccccaggggagagaaccttgggcctgggacctctcttcctgtctttgcctttgtaacctcagcttctccatgtgttaagttgggggtgctcatctaggcctttcagccctggggctacagggttggcgaatgaagctggaggtgttgtggggcttggaggaggggttcatgtcactgcctttggcctcaagtaccagtgggtaccaggccccactcctgggagcagcgcagaggggacaccgccaccggccccctccctcccctgcggtcccaggggagcgcacgaccctccctctgccttcaggttgtggagaagggaggcccgtaccctcaggtcatcctgccacagtttgggggctattggatcgaggacccggagaacgtgggcaccccaacatcgctggggagcagcatctgtgaggaggaggaagaggacaacctcagccccaacacatttggctacaagctcgagtgcaagggtgaagccagggcctaccggaggcacttcctggggaaggtgaggctgggggagaggagctgctgggggttgggggcagaggctggggacgctgggagagaggaggtaccaggcggtaggggatggggagaggttgagggaggctgtgggaggctgtgggagaggagctgccaggggtgggggtgaggctgggagaggctgtgggagaggagctgccggggatgggggtgaggctgggggaggctgtgggagaggagctgcggggggtgggggtgaggctgggggaggcttgggggacagaggagctggcgggggtggggggaggggctgggggccctgggggagaggagctggcgggggtgggggtagggcagagtgccccccttttccttggcctcttacctccttcctagtctgtccttttgttgctgcctgctgctgtcttagttggagaggtctgagggcctctgtcctgggataggggacggggcaggggagccatgtaacaatcagggaggcccagtgccatgagtccttgtggggaccaccccccgcaaatgtttcgggaggcgatggaatgggtagtgtttggggtgaaggacggtggctggagttttgactgttcgaggaaaaatgtgttctcacacctcaagaagtctctgtttccatctaaatcacgcaaatctctccgtcctcattcaggcagatcctctgagtgcttgtactgcatagtgtctgcgagcctctgattgcttaaaagtgacaaagttaaatttaaaagaatagattctgcccttcagatttaccaggttcttgatgtactgagggcagattccggaaatctgtagcctgaggccgctttgcagagtctcacgtgacgggaggctgcctcagagcccctgggtcttgttagcatgcagattccagggcctcagtctgatccagcaggtctggggagctgtgtttttcgcccgtgttccccgagccagggagtgacccactggctcaggacacctcccagctcccctgggtggaggtgccagggttcctccttgctgtcttgccccagatagtgtgaactggtgagggccgccccatgggaatgagaatgtggactcggtatcttgtggttaagaacttgcccttcagagtcaagacagctgtgcgtttgaaccctggatctgtcccttactcatcgtgtcatcctgggcagtgacttaaccccccgaccattggttttcccatctgtgaaatggggatgatgttctctcccggatacagctgtggtcaggactgaaggagatagtgggtattaagcccctggcacggtgcctggcgcctcctgaggatccggccgtcggtacctgttaatgtcgttgtcattgtcatcagtagcatccttctcttccttgttgctgtggggcttctcctggtgaaggaggtggtttagggggaacatacctggaaggtttcttcctccttcctgctcacactcagtttctttttttaggatcatctaaacttttactgtaccggcagcagcctggggaacttgatcctgtccgtcaagtgcgaggaagcagaggggatcgagtacctccgggtcatccttaggtagggctgttgcgctgcttgaggccacttctcttccaggcagggctctcatcggtggtgtgggggctgggatgggactcagaaataccagactgaccagtctggtctgggtgcactggctgacggggacaggcctgctggaatcctggggctgtgtctgaagttgcctagcagggagacccacgcgctccaccagttagctgacagtcagaggggcatccaggtctcaaggtcacccagactgtaccccttcctgcccctctttcttacaagtccatggctctgaggaagacgggaagaaaagtagggatggttcagtgtgactcatcctgctgagacacagctccgagtcctgggagagggttcgccagagtgctgcctgtggtatacatcttgccaggaaagatagtgccctgtgtgtttgttgtatgggctgggttccctgagatgcactgatgttcacaacaggagcactgatttatagcggaagccagggcacctctctctggattgtgaccttctcaagggcaggagctggaactggtttctgtttggtttagctaacatgttttgtaaaacctcctctgtaccaggaactgcgataggtgttagagataccatgatggctgagacttggtccctgttctctgaaaggcatatggtttcatgaatttaatgtgtgtcacgggtatgattttagcaatatgcacaggttgctatgggggcacgaaggaatctgtgtcttatttatctctgtccctggttgggtggtgcttagcagaatgctgtgaacctgtcaggctctcaatccttatttgtggagtctaattgaagattcataaaggtatttggaaaagagcaatcacatttttttttcctgcccaaattttgagataaatattggagggaataaggacatataaccccactttgggaaaggtgggggtccgtggtttcaggatgtcgtcagcacccatccaatcttagtttgtttcttatcaagaaaggaagcaattttctctacagaggttcacttggctggaaatcatatttgcaaggcatagaagagtcaattaaatagcaagagccaattttctgagaggttaatacctggatctccatctccaaataggatttccagctaggtgaacctctgtgaagaaaattgctaccttaataaaaatcagaccgagactgggtagcatttttgaataagatgacaatggaatacaaagatctaaccccctttttctaatactgtatcctccattaggactggaaatgctgcttcggggctgaaagctaagaaaaatgccgggcacgcaacacgcactttgatggttttttgtttttgttttgtaatctatgggggcagttaggactaaaagtaggtgaatattgagagttgaaccccagattctcttccttagaaagcagtgttgtggccaggcacggtggctcacgcctgtaatcccaggactttgggaggtcaaggcgggtggatcacgaggtcaggagatcgagaccatcctggctaacacggtgaaaccccgtctctactaaaaatacaaaaaaaaattagctgggcgtggtggcgggtgcctgtagtcccagctactcaggaggctgaggcaggagaatcacctgaacccaggaagcagaggttgcagtgagcaaggatcgcaccactgcactccagcctgggcgacagagtgagactctgtctcaacaacaacaacgatgacaacaacaacgacgacaacaacaaaaagcaatgtcgtatgggaatatatgaagttggagatctagaagaatcctgtcctctttaggagtgagagtgagccctggaatagacagggatctttccacatagaattatttttgttgttgtgggtcaacagcattgaaatcaatgccccaggaagcccagcaagctcaaatgtggctctcccagatggaaagctagtaggtagggtggtgacgagaagccgtaccccagctcggaagttgggcagtcacatcatgtacttggagtgattgccaggccaaattggaaaccagacataagaaattggctccacggtttagcagctttgccagacacaaagaagaaattatccagagatgaaattcccctgctggcggtgactactgtccaaacttcttcctcattccccataggcttctggattttttaacggatgtcccaaatttataacaagcagctctccagtctaagatctaagtattctaacagcctgtgtgtgccatgagagtagccaagaagaatctacccacagtttggagacaatgagcctgtgtagatttcttctgtttcaagtttggatataaagaagaagaagttttatgggtttgtaaaagaagagattctgcctctaaaaaagcataaactagttagagaataacagagttttgaaaagtatttacttttacagaaagccaggtgaatttgagagatttattaactttgaattttccacaaacctctagaaaaaatacacactaagaaagaaaagatagagtgagccaacagaatgggaggaaacagttgctggttaagttagggagataataaaataaaaatggacaaaaagaattttaaatagtatatgaaacagtacaaagcagaatctactttgtagaaaatccagttattaatatggggaacaagcttaagaaactctcacataattcaaaggaaacacaactttaaaatgatgagtgagatgatgatgaatatggagggtagtgagcaggaattacacatatggataattgatgttgtcaagctgattgaagacttaaatctgaaaatcaaaatgactcacccattaacagacaaaatcaatgaaaggaaactaattgctggatgtactttgatgaaaatttagtatttcatagatataaagttactagtagtagaatggaagcattccaaatagtaagagaagacaaagaaaacacactttgtctgtagaaaaagaaaacaaaggaataataaagaaatatgatagaagtgtgcgtacatatgtgatgataataaatataaatgacttaaattcgattgttaacaaagattctcgatttgggtcatctctccaaaaaacctacacaaattgatctatattttattaaagaaagtaactcagaatatttgaaaattgttaagaaaaaaattagaaaagtcaaatacaaaaagaaagcgggattggcaatattaatatagaaaagtagaattcaaggcaaaaaagcaatcagtgtgataaagagggctattatccatcttttcataaaaggtaaaatcaataatgatattttatattgtcagtagtatatattatagtatatgtatatgtacacatgtatgtaatgattatggaaaaattcacagaatacaattgtaatggtagatttttaacacacatcacttgacatatcaatactagggttagaaatgacatttattcatctcaatatcaattatatacatatttttctttatctatctatctatctatatatatatatatctgtttctgtatctaactatcagactttgatcctctaacagattttacttcttttcaattgcctttggaatatttacacaaattgattgcatagtagatcagtggttttctgtggacctgctacatcagaatcattttggatctttaaaacaaagtaaaacaaagcaaaaacaaacaaaaaagcccaacaaacaaaaaccaaaacctagacttctaggctccaacccaaccatttgaaacacacacacacacacaataaataaataaataagatatgtaaagatgtgtaaatatatatattctttttttttttttttttttttttgagatggagtcttgctctgttgcccaggttggagtgcagtggtgcaatcttggtttattgcaacctgcaactcccaggttcaagcaattgtcctgcctcagcctcccaagtagctgggactacaggctcatgccaccacacctggctaatttttttgtattttcagtagagatggggtttcgctgtgttggccaggcttgtcccgaactcctgacctcaggtgatctgccctcctctgcctcccaaagtgctgggattacaggcgtgagtcaccgcgtctggcctaaatatatatattcttatttccttccttatttccacaggattctgtagaattctgtaacttgcttctcttaacaatgtatcttagagatttttccgtattagcatatagagaatgtcttaatttattttactgctggatggtattccattgcatggatgtgaaataatttatttaatacatcccctgggccgggcatcgtggttcacgcctgtaatctcagcactttgggaggccaaagcagatggctcacctgaggtcaggagtttaagaccagcctggctaacatggcaaaaccctgtctctactaaaaatacaaaaattagccgggcgtggtgacatgcacctgtaaccctagctactcgggaggctgaggcaggagaatcacttgaacccgggatgcgcaggttgcagtgagccgatttggcgccactgcacttcggcctgggcgacagagtgagactctgtctcaaaaaaaaaaaaaaaaaaaaaaataataataatacgtcccttgttaatgaccattgccaatattttggtaacacaataatgattaaatgaataaccttgtgcagactcagtttttatggattatgatagtttctcagatgagatagctaggttaaaacataaatgcatttgtattttgatagataacgttaaattgccctctgtaggggctgtgtaaattccaactttcaccagtaatgtatcaaagtgcttcttattccaaagcctcttcagtagaatgtattgtcaaacacttggatttttgcccgtctgatagatgagaatagtatttagtgttgtttaaatttataatcttaatatgaatcatgttggacatctcttcatatatttaagaactgcctctatttatttgctatgaacagtttataagctttgcttctttttaaattgggctgttatttaagattctattttttaaaatcttggctaggcacagtggctcatgcctataatcctagcactttgggaggctgaggcgggaggatcacttgagcccaggagttcaagaccagcctgggcaacacagggtgaccccatctcttaaaaaaaaaattagctgggtgaagtggcacacacctgtggtcccagctactcaggaggctgaggcaggaggattgcttgagcctgggaggtcgaggctacaatgagccatgattgtgccactgcactacagcctgggtgacagaacaagaccctgtttttaaataaataaactaaatcaatcaatccatcaatcagtcgacctatgtaactaacttacttgtaggtaattatcgatagcagctataattaggaacttctgaaccacaaagtaaaactaaatacatttcagagagcaagctctctgctggatgtattcacttacaatttgatgataaaactagcaattaataacaaaataatgatttaaaaaaaccactaaaccactgagaagtaaacaatcccaatactttcttaagtagcttttaggccaaagggaatagaagctgcagttacagaatatttataaagtaatgacatttataatactatacataaaacctatgggttgtattcaaagcaatacttagaaaaaaatttattaccttaaatggtttcctattaaataagaaaaagaactggcaggtgtgttggctcatgcctgtaatcccagcgttttgggcggctgaggcaggagggtcacttgagcccaggagttcgagaccagcctgaacaatagaatggacctcatctttacaaaaataaaaataataataatacagtaaaataaaaataagagtgatatttgcaagttgttattattgttagcaacttctctgtgtctcattttcctcatctgtgaaatgatgatggtagcatgtaccttgaaattattgagtgcttacatgtcctggtgagtgaggaccttacatgctgcagctgctcagtaatggtggctattattattatcaatattgttacctaaagaaagccagaggaaggaattcacaaagattaaagcagaaataaataaactagaaataaaaataatttgagacttgataaacctaggtttcttttggaagaagcaataagataggtaactagctagtcgaatatagatgagaagagaaaataagaatatacaaaattagtcataaaaagatgcatgaccacagatgtgaagaagattaaatgattactaatggatgctgtgttcaactcatgctattaaattgcttctgtttctaattttatttgaaattttatttgaaacagatgcctttctaggaaagtatgccaaatgtaacttaagatgaggtaaaaaagaaacctgaacaaaccggtaactgtggaagaaattgaaaaagttctcaaagaattatctcttcaaatgtttctagatctagatggtcttgcaggaaggtgttttaaactttaaaggagcagattttatgttatttaaactgttcaagagaaaagaaaaaaaaatatggaaagcttcccaattaataatgcttaaaagagctttatgggctgggcacggtggctcacgcctgtaatcccagcactttgggaggccaaggcgagtggatcacctgaggtcaggagttcacgaccaacatgagtgaaacctgaaatgagcctggccaacatggtgaaaccctgtctctactaataatacaaaaaaattagctgggcgtggtggtgcacacctgtaattgcagtgagccgagcttgtgccattgcactacagcctgggtgacaagagtgaaagtccttctcaaaaaaaaaaaaaaaaaaaaaggatctttttgaataaaatcagtcaaatgagatgcaaaaaaagggtaggggccaatattccttacgaatgtagaaatcaatgttgtaaataaaatagcagccccagaaactcaaatctaaatagactaataagagtaattcactatagccaagaaagagttattttaccaatgcaggatggttaatattaggaaattcattcagtgtttgtttacccaaggcttaatatatgccggactttgtctggttgtagagatactgtgaggaatgagttcttgctacttgcccatagaaggcattcagtccaaatgcactgcgttttagagattcttgtttctgttctcggtcttactcatcatcttcttcttagggacagggatcattataggctagtgaggctgatgggagacgtaggtggtgagggagaactgaaggcaatgtggagggtgtgtctgagtgtgtgtagggttgataaatgatgctagagaagtaagaaaaggctagatcctgtaccagtgatgtttaggagctcagattttatcctaagagtcataggagaggtactgaagggagaaggtcatgatcagatttgcacagtagaatgatcactctggcgccgggcgtggtggctcactcctgtaatcccagcactttgggtggccaaggcaggtggatcacctgaggtcaggagttcgagaccaggctggccaatgtggcgaaaccctgtctctactaaaaatacaaaaactagccaggcgtggtggtgggtgcctgtaatcccagttacacaggaggctgaggcaggagaatcccttgaacctgagaagtggaggttgcagtgagccgagatcacaccactgcactccagcctgggtcacaagagcaagaatccttctcaacaaacaaaaggaaaacagtaaaattgttggaactcaagaaataattgtagaaataaacaacaacatgggataaaatctagtctgtttaaataatgaatttatgaattggaagatagacccaaggaattcctccagaacacagcacagatcaagagatgaagtatatgaaaaagaagatatgtggataatagactgggaggccccagcatgtgtcataaagacgttccggaaggaaagaataaactagtgaacaaatatccacaaaaatattagatgagaatgtttcagaattgaagaaaccacacaccgtgctgctgaaagtgatttaaaaacaaaacaatacttctagacatgctgaagtgaaacatcagaaataaaagattttaaaaatttaaaagaattttaaaagctgtctgaggatacagacaagataatctatgatctaatgagaactaggatgaaaatagatttctccctatccatgatagttgttaaagacaatggggcaatatctttcaagtgtttaaaaaaagaaagaaggggccgggcgtggtgtctcatgcctgtaatcccagcaccttgggaggccaaggcgggcggatcacgaggtcaggagatcgagaccatcctggctaatacggtgaaaccctgtctctactaaaaatacaaaaaaaaaaaaaattagctgggcgcagtggcaggcgcctgtagtcccagctacttgggaggctgaggcaggagaatggcgtgaacccaggaggcggagcttgtagtgagccgagatagcgccactgcactctggcctgggcgaaagagcgagattccatctcaaaaaaaaaaaagaaggaaaataaccctcaacctaaaattctatacctagaaaagccaaagacaaaataaaactgctttcagacataaaaaaatggagggaatgtcccactcgggctctttctgaaagaattactgaaggatacacttcagtcaaaagaaaagaaaaaccagaaaagatttaattagaaagtgacaagaaatagataaaatatgttgataaatttaattactgatggtaaaaagtgggatttttttttttgcatgtttaaaaggaggcttgaactaaatttataaacaaaagtagcaaggacaatgggaaggaaaaaatgttcagtggataaaagcatactctgttgttgcttatttgtgcccctcaggagagagaatacaatcttagagtttgatgaaaaaaatataaataggtgtattggaagatacagaaatacagtctatagcaaattagtaggagataaaaggaggattaacaaaaagaaagcaaaaaacaaaacatcaattgaaggtaggaaaggaagagaaaaaaaggaaagaaaacacagggaacagaaaatataaaatgatggtttagaaataatttcaggccagtcacggtagctcacgcctgtaatccccacactttgggaagccaaggtggatggatcacctgaggtcaggagtttgagactagcctggccaacatggcgaaaccccatttctactaaaaatacaaaaaattagctgggcgtagtggcatgtgcctgtattcccagctactcaggaggctgaggcaggagaatcacttggacctgggaggcagaggttgcagtgagctgaaattgcgccacaatactactccagcaggtgacagagcaagactgcgtctcaaaaaaaagaaaaagaaaaagaaaaagtttcaaatatgatagtaattgcaataagtataaatagattaaattagcctattacaataccagcctatcaaattgaattaaaaatatagctatattctgcttataagagacatacctaaagaaaaatggtgtggaaagatttaaaataaaggaatggaaaaagatatgctgggaaagtaccatgaacgttggtatagcaatagtaatatcagacaaaatagaatttcaggacaaaaagactagggataatgtactcctttgtaacctggaatacttcttccccactcctgatgtttcctgtggctagagggaatactttggtgtaacacccgggctctcttcaccctccctgatgggcgtgtttgggagcaggaactcacgtgtgtagctgtgttccttcccccttttcctcttggacagagctgccctgagggtggtctcctgtgcagttaagtctcacctgagcagctccatgggagggggcttgcccctggcccgcactgcctgtgactgggtgggtaagttgggctgattctggtatttagttagacccgtttcatcttcacactaagccgtgtgctcccacgtggtggagtgattttgactccgaacaccttactctgttgtttgtttgcttttgaatttgttcagaaactgggcagggaaagagtcctttttctaggtcccccagaggccttggcctgtgtgattataaagagggcacgttctgtttttcatcaccctgatgttccgtgaacacgctctgttcacccggaatatctaacagtcattaacttgtacttaataacgtcgtcttgaattttaaaaagcaaaactgagagaaatagaaggagaagtggataaacactgagttatagtgggagattttgacaacattgctgagaacccggtggattgagcaggcaaaaaattgtgaggctatggaagacttgaaagatacagttaacaaatttgatcttggctaacatgtattcttgctcttagcaaaagaaaaaaatacattttttcaagctcacatggagtggcaaaaagtaaaagtccatgtattaaagtcaacacatttcaaataatatcatttagattgtgttccttgaatataagacaaattatcaacaattaaaatactggaggggaaaaaatctcatatttggaaagttaaaaactttaaaaaatgactaatggactaaagaggaaatcacaaaagaactgacaaaatatttagaactaaatgacagtgaagatactgtgtatcaaattgtgtgggctgcagttgaagtggtatttagagagagatgtatagttctaaatgcactttaaaaaaagattaaatgagtaagtatgtaggtcaggaagctggaaaaagagtagttgaaaaaactctgaagaaaatagaaggaaggaaataaaaaagacaagaaccgactagtgaaataggaagcaaaaataaaaaaggatagagatggtaaaagaaaaaactcagtcttactagatcttactagtctttcaaaagactagtaagatcgataaacctccagctaaaactgataagggaaaacaaggaaaagatacaaacaggccaggtgtggtggctcacgcctgtaatcccagcactttgggaggctgaggcgggtggatcacctgaggtcagaagttcaagaccagcctggccaacatggtgaaatcctgtctctactaaaaatacaaaaaaattagtcaggcgagttggcgggcacctgtaattccagctactcgggaggcggaggcaggagaatcacttgaacctgggaggcggaggttgcagtgagccgagatccagcctgggcaacaagaatgaaactccatctcaaaaaaaaaaaaaagaaaaaaagaaaagaaaagatacaaatagtattacagcagtaaaggtgaggacgcagttagaaacaaagatgaagtcttcagagaataccaaaaacaactttgtatcaatgtgcttaatgaatgcttttatataaacatataaatttccaaaattgactcaataaggagtagaaaacctaaacattcaccactaaagaatttgaattagtacgcaaaagtatcctcctataaaaacagcaggcccagagatgtcacagactagttttagcaaacctttaaggaatgagaaaatctctttattatacaaactatttcaaaggatcaagctgggcgtggtggctcacatctgtaatcccagcactttgggaggccaaggtgggtggatcacttgaggtcaggagttggagaccagcctggccaacatggtgaaacctcgtctctactaaaaatataaaaattagctgggcgtggtggcgcatgcctgtaatcccagctactcgggaggctgaggcaggagaattgcttgaacccgggaggcagaggttgcagtgagccgagattgtaccaccgcactccagcctgggcgacagagtgagagactccgtcttaaaaaaaaaaaaaaaaaaaaaaaaaagatgagaagcaacccagcaattttataagactggaataacaccttgatatcaaaacctggcaagggaagcacaagaaaataaaaaataggccagtgttgcttttgaacagagctgtgaaaatctaaataaaatacagtagtctcctcatattcatgggggaaatattccaagacccccagtggatgcccaaaatgtcagatagtcccaaacctgattgccgtcaatggaaacacatctgtttatatctttcacccacacatgtcatcctcttttcaccttaactaagcatttatgcactgtgggcataacttttgcagtttgaggtccaacagcaaaactagcaataatttctttttccttcttcacaatttcacacatagaaaattcatccgtaccatggatctcagcaaccttagcatagaatttttttctttccttattaagaactttcacctttcgacttaaaggaggcacttaacagtttctctttgtcatatccaaagtgccagcctcactcatgggccttgtactttggggccgttattagtatgataaggatgagggtggcttgaacacaggcggtgagatactgcaacagtccctccgatcactgagatggctgataagtgactgatgggtagggagcgtgtagggcgtgggtatgctggacaaagggaaaattcatgtcccgggtggatagagtgggatggtggaagatttcatcatgctattcaggacggcacaaaattgaaaacttatgaattatttctggaattttccatgtaatatttttttggccgtggttgactgcaggtagctgaaactggggaaagcaaaaccgtggataagggggactgctgtattaataaattgacttcggccgggtgctgtggctcacccctgtaatcccagcactttgggaggcggaggtgggtgggtcacctgaggtcaggaattcgagaccagcctggccaacatagtgaaaccctgtctctactaaaaatataaaaaattagctaggcatggtggcaagcaccagtaatcccagctacttgggagcctaaggcgggagaatctcttgaaaccgggaggcggaggttgtagtgagccgagatcacgccattgcactccagcctgggcaacaagagcgaaactctgtctcaaataaataaataaataaataggcaacaagagcgaaactctgtctcaaatagataaataaataaaaaaaataaaaaaattcaggatattaaaaataatatgtcagaagtaagtggagtttttacccatggaatcaaaaaacggctcaacagaaatgtaattcaccaggtcaacagattaaaaaccatatggttatctcctcagatgcagaaaagcattcagtaaaatccagcattttcataatgtgctgaatgaatcaggggatcaggctaaatttagaccctcatggtgaatccctttatgaagcagattccatcccatttatattttgagtaagcccagattttgaaatactaggttttcttttcataaaggtttaatttcatgacgaaacccaaatatatccagaagctgtgctcagttctttgggagaacacaaaaacctccaaacaaaccaaaaaataatggcatccttatttgcatttcccgtatttcagtggcagacagatatatcaggcgtgttctgttttttttttttttttttttttttgagacagagtcttgctctgtcacccaggctgaagtgcagtggcacaatctcggctcactgcaacccccacttcctgggttcaagcgattctcctgcctcagcctcccaagtagctgggattacaggcacccaccaccgcgcccagctaatttttgtatttttagtagagacggggtttcaccatattggccaggctggtctcgaactcctgacctcgtgatccaccctctttggcttcccaaagtgctgggattacaggcatgagccactgcccccagccaggtgtgttctttaagtagccacctccccagcatgcctaagtaggattccgttttcccacaaggcaagtgtgatgtgtggttgggccacctgaggccgatctggcctcagagaatcctgaagccagtgtcctatgtgctgtgatctcggccaccttcctcttggactgtttctttccttttcttcttttttttgaggtggagtctcactcttgttgcccaggctggagtgcagtggtacaatctcgactcactgcaacctccgtctcccgggttcaagcgattctcctgccttagcctcccaagtagctgggattacaggcatccgccaccacgtctggctaatttttttgtatttttagtagagactgggtttcaccatgttggacaggctggtctcgaactcctgacctcaagtgatctgccctccttggcctcccaaaatgctgagatgacaggcacgagtccccgcgccctcactgactgtttcttagggatgtccttttttctcccgtcttgtgcaggtccaaactgaagacggtacatgagcggatccccttggctggactgagcaagcttcccagtgtccctcagattgcaaaggtgagaaaccaacccgtgagagatggtggcttcctctctcagcccagggctggcctctggaatgggggtgcaggtatatcctgggtaggctcagcccttagagaaggggaggccactttactctttggccattgactgcactgataggggtctgggagggctgtgggcagatgcctctgtctttcctacgccctccatagctcatccttgttgccgaggctgcttaggaacagtatcctccatggtctctacttccaggtagttcacagctagtttgggaagtgagagaagtagaaagacggggctggatgtggtgagtgctgtaggacttccgtggaggggtgagggcgggtggcctggggaaccttcacagcagaggaaagggctgagttgggctgaaggatgatccagattgagcacccccttgagtaaggaggctgcgaacctgagaactgagttagcaaagtgggtgagcaagagagtcagctgggttggttggaccctcactctgggagcaggaatgtcacagaattgtgctggaaacctttggtggcagttgtgggctggatagtttttggccttgtcttcaggccagaacggtgacgagcctcaggctttgtctaatcccttcccacacttcatcagcaaaccccagaaagggcggttgacttgcctgggcacgtgttagtgagcagcagtcagaatccccgcccaggcctcctgacccatgtgcctcgccctcccatgccgcattgtccaggtgggcagaggagcccagatgtcctctacagatatcatccctgacctgcgtcttcttctcccttctcaggctttctgtgatgatgcagtgggactgagattcaatcctgtcctgtaccccaaggtaaggaccttcatgctcccaacataggggccctgcagcttggcaaggatttgcagacctgtggctctttggggagttctctgcatcatagtggggtttcgtggggtctccataataagcttccatgtctccctctctccctgcccaccccttcacaaactgctccactgggaacccaacctcagccatgcctaggtctccagcccagctgaattggtccccaggctgctgtgaaggtgacagagggtagcagtgttgtagcttctccaccacacctcattggtacctccctgaggccagtgctggaggtggacgtgactctgtagctgggggctggtgcagatccagtctgctgtcacagaggggcgggaagtacagcaggcagacaccaagaagagaaaggccagacagccgccccgccattgcctgtgttactgcagctctccggccatataagcctctgctgccttcatttataaaccagctggttttctgatatcagcttcctttgaattggcctgatactgaccccagttctgatatgggcgtgtgagtgggaagaagagcaataataataaacccactgaggaataattatggcacaagaggactgaagtcacccatggacagtgaattgcttgaaattggccacaggaaaagacccagtgcatcgactgcgtcttcatgggccagcaggctctggagagggacaacggaagcagagctgtgcttctgagcttctgccgtgggtcacgctgcagcggctgaggcctgctgggaccggctctgtctatcctctgagtcccaactctgacaaccaggacccgtgagatgaaatgtctggtgaggaagagaggccccattccagcagagacatccagaatcccctggaacaaacactctttttttgagactgagtctcgctctgtcacccaggctggagtgcagtggcgtgatcttggctcactgcaacctgcacctcctggttgaagcgattctcctgcctcagcctcccaagtagctgggactacaggtgtgcgccaccatgcccagctaatttttgtatttttagtagagacgggcgtttcaccatgttggccaggctggtctcgaactgacctcaggtgatctgccctccttggcctcccaaagtgctgggattacaggcgtgagccacctcgcccggctggaacaaacactttcagtgttcaggattgggcatgccactctcagaagcagccgtgtatccatctgcagtggctgagcgaatggcggagtcctttcctgcacagagcctttcgtcttccacgtgcctctgtttagctgttttagcatctgttgataccaggagtatgctacgcttcattgaacattttctctcattgagactgacctcccctttataattacaactgaatgagtggggtttaaccagacattaaaatcccatcataaaggtctaacttaactaccggtttggcaattttggttgtcaaatcttagccaccgagaggaccaatggtgtttatttgcagagttctctctatcccttggaaagcctcgggccttggtcataatggaagagcagctgtattttcatgttttctgtatctgaaggaccgctgagtccggctgggatgttcatctggctgagatgcacgcatgtgtgtgtttttaaaatttgcagagtttagaacgttctttggacgttctccatggcctggtgcctctccctggcagggcagctgttcctcccctgtgactcacccaggcaggagtggaggctccagggtcgggcagcagcgccgtcgctgggggagctgcgaagcgtccgtttccccagacagctgacagctgagagcctcacagagacacacagtgtgtggcaacctcacacaggccgcagattccggccaataagtcgttcctggtttgttcttcctctcgcataacgcgtggttgaatccctcctttttttttttcttttttaaatgtcacatttaatgttttcaccgctgtccttcaaatctaagttgtgcaaagtgaccagaaagtgtgccacggtaattgaccagcctctgagattgaacctttcacactggtgcctttttgggctctttggacgctaaacacgtttctcattcaagtgcgttgacatgcttcagttgggttgattctcaggagcgtcataaaaaacaaaacaaaacagaaacaaagatattgcgccatctttgtttagtaatttaatgtttgtgtctttcgtagcaaataattacttcattgaagttaaaacttccaaacataacttattaatggtcttcaaattcagctcagatcactcaagtcgaaagtactctgctaagtacagataatttaaaatagctttaacagttaattgtccataacacacaccaaggtttttttcctagaccaactgtaagacgatccattactattccttgtacaggtgaaaaatgatactcagttttcttgtctttttatttttaatgtaaaagttggaagggacgttcaaatttcaagtctccacactgagaatccctcctttttattgctgaggttatcccaacagctcccagatcttttcttcccccagtaagctggttcagctctgatatttctggagggtcatatagatgatgatggtgttgatgatgatgatagctgctctgtgctcagttctttctttttgaatcttcataaccacacatctgcgtttaacagatgaggaaactcagctccagagaagcagctcactcaaagctacataggtaaaaacagtggattcaaaactagagtttaggctgggcgtggtagctcatgcctgtaacctcagcgctttgggaggctgaggcaggcggatcacaaggtcaggagttcgagaccagcctggccaacatggtgaaaccccgtctctactaaaaatacaaaaattagccggtgtgatggtgggggcctgtaatcccaactactcgggaggctgaggcaggagacttgcttgaacccgggaggcggaggttgcagtgagccaagaccacgccattgcactccagcctgggtgacagagcgagactccatctcaaaaaacaaaaacaacaaaacccgaaaaaacttggagtttaatttttctgatcccagtcatcaactctatgatgcgtaacggaaaattagatagaaccaggagtcaggttttaaacatttcctctttgcatattgtattagggtatgttcctccttagcgtggtctccttagagacctctcattttatgcagaggggactgaagtttggtcaggagcggtgacttgctcggactcatgctgctgattagaggtggaattaggactagagttatccttgctgaccagttttggggttttggcttcactttttacaccacagattcaacactagggttaagtaagctgctggacacatgtgcccgagccttgactggcacatctggatgggagtggaatgagtgatacagaggtttggttcctactggggaagcccaagttttagaagctagctgactttggagctgcggcctgactgtctacttattatttctctctctctccctccgtgtatgtggatgtttcataccagggaacacattctctccccaaatggatgcttcccctgccatgtgcttcctcacttgcttccaaatttaacaaatgttgattttttttttcttgccacattttccaggcctcccaaatgattgtgtcctatgatgagcatgaagtcaacaacacattcaaattcggagtcatttatcaaaaagccaggcaggtaagcagcaccatccataccggtgactgtatcccgtggtttctcacttaggactctttttatccccacccagaacacaggagtcctgacctgcgttctgaagcatttggaatacaacggtcacatttaaggtatgaattagactggaggtggcagaactttccagcaagggtacttcttacaaaaaggcctgcacgtccttaaacagtgatgtttttttttttttaatatagcaaattctcattcttcctggctgcctcgtcttctacgtatttatgggctgctggttataagaaaaaccagactaggtcaagggaatggaggagcataggctgctctctccttgcccaaatttctccccactgggaattagctttttctccccaaacttgagtgatgtgatggagccagctgggtgcgtctcttcacaactctgttccgtgacatcatgttggcagcttgaagtcaaccatggtggaagtatttacactatggaaatttgcaaacaccagggtttctatcttcctcctttggagagccagtgactcaaaatatgccagcacaccactgctcagcctctgtgttttgtagccctcacacgttgctttggagttaactggccagaaccatgtttctcaaagtgtgtttcatgaatgcgagtctgatggtgtactctgtgagcaaatgacctggggaggggttgtcacttgtgtgggaaccttttaaaggcttaaagaacccccaaggtaaagggctctttataactttgttgaacttagtggtttccatacttacggacacaaacttcccatcttccctacctctttcctaccatgaacatttattaacatcccaagtagaggggttagctgaacacactgtttcctcaccgagactctttgagagaaaagttccacacccatttcatctttgtatcatctaagagcctagcatagaaatacaccttcatataaatacactccactgttaggtgagttaatgaacgaataaaaatgttggccctactaatggcaggttaatagtatcttctgatactatttgtatttttttgcatgatggtatctttcttggttagacgacacctgatgttctcatttagagatattggcccttaagagacatgcgtttgcttaaaaatattctaattatatgaagagtttaggatctgcaagacgaacactgatgaatcttataagttaagggagattattcaggtagctactataatcattttcacatattacatttttattttatacagctttgctaataaaaccccctaattaaagttctttgcttgtggaatttaccaaagcggatcttataagctgattataatccaatgttccagcaaagttataattactgaacatgagccatccgtctccgagagggagtctgtgtattgtttatgtacctgatgctgctgtggaggaaaaagccaagaagataatttttttttttttttttaagaacctaggcagattgttgttttgcaaacctgcagctgggggacatttaatatgaacatttgttgcatcaaagccctatgctggtctctgggtataaatgagcctcacctaactctcgtgtttgctgttcactgtgctgtgcatgctgggggatacggtgactaagacccctccctgagtgcacagtccagctcaaggccaggatcaaaataatggcaatactactactctcaggctggatgtgaatcttgcaagagaagtgcaggtcccacagcacacgctgcattgtttttctagtgggagatgtagtttgcctggaagcagctgctcttccacagtctggcctcatgacctggggcaagtaggacatgtggctagagttgtgacgccttcatggcatgctatagatcagggattggcaaacttttttgggtaaagggccagatagtaaatatttttagacttcatgggccttggagtctctgtgacagcctctcagctttgccttggtggtgcagaagtagcaatagacaatagataaatgagttggcctgtctgcgttccaataaaactttatcgataaacacaggcagcaggccagacttggcccatgggctgcagtttgttgactccttctagagtgcggtgtttcccagccttcagacattcacagaccatatccaggatctgtatcatagcatttgttgcaccctatgccactgttaagatctttatcacaatattttaacgaaatattttctttaaaaagttttgttttaaacttacatacatttattttttatttttatttttatttttttgagacggagttttgctcttgttgcccaagctggagtgcaaaggtgtgatctcggctcattgcaacctccgcctcccgggttcaagcaattctgcctcagctccctcgagcagctgggattacaggcaggcaccaccacgcccagctaattttgtatttttagtagagacggggtttcaccgtgttggtcaggctggtctcgaactcccgacctcaggtgatccgcctgccttggcctcccaaagtgctggtattacaggggtgagccactgcacccagcaacatgcatttatttttaaaggaaattttatatcactcctctaactggaaaaccagtatcatgaaatgaaggtaattctaaaaaaaaaatactgtaaaaagcaaaataaaattattgaaatctaccagattctgttgcctgttgaaggcatggagcccaagttctgctttttgttgttattgttacaattacctactgaagacattctcttgaagtgattgggtaggctagagtgtctttgtatcatctgccgctcttcatggcagcctgtgcatgtttgcagagccttcagctgtttgtacatcctgctactgtgggtagagcctgttgatcaggcagtgtttgaaggctgttactgtttgcagagcttgctactgttttcagctttgttttttacaaaattagccaggagtggtggtgggcgcctatagtcccagctacttgggagtctaaggcaggagaatcacttgaacctgggatgcagaggttgcagtgagccgagatcgtgccattgcactccagctggagcaacgagcgaaactccatctcaaaaaaaaaaaaaaattactaacctttttatctttaggtatttgtagattcacatagagttgtaaaaaataatacagcgagatctcatgtaccctttacctactttccccgcaaagtaatgtctgacaaaacgatagcacaataccacaaccaggatgtggacatcaatctcccagctccagtccgtaacccctgacaaccactcatctgttctccaacttctaaaacattgttatttcaaaaatggtatataaatgtagtcatatagtgtataaccacttgagattggcttttttccagtcagcaagattaatccaagttcttgggtgtatcaatactgtgttctttttcattgctgagtagtactctgtggtattataactgtaccacagtttgtgtttaaccatcacccactgaaagacatttttggctattatgaataaagttgctgtgaacatctgtatataggtttttgtgtgaacataagttttcatttctctgggatacatgcttaggaatacacctgctgagttgtatggtaattatgtgtttagttttgtaagaaactgccggccgggcgcagtggctcacgcctgtaatcccagcactttgggaggccgaggtgggcggatcacgaggtcaggagattgagaccatcctggctaacacggtgaaaccctgtctctcctaaaaatacaaaaaattagccaggtggtagtgggcgcctgtagtcccagctactcgggaggctgaggcaggagaatcgcttgaacctgggaggcagaggttgccgtgagccgagattgcaccactgcactctagcctgggtgacagagtgagactccatctcaaaaagactctgtctcaaaaaacaaaaacaaaacaaaaaaaaaactgccaaacagttttctagtgtttcttctcaccagcagtgtatgagtgatccagtttctctataacctgccagcatttggtgttgtgactgttttttattttagccattctgatagatgtgtagtggtatcaccttatggttttaatttgcatttctctaatggttaatgatgttggacatcttttcatgtgcttatttgccatctgtatatcctcttaggggaaatgcctgttcatgtcttttttttgagacagagtctcactctgtcacccaggctggagtgcagtggtgtgatctctactcactgcaacctctgcctcccgggttccagcgattctcccacctcagcctcccaggtagctgggactacaggcacgtgccactatgcccagctgatttttgcatttttagtagagactgggttttgccatgttggccaggctggtttcgaactctggacctcaagtgatccacccgcctcggcctcccatagtgctagaattgcaggcgtgaggcaccgcgcccggccgttttcatgtcttttgaccattttctaaatggatttttttttttaactgttgggttaaaaacatttttaaaaataacagctttattgagcacatcagcataattcttgtaccatataattcataatgttatgtaatttatatctcaatgaagtgtgcagttcagtggtttgtagtgtaaccacagaatcgtgcacctgtcctcactaactccagacattttcatcacccccaaaagaaaccccacactcaccagcaggcactccccatccccctttcctttagttcctgccaaccctaatctaatttctgtctctacagatttgcctattctagaccttttataaatggaatcatcatatgtggccttttgtgtctggtttctttcactcagcgtaatattttcagtgtttatccaggtcgtagtatgtatcagcacgttgttccttgttcatggccaaataatattccattgtgtggatagcccacattttgtctatctattcatcagatggacatttgggttctttctccttttgggccattatgaatagtgctgctattgatattcatgcatacattttctgtggacatgttttcatttctctttggtgtatacctgagagtgaagttgctagatcatatggtgactctatgattagcctttggtatatacctcagagtgaagtttctggatcatttggtgactctgtttagcctttggcacatgcccgggagcaaagttgccagatcatatggtgactctgcgtttagcctttggtatatgcctgggagtgaagttgccagatcatatggtgactctgcgtttagctttccatatatgcctgggagtgaagtttctggatcacatggtgactctgcgtttagcctttggtatatgcccgggagtgaagttgccggatcatatggtgactctgcgtttagctttcgggacctgcctgggagtgctgttgccagatcatatagtgactctgcatttagccttttgaggaactgctggactgttttccacagtggctgcgtcattttccattttcagcagcagcgtgtgatggttctgatttctccacaccctcaccaacacttgttattgccttttattgcctttatttttcattgtggccatcctagtgggtgggaagtggtatatcattgtggttttgattactttagagttttcagagttctttattctttttttttttttttttgagacggggtctcactctgtcacccagaccggactgcaatggtgtgatcttggctcactgcaacctccgcttcccaggctcaagcgattctcctctctcagtctcccgagcagctgggattacaggcacccaccaccatgcccagttactttttgtatttttagtagagacaaggtttcaccatgttggccaggctggtctcgaactcctgacctcaagtgatccacccgcctcagcctcccaaagtactgggagtgagtctccatcagtccctcctctctccaccccagtcccactgagggcagctatggtggatgtgctgggagacagggagaaaggaagaaagggaccaggtacctgggcatccatattccttcctttagcatcagaaagaatttttctaattcctgcccttattcctgtttctctttcagaccctggaggaggagctatttgggaacaatgaggagagcccagcttttaaggagttcttggacctgctgggggacacgatcacactgcaggatttcaaagggtgggttttagccaagtgacggctccagctccatcaacaagggcactagaggaagggcaagacagctcagtcctcagggagcacgtgtgagttaaaaacacacaagaaatgagggatggcttttcagggtcttgtcgctcactgcatttctaaggaatcaggggtccaaggagtgatccagtgtggcagattcccctgaaggcgttcacgttcggccctgggccccgccccagatgtgccttcctacttacctttggcccagactgagaatggaaggaatccaccttccctgtcactcacctgccaggtgtgtgggaaagggagccccgtgcagttttggggggaaatgacctattttattttattttttatttttttatttttggagacagagtcttgctctgttgcccaggctggagtgcagtggtgtgatctcagctcactgcaacctccacctcccaggttcaggcgattctcctgcctcggcctccggagtagctgggactacaggcgcccgccaacacgcccagctaaggtttttgtatttgagtagagacggggtttcgccatgttgcccaggctggtcttgaactcttgagctcaggcaatccacccacctcagcctcccaaagtgctaggattaccggcgtgagccgccgcgcctggcctgaaatgacctattttagataatacacaaagaatgcatcatgaggagctgatgcaaatataacagttcctcaggcaggagtccatacaacagtctatgcttttttttttttttttgagatggagtcatgcgctttgccaggctggaatgcagtggtgcgatcttgactcatggcagcctttgcctcctgggttcaagcgattctcctgcatcagcctcccgagtagctgggactacaaggcgcgcgccaccatgcctggctaatttttgtatttttggtagagacggggtttcaccatgctagccaggatggtctcgatctcctgacctcatgatccgcccgtctgggcctcccaaagtgctgggattacaggcgtgagccaccgtgcctggctcagtctatgcttttttaagtgggcagtaagatagaacattggggccgttgcttggaaaactctggcccttgactttccttggccaagaccgcatttgggatgagtccagacctggccagcctgttttgtccttggtggctggcagatggctccaggccccagaattctccatcccagcagccagattgacatgagctcctcacatcgtgtgaaaatacctagcccagtgcctggcacacagcggatattcactaattgctttcttcctctgcttccttctctgtccttccttctttttcctttcctctcttcctccatcttctccctccctcaaggtcatcacggctgtctggggtcagtcacacctgggataaaacccccgctccatcacttattagctctgtgactttggataagtgacttgacctctataagcctcagtttcctcactgtaaaaagcgagataaagggctgggctcagtggctcacgcctgtaatcccagcactttgggaggccgaggtgggtggatcacgaggtcaggagtttgagaccagcctggccaatatggtgaaaccccgtctctactaaaaatacaaaaaaaaaaaaaaaaaattaggcaggcatggtggcaggtgcctgtcgtcccagctacttgggaggctgaggcaggagaatcgcttgaacccaaaaggcagtggttgcaatgagctgagattgcgccagtgcacttcagcctggtcaatagagggagactctgtcaaaaaaaaaaaaaaaggaggtaaagatagtgtcagccctaaaaggttttggggggattaaaataagataatgggctgagcgtggtggctcacgcctataaccccagcactttgggaggctgaggcgggcagatcacgaggtcaggagattgagaccatcttggccaacatggtgaaaccacgtctctactaaaaatacgaaaaattagccgggcgtggtggcacgtgcctgtagtcccagctacttgggaggctgaggcaggagaatcgcttgaacccaggagatggaggctgcagtgagctgagattgtgccattgtactccagcctgggtaacagagtgagactctgtctaaaaaaaaaaaaataaataaataaataaaaaataaaagataagataatgctcacgaaacacttaagtgctgttcagggctagctagtcacgattgttattgttcttatattgccaccttccattgactttgagatgctatcattataagacacatcctgtgactttaaaatgtgaaaaaacggccaggcatggtgggtctcacctgtaagcccagcactttgggaggccgaggcgggtggatcgcttgagcccaggagtttgagaccagcctgggcaacatggtgagaccctgtcattaacaaaaatttgaaaaattataaaaattagctgactattgtggtgtgctcctgtggtccccgctacttggcaggctgaggcgaggaggatcgcttgagcccaggaggttgaggctgcagtcagccatgattacaccattgcgctccagcctggatgacagagtgaacccctgactgaaaccaaaactaaacgtgggccttagaatagctgaaatacagtatagtaagcccagaaggtcctcagagttatgaaattctatccctttattttatggaggcctagagagactaaatgaattgtccacgatcacgtgctgatttagtggcagaagcaggtctagaacccggagctcctgccccctgtccagcattctttctgccatgccagcctgggcacattttctggcttgtattgtagtgttggggatgctgagattctaggtccatcttatttcattttcttaaaggaacctgcatctgctgaagactgtgatcaaagctggcagccgtgtgtataaaggcagaagggacaactcctggaagcccacccagttccttagagcttttctttcttgcctgtgaggagacagccagagaagggacttccctggatactcccaagcgggatgctgcagtggttgggcctgtatcttagggactagctaggcagaagttgagcatctgccacctcttctgactgactccagatgctcctctggggctccccaccagccaccaggatggctggctgccctagctctgggcagaggacttggacatggccttgcagagagcaaagaaaggccggcgccccaccttgggggaatggcaccggggatgggcatttgtctgggattgtggatggatgcgcttccttcccatataaccagcaagtgtggacacggcacagccaaggcttgagatggaggttctgctttgtgattgattggttgattgattgattgatggagtcttgctcttgttgcccaggctggagtgcagtggcgccatctcggctcactgcaacctccacctcctgggttcaagcgattctcctgcttcagcctcctgagtagctgggattataggcatgcaccaccatatctggctaacttttgtatttttagtagagacgggggtttcaccatgttggccaggctggtctcgaactcctgacctcaggtgatctgcctgcctcggcctcccaaagtgctgggatgacaggcgtgagccactgcgcccggccagctttgtctaaataatgggtttgtgggtagagtgccagcgctgatatacctggaagaacagatctacctgcttttcccacatcacagcctgctctgccctcagctctcctgtctcctctgctgcgtatcctctgctgcgtatacttaggggagcttgcattaagttgcccactttgcctcactctcttttctccccatctcctgccctgttttgttgacagtttccgaggaggcctggacgtgacccacggacagacaggggtggaatcagtgtacacaacattccgggacagggagatcatgtttcacgtttccacaaagctgccatttaccgacggagacgcccagcaggtaacctggtttgggagggctttgggagcccagggcgggcgaggtgagggcctgcctctggtctgacctgctaagaggctgtggccgtccccatattcgttcccgtagccggccattcgttcagctgcgcagcagcgtcacagtccgttctgctgtgtttctggccgaggctgtgcctcagcggtccgttctgttgtgtttctggccgaggccacacctcaggggccctgggcgggaggcggggcagagcttgtgtttcttccacgttgactgatgggaaaactgcagcccatggtggtgacaagacttccttgaggtttctccgtttatcaggggcagagcccagggcagagcctgggggccctggtcatagagggtggtggcaaagggtgcatggtggggtttgcagatgggggcctgaagccgcctgtgccactttggagcgtgtgactctgggcaagccagttaaccttctcatctataaaatggggggtaacaccacccatggtagagggtgattgtggggattacatacatttctgactagggttcatacgatgcccaattcatggctggcttcctatagaacagctgttcactgtccagcccctggtcattttgtcccccttcctgccccagtgacggaaggctggttattgcgtgagaatccttccccacccccagccttcctcatctcacaggctcctctctcaccacacctgtgggaattcagccttgacctccactagggagacctggacgagacccctgtccccactgctttcctgccgtgccccccgtttgctgctctgacagccgtgcatccctggggagagccgcggctggttcctggctgttacaagcccagttcccccagcctgccttctgccccttttcagtctgggaaaataagaaaatgcaggcaggcctttgcccaaactctgacctgtgtgtctctgagcaggaactggggagggagcacagatgtaaaattgtaaacatagtgcctggcttcttaggaaagaaggaaattggcaaacgagatgatgagttggctctaaaatagctactgaatgttccagaaacaaatggaagcagaaatccttttgtatccaaagtgggttttcattcaacctttcacctccagcccctctgttcccttatggcctctctcacctgctgccccggcctgggcctgaggcctgttctctctgggccttctcagtcttatgtgtgtttcttgggaaatacaccttggcacagggctcggctcttggcggggactgagtaaatattaagtttctcttcctgagaaatggaaagatgcgcgtggagtaagtgaggcaatttgtgtgaaagtgcccagcacagtgcttggtgtaaaacaggtgctcagtgaatgagaaactcagtgtgaagggactgagcattgggcctgcatgcagtgggtgcttaacaaaggaacaaatgcatagacaggcacctagccaggactcgacatacaggagcgggtttttgtgtgtgtgtgaggagggctgtcactctctcacccaggctggagtgcagtggtgcgatcatagctcaccgcggccttgaacttcaggacagggttaacatttgatatcatgcatgaacagcccaacatggttccagggacacaccaggtgcttggtggccgagatcacacccagaagcacctggccctgcttgggatatggagttatggttgggatcctccttccatcccacctacgccaagctgggtgagcagtgctgtcatgatctgccacctcatcactctcattcacaccttcaagaccccctgacacgtctcctcctccaggaagccctctcaggttgctttccagccctgtaattttgcccttgcctctgtctccagagctgtcagggatttcatgcacagcagctgacttagcccttgctggctggtggctttgttagttttctcaggtggcttcacctgtgtttgtatttctcccagatcaatgacaggctctaccagggcaagaccccgccttgccttttaaatattcttgccaagtcctgagtcagggatctgcatgctgtagaggtcagtaagatgctcgctagcctctacctaacgacttggccatcttccccattttttttttcctttttggtggcttctaaagattgaaagaaggttgggcacagtggcttatgcctatcatcccagcactttgggaggctgaggcgggctggtcaggagtttaagaccagcctggccaacatggtgaaacctcgtctctaccaaaaaatacagaaattagtgggtgtagtgtcacgcgtctgtaatcccagctactcgggaggctaaggtgggagaatcacttgaacccaggaggcggaggttgcagtgagccgagatcgtgccacggcactccagcctgggcaacacagtgagaccctgtctcaaaaaaaaaaaaaaaagaaaaaaaaaagattgaaagaagaacccccctggttttccccaaataggaaagcaactcaaaagatacacaaagcacgaagcgtgttccatgcacttctccccttgctgcctggcattggtactgtgctttcatacttaaacttccaaaacaacaaccacgaactcttctcactcagaattcagttttcctgtgtgcaaaggaaagtgaacccactctttccccaaaacatctttcatgattttcctaactggcttataacctctcaacactttttatttagctccagagaaagagacacattggaaatgacatcgtggccatcatcttccaagaggaaaacacgccgtttgtcccagacatgatagcctccaatttcttacatgcctacatcgtcgtgcaggtcgagaccccaggcacagagaccccatcctacaaggtaaggagaacgccttgttggagggagtggtgggcctcgacacctcaccctgtgtggatgctgtgatatcagaggacactagtcctcagcagtcagagattctccatgagtttgcaggtttctggggtttggagctagattctgggtagggaggaccttccaaggccacctgatcccccttgctgcctccgggctcaatggcatctcacttgaggattgaggaggtgtgagtgtagtatttggaatttggtgatgccatttgctcgctgtgagtgtagtatttggaatttggtgatgccatttgctcgctgtgagtgtagtatttggaatttggtaatgccatttgctcgctgtgagtgtagtatttggaatttggtgatgccatttgctcgctgtgagtgtagtatttggaatttggtgatgccatttgctcgctgtgagtgtagtatttggaatttggtgatgccatttgctcgagtaaggcagagctggaataaagaaagagcgtggaaaggacgagcaggaaagggtagcgatagaagggtgctaacgaaggaaaaaaagaaaaaaatgttgatggtgagggtggagaggaggggcctggtagaccctggccactgggtaaggccctggcctggctgttttggacaaatgatggatcttaatttaaagacctccagggaggcagatacgcaagcacctgggtctgaacctcccaagcagtcacgggtctgtcagatggctcgaaatcctcaccggtgcagatgacagcgagacagggcagctcattgcccctgcagtcccccgctccccactcctcatggctggatctctgaccctccctcctctgctccacgagaaagaatctccacctcttgggcaacagtctcttggtatcacagtgctgtggcgggcatgggactcaagggcgttggactgaggcaggctttcaaggcaagggttaggcagtctctgactccctgcagataaatgcaaaatgctgaatttgtgcctttccttggattcctgaaaagagaggccataccttaaattctcaaagcgctccctgctccgcaaaatatcaggaaccactgttctaagggggaggaaagatgagcctgtgattgccaatgggtaaccatgaggcctgaaaatgtttcccgtcaaataatttcagcccatcctgattcctggggttcatgaggccacagcagttcaactcagttaagtgcaaaattcacgtcagcttttaaaatgtgatgtgaatcgtcagaagaaaataaaaagaggctgggcacggtggcgtacgcctgtaattctagcgctttgggaggcagaggcaggaggattgtttgaggccagaagttcaagaccagcctgggcaacatagcgagaccctgtctctaaaaaaaaaaaaaaacagaacaaaacaaaataaaacaaaacaagcaacagaaacccaatagcaaccccctcctgttgaggctgattccttcatgcccaggctcatgtgtccctgccattgagcagttttagctgaagctggcgaagacatggtgtgagcatttattttcttttcttttctttttgagacagagtcttgctctgttgcccaggctggagtgcagtggtgcagtctcggctcactgcaacctctgcctcccaggttcaagtgactctcctgcctcagcctcccaagtagctgggattgcaggctcctgccaccatgcccagctaattttttgtatttttagtagagacggggtttctccatgttggccaggctggtctcgaactcctgaccccaagtgatctgcctgcctctgcctcccaaagtcctgggattataggcgtgagccactgtgcccagcccatttcttgaaggctataggatcacctgctttgagtgaaatgggcattcacttcaaacagctgctcgattcaagtgttggttgaagcaagttgacttactcagtgcctactgtgcgccaagctccaggctggaatggggctcgtggaggtaacagaatcagcctcagggccttcctgatgccggagaaggggcagaagaagcagggagtgcaggtccaagcaccaggctgaagtggggctcgtggaggtaacagaatcagcctcagggccttcctgatgccggagaaggggcagaagaagcagggagtgcaggtccaagcaccaggctgaagtggggctcgtggaggtaacagaatcagcctcagggccttcctgatgccggagaagggacagaagaagcagggagtgcaggtccaagcaccaggctgaagtgaggctggtggaggtaacagtatcagcctcagggccttcctgatgccggagaagggacagaagaagcagggagtgcaggtccaagcaccaggctgaagtggggctcgtggaggtaacagaatcagcctcagggccttcctgatgccggagaaggggcagaagaagcagggagtgcaggtccaagcaccaggctgaagtggggctcgtggaggtaacagaatcagcctcagggccttcctgatgccggagaagggacagaagaagcagggagtgcaggtccaagcaccaggctgaagtgaggctcgtggaggtaacagtatcagcctcagggccttcctgatgccggagaagggacagaagaagcagggagtgcaggtccaagctccaggctgaagtgaggctggtggaggtaacagtatcagcctcagggccttcctgatgccggagaaggggcagaagaagcagggagtgcaggtccaagcaccaggctgaagtgaggctggtggaggtaacagtatcagcctcagggccttcctgatgccggagaagggacagaagaagcagggagtgcaggtccaagctccaggctgaagtgaggctggtggaggtaacagtatcagcctcagggccttcctgatgccggagaagggacagaagaagcagggagtgcaggtccaagcaccaggctgaagtgaggctcgtggaggtaacagaatcagcctcagggccttcctgatgccggagaagggacagaagaagcagggagtgcaggtccaagcaccaggctgaagtgaggctcgtggaggtaacaagatcagcctcagggccttcctgatgccggagaagggacagaagaagcagggagtgcaggtccaagcaccaggctgaagtgaggctcgtggaggtaacaagatcagcctcagggccttcctgatgccggagaagggatagaagaagcagggagtacaggtcagccactgggcagctgaactactcaactgcttcttttaatagacagttgaagaggaagaactactgggaaggatccttggaatgaagccatgtgataggagggctcccagaccctctggcagaacgaggcctcctgtagacgtttagcatttgcttctctttcccaataggaaatgcatctcagctaaccagcttctccactttcccgagaccttagccgagtggtgcactcatacagagaaaaatcagagatccaaaaaagcgccaccccacctccagctgtggtgctagaagtctttacccactcttcttctccttttttttttttttttgagacagtctcgctgtcacccaggctagagtgcagtggtgtgatcttggctcactgcaacctctgcctcccgggttcaagcaattctcctgcctcagcctcctgagtaggtgggattacaggcacccaccaccatgcccggctaatttttgtatttttggtagagacggggtttcaccatgttggccagaccggccttgaactcctgactttgtgatccactggcctcggcctcccaaagtgctggcattacaggcgtgaaccatcatgcctggctgtctttactctttcttctaagccacaaagcacagcattgtcctcagaggggtgatgagaagcaggggggcagggcttcccggaggagcaggctgtggtaccttgatcgtgcactccacctgccaggcagacactgaggctggaaggccagacgtgtgaatgaggccagggagggggaccagccttccaaggcactccccaaagcgctgtccatccacactcccggcagcaccccaggtaattagcagactgcgaggaggacccggttagatcccccagggggcctgggtgaagcaggaccttagctggcccctgcaggctcaggggctgtggcaaagaaggctgagatttcctctgggactgagtaagccccaggaggcctccactggggagggtgagctgaagaaagaagagtataaaggagggacagggttgggtgtgtgcaggaaggggtcctcttctgtccacggaggggccgggctgcctggggttctggtcctggcactgcctctgctgcgtgaccttgttccttccctctctgggcctctagttttgtctgtgtgaaatgaggaagttggattagacacctgcaggctgctagccctgacatcctgcgggagggaaggaggcgtgcttgggtgtgtgtgtgtgtggtgggttgcaaggtgctttggggaaactctatttcaggagccctttactgggtgcaggtcagcaggggaagtgaaaaggccactgggcgacagtggttaccccttaccagctgcttgctcatgccaggcacggtgctgggtccttagacgcacagtcttgaatcctgacaagcccctggtgagacaagacctctcgctagagggaggaaatggaagctgagagctgaacccacttaaggcctgaggccacagagccagggagctgtggctgaggtcctgtctgggtctgcttgcggtcttggtcattgagccatcagagcaggcgagaaattggctccacggagtcgggtgtgcacgaagcatcactctggattatttttcagaaatgagtgtagtcctcatcctgcctgcttggaaggaaagtccagctcagccatcaccaggactacccctttccctcccccctatccctgcctccctctccggaagtcctcaaaggtgtcaggaatctcaggtgaagcccaccgccggggagggccctgtctttgtagccccctccccgtttcccgtcacgacttgtctgttgctcggacgatgctctgtgtgccaccgcggctcccaggccactcttgggcgtggggcctttgtcacgtttgaagctttctgaggttcccagtgcatcctcatgacccacaccaagctccttcctccttccagccatgcaggtcccttccccagagtcacctgcatctgcctctctccctccctccaagccctcgctggaggccctcgctgcatttagaaaacaggaaggtggggctgtgttcaggcaacttctgctttcagtccagtgacccagatgtccccaagaggggggaacaacaaaggcctggccgcctggttggaatggggtcaagagaggcgcacaatgaggatggaaggtgaacgcacgtcgcaaggaagggccctgtcctccgtgtggcccacagggctctgctgtgggactgtccagctggagggttggatggacttgaggatgtgtctgaagccacttacacggtcggcacagaccactctaatgcaggctggaggaggagggggagtggggtgggaagggcagagctggggctgccctctggcctctgtcccaggtgcccacggtctgcagtctccccatagccttcccacacccccacccctgattctggctctgtgactgaattcttgacctgggccaccggtgcctggtgggtggtggtagggaaccgggttcagctgctggagcccagccagaaatcacgtcagccgaacgcgcaccatttcctgactcggggcactgcagtttgggctgggcagacagcctggagcttgagaagagaaagcccgtattgaccagctctctcccgctccgtttcccctccggactctggcagggcctttccttggctcggtgcccagctgcctgctcacccggcctggcagactctgcatctgctccacttcacaggccggggaggctggcagcacgccagggctgggctcacgtcagcggctgtgtagggaagggagggcagtctcccgagagcctcacagcctcgtgggctgagaataggtgaagtcagggcacctctgtgcagagggaaggcggggtgtggggcccgtcccacgcctgggcgacccccatgcagcgaacctcgaggccgtcactctaaagctcagtctcactcagggtgccagaggtgcgcgccccaccctcagttcctagcctgggcctaggactggctgaccccgtgtgtggggccagggctcccgaacacgggtccaccggctgcacgagagtttccggggggccctacccttccgattcggcaggtttaggccagagcccatgaacccagtctgtatttttaaacacctgaagcaattttgaagcaattctgatttatggccgagctgaggagtcaggcttgggaagagaaccccagagacgggtcgggagaggtctggatgctctgttcctctgcggctaatcacctgtgggacttgggggcttctctgtgtgtctctgggcatctgtttcctcatcagggagaacagttctccctgtgccttctcagtaggattagcgtcacggtcgaatgaggtcacgagatgccatctcccgggcacttgtatggcattaaaattagggtcccagccctgtccagtcatcttgccaaacctgcttctggcctccaggaatgcagatgagaggctgcggatggccccacaccgtccggccccacttctaggaacagggtcagggcctgtgctggcgatgctcacaggagtattttgtttgtgttctgggaagaggaggagggagaaggtgagtagctttgtaaggagcgtggctcccgtaggggcagcgctcgtctcttccctccaggtccgtaccatgactctgtttcactcaggtctctgtcactgcgcgggaagatgtgcccacctttggtccacctctgcccagtccccccgttttccagaaggtaggacactcttccttctgcccctctcgcatccacgatgccaggtctcagtgcttgagtagcaatggttgggatggagccaaattcaggctgggaacattagggagctccttttgcaggttttggggggaacctcctttcttggggtctctccccacctctttcatgctgccagtctggcccagcataggaccacttgtcagggtgtttgacactggggttgcttttctgctgaaagacgggcttttatgttgagccccggtcaaggagccttgggcaggaatgagctccagtcgtggaagtgccactgtggcttcccaggaccagggaagcgggtttccttgttgggatatttgcaagtgggcttggcctgggctagaaatgatccgctgtcggaagggacttttcaggggttctccccatggccccggctctgcctgcctgtcactgtggctgaagaccttctggcaacagccgagagtgacagacctgaggtccgtcttgtctcttccagggcccggaattcagggagtttctgctcaccaagctcaccaatgccgagaacgcctgctgcaagtcggacaagtttgcaaagctggaggtgagagtgtggtttctgaaggtctccctcctgactgctgggccacctgttagccagcctcatccagggctcctccatcttttttttttttttttttttttttgagacagagtcttgctctgttacccaggctggagtgcagtggcatgatcttgggactcaccacaacctctgcctcccgggctcaagtgattctcctgcctcagcctccctagtaactgggattacaggtgtgcgccaccacgcccagctaatttttgtatttttagtagagacagggtttcctccatgttggccaggctgatcttgaactcctgacctcaggtgatccgcctggcccagcctcccaaagtgccgggattacaggcgtgagccactgcgcctggccaatcagtccttttttttttttcaagacagaatctcactctgtcacccaggctggagtgcagtggcccgatcttggctcactgcaagctctgcctcccgggttcacaccatactcctgcctcagcctcccgagtagctgggactacaggcgcccgccaccacgcccagctaattttttgtatttttagtagagatggggttttgccatgttagccaggatggtcttgatctcctgacctcgtgatccgcctgcctcggcctcccaaaatgctgagattacaggcgtgagccactgcgcctggcccaatcagtcatttttaaagcacctactatgtgtcaggccctattctgttccctgggatatggggataagtgagacagtttctatccctggagagtacacagggtagtcggggggtggggcagggggtcattactaaatagatagttatagtacagtgtgccagcactaggctgggatggaggtcagcacagctcagatagtgactgtttctgcctgtaggggacagagggtgtgttcagggaaggcttcctggaggaggtggctcatgcacagctgaatcttgatatcagatgaaccttctgccaggaggaaagagtggggaagggagggctgatctggcatggtagacagcatgagcaaaggtcaggaagaaccagagcctgacgtcaggagggagctcctgagggtttgctgtggctgaaggacccacgggggctggaatggtggagactcagccggagatgttggttggatcagatccagaagggctttgagctcgggacggtgggctgctggtaaagcgcttaggcaggagagtgaggggctcgatgtgtatgccagagggattgctctgacagtggtgtcattgagaacgatggtgacaaggacaggttgcagggcaagaggtgcaggaaggcggccagttagaagctatttacaggaatgcaggagagatgacaaaggcttatactgtatggaaggaaatggtttagggtcaaggttgggaagacttggtggactcctggctgtaagtgttgtgggacgtgggattgattgtagggtgactcttgggcctttggcctgggctctttgatgacatggtggccaagttgtgcctgcgaaggccgggttgctgaaagggccagtcctcatctgtgtgaatagcggcccctggcatccatgtgcatggctctggacgaacatctggatggagaggagcagtggggagttgggtgcgtggatgtggagctggggcagagggccgggctgggattcactcttccttctgctcctctaccaccagggtggagctgtggcagtggtgggacgacccagggagaagggcagggggagtagagcaggaggccgagcacgcagccttcatcttagctgcagcatttgtgagcacgaagctcagctcagcagtaggtccacaccgttgctgggccgggctgggcagaatgtcagcctccaggccaggtgtctggagctcacaaggagcaggcacatctctgctctcagagccagcttctccatccccaccctcttcccttctaggaccggaccagggctgccctcctggacaaccttcacgatgagctccacgcccacacacaggccatgctgggactgggcccagaggaggacaagtttgagaatggaggccacggggggttcctggagtcttttaaggtatgagcgtcagagtgactgatggttgctgtggggttgggattggggaagaaaggaagtggtccaaggtccatgggatactgatcccagagcccaagggccagctggaggggtgacaggaaacgtatgggtatcctaggtgtttgcaaagggcagggccgttaggaagtgtgtgaggctggagcagccagcagttttctcagcagcctccccatccttcctctatctgggtcatctcctccgggcccagaagtctgttaagcagggacaggtaaagaggtagcagtaggagaggagctggagcaagccaggaacatcggcgctttcacctgcctcctcctgggttggggagcccagggcagaatggcaggagcgaggaccacagcccttacgggtcttcgtagctgctgtgggtgccacagtgattcttcctagccagccggccgagcattggaagacctggctgggcaggggccatggaactataggcaagtccctttggactttgccaagggaaaaaaactaactagaaggagctgctaaaggaagcagtgagctccctgtccctggaagtattcaagtggagctcggacggcccccgagctggcgtgtggtagaggtttttcatcttatgcttgctgagtgcttgttggtccacgcagcacgtagacccagcatctggctcgagcctggctgtcagcctgtgcaggtggcggaacgggtcttgttatattcacgaacacacgtggggacaggatgagagacgccacaggcctgctcaggtccttacaccgaggcagagttagagcctcatttcaaacgcaggtcttctgattcttaggtccgtgtgctgctggattgcctgttagaaggtgatttggaaactcccatctgggggcattatgtgtgggactttatggggaattatgtgtagggctacacccacctctattaaaaccgcagctctgtgggatcctgggcagtctttcaagcctcttaaggtgcagctttcttgtcaacaacataaggataggaagcaggacccctgtcagagccattgtgcgagttcattgataccatgcctggaaaagtccagattgcctggaatatagtaaatgctcaaaaatgtcagctgttattacagttgtataaagtgaaagcttcacacacattatcccacctggagattcacaactgccctcagtgccctgtgaggaaggctattatttggggtgtaataattttggtataatagttcatactcagttttaataatgataggcatagtattatatgggaggaaaccaagcctcaaagagacagaatcatttgtgggagcaggtggagttgaatccaggtccgccggattccaaatccgacaccacctcccacttcctgactttgttaagattccacccgcactagcctgggcccgggcaggcctggggtcagtcccccactgcccggctggaccgcagagagcagggcacagctcttcctaccctagttggggccagctgccaagatgcctcttggggttgggaaaaggagctgagctgcttgtccaggctggtgggtgattcctggggcacctgtttcagtgctgatggacagtgggagcccgggtgaaataggagaaattgggagatcaagacggaagagggatgcagaagaagaggaacgggaggagagagggcgccaggtcagacaacccagcgagagaatggagagtgtgagatgcggtaaacaggaaaacgggcttgggtctggggaaggcaggaaggggggcaccacattaagccttccacaggctctagacttccttccagaggctccaccacactccatagcccacgtatcaaaacattctgcatccctcagtaaatgtaatttatgcagaactataagaggtgaggccaggtgccgtgcctcacgcctgtaatcccagcactttgggaggccgaggcaggcggatcacgaggtcaggagatcgagaccatcctggccaacatggtgaaacctcgtctccactaaaaatacaaaaattagccgggcgtggtgacgtgagcctgtaatcccagctactcaggaggctgaggcaggagaatcacgtgaacccgggaggcggaggttgcagtgagccgagatcacgccactgcactccagcctggagacagggcgagactgtctcaaaaaaaaaaaaaaaaaaaaaaaagaaaagttgagctgcagttggggagccaacataatgttgtattttgtagacatttaatgaagcacttgttttgagttttgcaggtttcttgtagtattttggagttaattggtttttcaggtttcaagtatttctatatcctggagatgcttgtaggctgtggacactctgcccatggtgcccaatggaggaggtggtccagcagctaaatacaggtggcaggtataaagagagtggcctgaggccgctctgtccagtcccccgcctctggcaggagtcgcagttgatctgtgcttgactcgagggggtctgacgtattcctagaggggcttacaagagaggaaacactttaagactttatcacgactcatctttgatccagtgatccagggaattcttttcaatactaaaaccctgcaactgtaggttgaagacaggcctgcttccagattctgctctcacacctacctgaggtagcaccgtggggcgtgggagagactgtgacagtcacacagagtaagcttcagggccctgacggttgtgaccagattttttttaaatttttttattttttaattttttttgaggcagggtcttgctttgtcacccaggctggagtgcagtggtgcaatcttggctcactgcaacctctgcctcccgggttcaagtgattatcctacctcagcctcctgagtagctagaattataggtgcccgccaccacgcccggctaactttttgtatttttagtagagacgaggtttcaccatgttggccaggctggtctcgaactcctgacctcaggtgatccgcccacctcagcctcacaaagtgctgggattacaggtgtgagccaccgcgcccggccatttgtgaccagcttttttccctcccacctggggagcacgagctcctgttccctgtccctttcgtcattgccctcacatctcccaagcatggaggcctgagctggggacaggccaggctcagccgaatggagccctggggcctggggtggattctggtgtttaggccatgcctgtggccaggcctgtgtgtctggcccagctcaggaaaccatccctagttttggtatttttttttcctgggcaccttgggcggtgctgctgtgtcaacaggacgttgcttagggagttcacccacaccttcctgggatcgctcttgaaacaagtgatacctgaaatgttccaggaagaaaagttacaggcctttatctcttcctgtcaaagtttttttttttttttttttttgagatggagttttgctcttgttgcccaggctcaggctggagtgcagtggtgcgacctcggctcactgcaacctctgcctcccgggctcaagcgattctcctgcctcagcctcccgagtagctgggattacaggtgcccgccaccacacatggctaaattttttgtatttttagtagggacaccatcttggtcaggctgatcttgaactcctgacatcaggtgatccgcccatcttggcctcccaaagtgctgggattacaggcgtgaggcactgcgcccggcctccttcctgtcaaagttctcatttcccaggctgatgggagcataactgagaatccccagggctgaaagccatctcagccatccatccttgcccctggtgaggctgctgctcccccacgtcagcactgacccttgatctttctcctgagcagcaggcctgccattgccctgtgttgtgccgcctggcacctcaccccgcttggagcagttccttacagctcacttctgtcctcccagctgtaatggaagcgtttctcccatgagacacagaacagttggcttttggacatctagacctacttttcaagctgaactgcttggagatagtctcaggaatctgctggttctacaaacacttctaaagtttgcattttcacttagatctaaaaaaaaaaaccttccaattataaagactgaacgtttggctgggcgcggtggctcacgtctgtaatcccagcactttgggaggccgaggcaggtggatcacctgaggtcaggagttcgagaccagcctggccaacgtggtgaaaccctgtctctactaaaaatacaaaaatcagatgggcgtggtggtgcacacctgtaatcccagctacttgggaggctggggcaggagaattgctcaaacctgggaggtggaggttgcagtgagctgagattgcgccactgcacagcagatccagactgtgtctcaaaaaaaaaaaaaaaaaaaaaaaaaacaaacctaaagtttgcagtgatcactccaaattaagagatgttcctatagggtaaataggtaaggcctgaagtcagcactgcatacgcagcccatggggccactggggttgggggtctgtgagcagattctcgggagtcttgcgagaacagctttcacgatgaaagagctgtacgttatgtttgaacgatgctgatctctagaccattttccagtgccattctcagttactgccagctgttgatgaggttgttattggtccgtaatgcaatgaaaagtgatgatacttgctgtaccgacgtcagatggacgtagagcacgtgcaggccacattttgagaaatgctgagctcacccagccctccactgacctcatcgcacagaggtggagcagaggaccggggaggagaaggctgccgggctggctgtgatggacccgggaccgtggcaagctgggagttgccaggttcatttctcccagcctttgagggactgtgatagttcatgccttggtctgacctgacccctagtggcaggaggggccacagctatccctggcagtctttgtggccccgcagtacctgcagggaggtacctgtaagccggtccccctagcagtgccagtgatggcaggtggagcacagcagggccccgccaagaatccttggtctttggcgtctttgccccctccttttcctcctgatggggagttgtgatgtcaggatggccccgctgttttgggggtccacgagagagctcaggccttgtgcttggccctgctccactcctgggtcggagtcatggtctcttggagcagagttggcatctgtcttgcatttgccccgctagagggacagaagacccggtgctgactcctcacacttacccagcctgccgcctcctcacacttaccttgctgactccggcggctgcaccaggactaattgaggagccagtgtcctccctgacaccagcctctgagtttttcttttcttttcttttctttttttttttttttttttttggtgggagccttgaaaattcgtggtttctaatcatccttcagtcatccaccagttgaattgtattttcaacctggaccagtttttaatatacagggacccttttatctggagcccagggttctgggtttggatcctggctctatctcttacctgctatgtgggcttgggcaataatttacccttcagaactttttctgtccaatgcctgtcctctctgcatctcagaattgtagagattcaatagatcttgtatgtgaagctcatgagaccagatactgttacacaggagttactatttcccacatggaatcctttctgggaaagagacagggaggaatacaatcacgtgtcactcaacgacgggaaatacgtcctgagaaatgacgggaatacgtcctacgacacacgtcggctatagagcccgtggctgccagcacagacctggatggtctagcctaggacacacgtcggctatagagcgtgtggctgccagcacagacctggatggtctagcctaggacacacgttggctatagggcgcgtggctgccagcacagacctggatggtcgagcctaggacacacgtcggctatagagcctgtggctgccaggttacaaagctgtgcagcaggttcctttactgaatattgtaggtaattgtaacacaaagacaggcatttgtatactaaacatctaaatatggaaaaggtacagtaaaaatatagtattagaatcttaataggaccagtgtcatctatgcagtctgttgactgcagtgtcattgtgtggtgctggactggattgcagaatataaatgattagtttggaatgtcatgattgatgatggtgttgtcaacgcacaagggcaccaagagaatgtaaagatgctgattttttttttttttttttttttttgagacagtctcgttctgtcacccaggctggagtgcagtggtgcgatctcggctcactgcaaccccagcctcctggattcaagcaattcttctgcctcagcctgccgagtagctgggattataggcacacaccaccatgcctggctaatttttgtattttttacaaaaattagagatggggtttcaccatgttggccaggttggtctcgaactcctgacctcaggtgatccacgtgcctccacttcccaaagtgttgggattacaggcgtgagccatcgcccctggccgagatgctgagatttatggagcacttaactcattcatggaacctggctgcggccaggcttggtggctcactttgggaggccaaagcaggaggcttactggagcccaggagtttgagaccagcctgggcaacacaggaagaacctgtctctatttatttatttattttaaaaaaggaagctcgccgctcctccagggacacctcagtgtgccaccacccctgtcctgccctcagttgttcaaagggtacatggctttatgatgcttgcgtgacggggtaaatagaacgcgctgactgttttaaccatgcggtaggaaaactgttgctaggtgaccctgttctatggtatagagagggagtgagagatgtccctccaggggcatctttgactcagataagagatgcccgatcaaatcaggggtatgaagctggtgggctacacacctcactgtcagtagctcatctagggggctgtccggtttacaaatggccctcctgagtctgcatcccttgtcaggatagaaaagcaggcaggatggggttctttgcccttcccaagcttggagaaatcctgacgtccagagagcccagggagacctgttgtttgggtcaggagcagcagccctgccattttcttgggaccactttgctgtagacccagctcttcctaagatgactcaaggctgggcgtggtggctcacgcttgtaatcccagcactttgggaggctgaggcaggtggatcacgaggtcaggagttcaagaccagcctggccaacacagtgaaccgccatctctactaaaaatacaaaaattagccaggcatggttgcgggcgcctgtagtcccagctactcgggaggctgaggcaggagaatctcttgaacctgggaagcggaggatgctgtgagctgagatcgtgccacacgctgtactccagcctgggtgacagagctagactctgtctcagaaaaaaaaaaagatggctcaaaagaggaagggaggttgtccacatgagaccatctgtaggttacacatggggtgtgtgagccaacacagttgtacaggtgtgcacaggtgtgaatccagaggggaaggggagcggggcccacaccttagtccttctgcatcagctttctgaagctggagttctgagagcagcctccctcgactagctcacactacgataaggaaaattcatgagctggtgtccaaggagggctgggtgactcgtggctcagtcagcatcaagattcctttcgtctttcccctctgccctccctggcttgtcagctttgtccctcaggcttggcccctcgtggccctaagatcattgtcatggttttgtctgctgacaaaacactgctgacatgttaaatcttttttgggaatcattgagaaaacctttccccagcgcacccagtggatatgccctcctctgccactggcaagaggataggctaactgactgccttaggcagatcatgacttaatcctgcgtcccatggaggaggaggacacgtttggctagaacctggctctgccagtggggagctcagggagcagaggtgttgatacttgtatgtgaacaacagataatattcgtgtccaggagtctttgcccttgcagaagcctggacaactgattaatccagaaggagcaccccacaggctctgggtctttcagcatcgcccaatgtgaggaatatgtcttgggcattcctcagaggcagaggccatgtcctacacatctcgactttcctgctgcgggtctcccagttcctggcacagtgctaggcacgtgagcagcctgcagcaggtgcttgttattaaccgtaagagtagccacacttatcagatcattacgatgtgctgggctgtctcctcagagccctgtgtgtattctcacaactactctgtggtgtagacaccaacatctctttcactctaagtctcagagaagctgggtcacctgcccggggttactcagctaatgcgtgctggagtagagggcccagaagcccagatacaaatcctggcagtgaaaccctaaagcctccatgcttttgactgctgagttgcattcctgcccggccagatccagtgactgatggaatgatcaaagggttactggagagaaccttctcttcctagaattctcacaccatctttgaaggcctttggagccagagagagcatcatccagggggcagccagagtcccctgggacttcttttgtcaggaaatccccccctgaggtggagccgagctctgcttcaacacagcactctgaggggtggttgtgccttcccgggtccatccctcccgtggctgagtaatcttggtttttagctgttctcactctcacatgtactttgacaaagccttgacctccctggtggtcctctcctgggtacttcaccatttgccagtgtgccccttgctcctgggtggcctgagcagctccgtgccccccgagaccctgcacttctgccaggctgagggtgcatctctttcagcacctccatcagaccaggggccgtaacaaaggcggatctgaagcccctgcaagtgggaggggcggctcagtgcatggattgatgcacagatgagtaagagaccctcacacacttgcacccatggccagcatattccaagttgcccagagcacactttgggatacaatccagtgtttattacagatggaggctcagttttctggaaaagagtcaacttgtggtcagacacctgagtgtgttgaatccccaccacgatgctgggtgtgaaacatagaattcccattttacagatgaggaagctgtagcttagagaggttagtaactaggtcagtgtcgcacaggcttggcgagctccaagcctcattttccttacctgtaagatgaagataataacctttgtccaccgtgcaggggagctggggcgctgacccctcagattccctccagccggggctgtgccttgcctccacccatgcccagagtgtggggcagaatatggaaacatcctctgtaagctggagtaactagtatgggcctctgtgaccgtgtgtgtgtgtgtgtgtgtgtgtgtgtgtgtatgtgtgcacgcatacgtgtgctgagggctgtgtctacagaccccacgaggagggcagagtcatccggagagcccgggtgctgattctcaggcccttgttctctccccgtagagggccatccgcgtacgcagccactccatggagaccatggtgggcggccagaagaagtcgcacagtgggggcatccctggcagcctcagcgggggcatctcccacaacagcatggaggtcaccaagaccaccttctcggtgagtgctggcaggccccggggcggcaagtgggtcccagggaggccccccccagacctatggaggaagagtgcccccacccaggcttgggcaggtgacttgatcagggcaagctggatgatggtgggaaactgaggctgcttgggggtgaccctgacccctgacctctgaaaacggtcctttggagcctccatcctagacagcacccggggttgacccagatggtgctagaagccctcctgtcctgttctcttgagtttccttgacagctagacctcctcctcggggccagccctgcagtgtggtcctggggtgtgttttgctgctcaggggctcgggacccatgactgtgagaggggtgtccttgctttgttattattaatggcagcagtagccaccccagcttactgtgtaccaggcactgagctgagtaacctgtagacacaatctcacctgcttcccatagcagctgcccgagatgggtgctgatgtgttctcctgttcccatttgaggaaaaggaggcccgctggggctcagtaacttgctagaggccactcagctaagcttaagagctgggatttgaggccgggcgtggtggctcatgcctggaatcccagcactttgggaggctgaggcaggtggaccacaaggtcaggagttcaagaccagcctggccaacttggtgaaaccccgtctctactaaaaatacaaaaattaactgggcgtggtggcgggtgcctgtaatcccagctactcaggaggctgaggcagagaattgcttgaacctgggaggtggaacttgcagtgagccgagatcatgccactgcactccagcctgggtgacagcgagactgtctcaaaaaaacaaaacaaaacaaaacacaaaatcaactgaatttgaatgcgattctgctggatccaaagtctgtgctgttcatcaccatgtgtacagttcccaagggaagggtcctgcaggcctgtgagtttgggcctgattgactcgtaccaggggctgggaaggggagggaatcatgtagttgggcctttcataaagcaaagtgggccgggcatggtggctgaggagggtggatcccttgagtccaggaattcgagaccagcttggggaacaaagtgagaccccatctctacaaaaaaatgcaaaaattagctgagcatggtggcacgcaccagtagtcttagctacttgggagactgaggtgggaggatcacctgtgcctggggaggttgaggctctagcgagccgtaattgggccactgcactccagcctggatgtcagagtgagaccctgtctccaaatctaagtaactaaagcaaagtggctttggatttgtatagactaggattttcctttcttttccttcaaaatagcagaacatactcaccatggaactaattatgagtattataaatggcctcgcataattaatttaattgactaaatattttcctagctattatcttgcttccccctgaaggtgcatggcgtgagcagagcagggcctcatctccatcctgtggatgaggagactcaggtcgggtctcattgctctcctgaggtgccataacatgtgcatggcaggagctggggcctgagttggaggcttggtggcctctagaggttggttccaggctcccatctgccctcctcaaacccccaccactcattgtccactgtgaggccaggcagctttccaaagcagaaggcgtcttggctgccgccaaccgcccattggtgcctgtggccctggctctgcggctctcagcctgtcttgttattggaacgcctgcgcggctccatttgtttgcgaggaatgaaggagagtcaggagtcctcaccctgccagtgatttgctggaagacctttggtcttcagcttccttgccggtaaagtgagaggttgaaccaggtccctccagggcctccctggctctgtgcctctcagcctgtgtcccccggaattgttctgaccttctcaatttggtgggcctggccctgtgttcctccaacagttgtggtctttggtggatcatgacctgggaccacaaggtttggcttaacacagggaaggaggctgtgactggcctgagtctccaggtctcagcttcagttacatagatctcaaccttcctagctgtcttgctattttctggggtctcttccagaccaggagccatttgtagaccagggaggaggatgaggggataggagatcggtgtttgggccgggagcactcattttggcaatttcatcgacagcctccagtggtggcggcaacggtgaagaaccagtcacggagtcccatcaagcgacgctcggggctcttcccccgcctgcacacgggctcagaaggccagggcgacagccgggcacgatggtaactgttgggaaacccctaccccagcctgacttgcggggtctgtcaaccccctccactgctacagctgttcagtgccctaccttgcagggaggagctttgctcagctttaggagatggctctgccttcaggcacctgtgtgtcccctgtcactcactcagctctttatccaaagaggcggacttggccagtctctgcctgggaccttccagagttactcttgccgcattttgacccaggctagaaacattgcttggattcttgtttctttgcctcctttttcaacgctcactcaaatggcctgtcttatgggagccttccctgattctgccaggcagagttagttgcaccttcctctgggcttctaaaaggttctatgcttttttctttttaagcaactcatatattacattacattgaacctgttcttggtaattgtctttctgattcttttaaaaaaatgaacacacagtacttgtgcatatttttggggtacgtgtgatattttgataaaatgcataatgatcaaatcaaggtaagagaaatatccatcacctcaaacattgatcttttgagttaggaacattcaaattcttttctagctattttgagctatgtaatacattattatcaactatagtcactgtattgtactattgaacactagatcttatttcttctatctaactgtatttttgtacccattaaccaacctcccttcatcctgccctcccccgccccttcccagcctctggtgacaccagtcaactttctatctccacgagattcacttttttagctcccacatatgaatgagaacatgcgatatttgtcttttttttttttttttttttttttttgagacagagtctctgttgcccaggctggaatgcagtggcgccatcttggctcactgcaacctctgcctcctgggttcaagcagttctcctgtctcagcctccctgagcagctgggactacaggcgcatgccaccacaccggctaatttttgtaattttggtagagacggggttttgccatgttggccaggctagtctcgaactcctgacctcaagtgatccacccgccttggcctcccaaagtgttgggattacaggcgtgagccaccgcacccggccacggtatttgtcttttcatgtctggctttcacttaacataatgacctccaattctacccatgttgctgcaaatgacaggattacattcttttccatgggtgaataatatccattgtgtatataaaaaagattttccttatccgcttatctgttgatggacactcaggtgggttctgtaccatggctattgtgagtagtgctgcaataaacatgggagtgcagacctcttccatgtactgatttcctttcttttggatatatttaccctgcagggggattgctagatcatatggtagctctagttttagtgttttgaggaacctccaaacactgtagtgtctgtagtggctatgctaatttacattcccaccaacactgtgagcatttccctttctctgcatcctcaccagcattctcaattgcctgtctttttgataaaagccattttaactggggtgagatgatagcttattgtggttcccgtggtgggggcagatgtcacagactccaaattattaaagacaaataataacagatgtcaggatatggagaaatgggaaccctttttcattgctggtgggaatgtaaaatagtgcaactactttggaaaacagtctggcagttccttagaaggttaaacatagagttaccatattaccaagcaattccgctcctcggtatatacccaagagagttgagaacggttgtctgtgaaaaaaagtttacatttacatttctttgataattaatgatgttgaatgttttttgatatacttgtttgctatttgtatgtcttcttttgagaaatttctattcatgtttcttgcccttaaaaaaatcacattatttgtgtttttgctattgatttttttgagttcctcatatattcaggttattaatccttgttggatggatagtttgcaaatatttcctcccattctgcagattggctctttacttggttgattgtttcctttggtgtgcagaagctttttaacttgatgtaatcccatttgtctatttttgcttttgttgtctgtggttttgaggtctcatctaaaaagtttttgcccagacagaccaacgtcctaaagcatttccccaatgttttcttttaggagtttctttgtttcatgccttagatttaatccattttgatttgatttttatgtatggtgagagagaagggtctggttttattcttctgtatatggttatccagttttaccagcaccacttactgaagaatgtatattcttggcacctttgttgaaaatgaaatgatcatgtggtttttgttctgtatggttaatgtgatgtatcacatttgttgatttgtggatgttgaaccatccttgcatccctggaacaaatcccatggtgaattgatcatggtgaatgatctttttgatgcattgttgaattctgtttgataatattttgttgaggatttttgcatctgtgtttatcaggagtactggcctgtaactctctttttgttgtatccttgtatggttttgatgtctttctgattctttaattgatgagcccatttgttctttatttcagcagccagcatttcttgagtggctgccatgtgctgggcacagtgctgaatgctcagacaagtgctacaaaacatataagcctgtcctccagaagttcacagtcttgtaagggaaagggcggcatttggttgacttccaaattcccaggttttctgcctatagccctgggtggtggcaccatgttctgaagtagggcttgcaggacaagaggcagggttatggagaaggatgaaaagctctgtttggaacctgtgcatgggagtttttgtgaaccaacagtagagatgtccagggagtggtcagagttacaggtttttaaaaatttttattttacttttttcttttattattatactttaagttctggaatataagtgcagaatgtgcaggtttgttacataggtatacatgtgccatggtggtttgctgcacccatcaacccgtcatctaggttttaagccctgcatgcattaggtatgtgtcctaatgctttccctccccttacccccaaccccccgacaggccctggtgtgtgatgttcccctccctgtgtccacatattctcattgttcaactcccacttatgagcgagaacatgtggtgtttggttttctgttcctgtgttagtttgctgaggatgatggttttcagcttcatccatgtccctgcaaaggacatgaactcattcttttttatggctgcatagtattccatggtatatgagaggccttgaatagagaaggagagttgggaaccaatagggtagaggtactgattaacgattgcttaattaatatgaccactggagaggctcagtagagtaccacatttaagggcaggtggagaagggaaggtggtgaagctgactgggaaggaaagatgagagaagaggaggaggggatggagtctctgaagccagaggaggagaaattccaggaagggaggacatctgtgtcagacacacagagaagtccagcaaagtgagccaaacccctggacagattgacaggaggttattagcaacctcatcaaatgtgcattgagacacttcacacctctaggatggctttaatcaaaaagacaaatagtaacagatgtcagagaggatatggagaaatggaaacccttgttcattgctggtgggaatgtaaaatagtgcaactactttggaaaagagtctggcagttccttacaaggttaaacatagagttaccatatgaccaagcaattccgctcctaggtgtatacccaagagagttgagaacagtgggccatgaaaaaaaatgagtccactagtacaactagtgtacagatactcatggcagcactatttatcatagcccaaagtggaaacagtccaaatgtccattgtctgatgaatggataaacaaagcgccatctatccataaaatggaatattattgcagtaaaaaggaataaagtcctgatacaagctacaacatagacagaccttgaaaacattatgttaagaagccagacaaaaagaccataacatattatatgattctatttacatgaatgtccagaagagtacaatctacagtgatggcttcgggattgggtgggagttacagggagaggactaggaagtgattacaaatgggtccagtgtttcctttaggggtccaaaagtattctaaaatcagatggtggtgatagttgcacaactctgaataaactaaaagccattgcattgtatactttaaataggtgagttctgtggtgtgtagattctgtctcaagaacactattatttaaaaagtacattgacggccaggtgcggtggctcacgcctgtaatctcagcactctgggagcccgatacaggcagatgacttgaggtcaggagttcgagaccagcttggccaatgcaatgaaaccccatctctactaaaagtacaaaaattagctggccatggtggtatacgcctgtaatcccagctgcttgggaggctgaggcaggagaatcacttgaacctgggaggcggaggttgcagcaatccaagatcgcaccactgcactccagcctgggcaacagagcgagactcagtctcaaaaaaagtgcattgaggacacggccatcccatccccaacagccagcacagggagcactgtgggcactgtccatggtctttgttacactaaaggagaaggatattgttggctgagagtaccccttgcttcccagctcccagggcagcctcctcatgtgggaccaggagctcgtattctagtctatatgaaggatggccccccgggacttcccaggagtccatgtgtattgggtggttcctgcggtgggggcggatgtcatagactctgccatattccctgctccattccccacggggccctctcttgacccacaactccgccaggtgtgatggccagcttgggtgagagagatctgggctagaggccgtcaagccaggactcctgcttggcagctctggacttcaccatgaacctagaatagtccctgttgtagggaccgggaaaccctgtagtatgccgccatctctggggggctcaggtgggaaaggacatccaggcagtgatgccaggcgggggcgctctgaccccactgcccctcaccgtgccgagagaggctctgcctggggccgtggatggggtgggggttgagggctgtctccgcggcctcactcctcatttccattccctcagtgacagcacatccagcacacccaagaccccagatggtggacactcctctcaggagataaagtctgagacctcatccaatcccagctctccggaaatctgccccaacaaggagaagtaagagagtgagggtgggaaaggccagcttcggccacgtggagccctggaacacgccctctgcctcctggccagctgagagtggccatctcctgcctctggaactctccagaacacaaaggccgacgggtgggggcgtggggagccgccagaggtcccggggaggaccctgggggtggagggctctcgcgtgtgacccgggctggcctcacttcctattccctgcaggcccttcatgaagttgaaggaaaacggccgtgccatctcccgctcctcctccagcaccagcagcgtcagcagcactgcaggggagggcgaggccatggaggagggcgacagtggggtaggtgtgccccgtccacccttgggcaggcactctggggcgtcagccagccaccctccttgcattaaaacggcactgtggatcgaagcccatgtcagtctttgcagaggaaaggggaagaatggaaacgagaggtgggctcgttggccatcaccaccccctgggcgcagtgggtgaggggacctctctctcagagtgacatagcagcagcagagggcaggggccagacccgatggtgccctgccttggggttcctggctggagtggtgagtggccagtgccccagggggctgggtcaaaggtccttcttggagcaggatagcttggaaccagggttgaagtcagcaggaaagaaagagcaggcccaagtggggagcaggaggcagcggctgtcctgggcttttgggggctgcctcaggcctgcgtgggcgcagctgccgagggtgggctggcctcgctcaccctgcctctctcctcagggcagccagccgtccacgacctcacccttcaagcaggaggtgtttgtctacagcccgtccccgagcagcgagagccccagcctgggggcagctgccaccccgatcatcatgagccggagtcccacaggtcagtggcatctggtggtgtgtgtgacgtcaccaggagggcaggctgtgccctgtccactgttagcagggccccagccacgctgaactggccagttttcacccctcctcccagctgtgaggccctccgctctgtgcgcccgcctcttctgttcatcagccttaagatgcccaagttcctaagctcttcttacactgagagttgtgaagctgaggcagagagttgaaggccttgtgggagatcccacagcggaggagtcgggattggcagtgggaaagctgagcactttccattagcccttctccccacctgccagtgctccaacccttctccccacctgccagcgctccagggctgccagggcccgtctgtcatgtcgggggtcttgataatacaagacgggggaagggctgcagggggagggaacagcatgtggaaaggcccagaggagaggagagagcgggtattccggaactgcacgtgttcatggcagctgggttcacagagccaggcgtcagagaggccggagcgttgacaggctgggtcagccccgggccccgggtgaggattttgttctgctagcggccactgttggagtgtttgaaggttcttaagtagggaagcaccatctggagttgagaaagtccattttggctgctgcagctgctgagtgtagaatggattagtagagagcaggagcagaggggagggatggaggggaggggagaggaggggaggggagctgcggcagaagcacctcggttcaggagagatcaaggaggtaaaatgtacgggctcagtagcaggggttcagagagagcaggagtctgggcgttttggggttctgtgatccctgcagttggtcagaataggggggccagcacctgagggccgttcaggtagacctgtgcggtgggcactgctgggcgggtgctccgggtctctgccctcgtgagggcagcacaggactttgagcctgggtccaaatcctgggtctgctgcttactagacatgtcattgggcgagtcaccaagcctgtctgtgcctcagtttctccaagcagaaaatgaagggaggggaagagtcgtgtctgcctcagagggttggttgtatgaagatgaaaggagctcatgcttgtacgaggcctggaactgttaacctcggtgttggttaaagaatgggaatgagacaatagtgtagtcagcggttctgagccgggggcagtcttgctaccccatggatgtctggcaatgtctggcgacatttttaattttcacaattttggaggggtgctactggcatctagtgggcagaggtcacggaagctgataagcaatgtacaggacagccccctagccacatcagacaaataattctctgaccccaaatgacattcggttgaaaaactctagtctcaatggtagaaacacaggaagggccaacaggccttcagggtggctgaagccaaaatgttcctggggttcacacagcgaagggatgttgcaaagggaacctgcagggtcagagatgaagggaagatcgtgattccacagccagtgaccctttgcatgcgtgtttctcagtgagtggaagagttcacgtgcctcctctcattcagccccctgtggttgggcagctgcggagctgggttcaaatcctggttgtagcattgacaggtccacgtctctgagcctcagtttcctcatctgtaaaagggggtggaaatacaaattccctgattttttttcgagatggagtctcactctgccacccaggctggagtgcaatggcgcaatctcggctcactgcaacctccgcctcccaggttcaagtgattcacctgcctcagccttccaagtagctgggattacaggcatgtgccacatgcccggctaatttttttatttttagtagagacacagtttcaccatgttggccaggctggtctcgaactcctgacctcgtgatccacccacctcggcctcccaaagtgctgggattacaggcgtgagccaccgcgcctgacctggtgtttttgttttgttttgttttgttttctaaataagacttaaatattgaaggaatgaatgaaagaatctgtaagcaagcctggcccccacttggtgttaaataaacgtcaaagtaaggaaggttttgagtaaaggaattagagagtctctgcaggttgctgaaggtcaccgagggcggaagggacctggagcgggtctggtgacttatggccggtgcttcccacaccacacggtgaggctgcctcttacacaccttttctccacacagtatttaaccccgatgggctgcttttcacccccagcccacgaaagatgtgcttggtacccactggatcagggtgggcttggggggatctgggaaccggtttcatgctgtttggctgagtctggggagaggcagggtggagtggggagaggtggcctgacgtcctgacgtacagtctccataatgtcagatatctgatcatggtcatttcctacctgggcttcctggggcacagaagaggactgataggttacacagaggtgttgtagccctgggtggaactcctcgattcgaagcaccacgaaccagccagcagcttccaggaaggctgcactaagctttccataccctcggccagaggacagccagaaagtcaagtggccctcctgccagcggggcacagcgggaaatgttgacaccgggctctgccaccactcacacacacttaacggaattttattatacgatggatgtcaaacccagtgtacaaatactagataatattctttaccataagtcccatatgtccaactgattctcacagaatgcttttagtggtgtttgcttcacctttttatctgtagccaacttaaggctgcaggagatgaatgtgtgtaattctgacatgaatgtggactgatattaccatgtttgttaataagtattttatatgtatatattatatatacatatatagtatatacatataatatacatatgttatagatacacataatatacatatatgtatatattatatatacatatatattatatgttatatgtatatacatatgtataatatatattatacacacacacacacacacactcactctcatggcgcccggccatgagtattttgtattaagagaacttcattcgtcagtgacatgagtcatttccttgctgtatccgagaaaagttttcaaaccccggaaggatatttcctcagttttcttttgtgctattcacaatgtaatcgctgcagacacagcatgttttgaagtttcatgtaaattcctttttttctattagttccttaagtctagacaacaaaacaatcaatcaagtcatgatttgtagcatgtaccagtttctgtggtgtaaatacacttgtcgtggctgatctcaagctactgacgtgatgtcctcgaacgtggacttgggaagaagatatactgtagccaccatctttagggtgtttctaccacatggatacaatagacgtaagagcacagataatcgtaaaacagagaaaaataagtaggaagtgacgaatttcaagtatttattacctctgttgaatataatttattgaactgtaagcttatatataattcaactttaaaaaatggcctgagttgaacaaccagctcaccacaattctataatctaggagttggctctcgtgggtcggcacaggtcagctagggtgcctggtcctggtggagggcaggaggcccccttcccctggcctccctagccagtccccacacacagccccagtggcctccacagctccaccctcctttcatggccgttctttttcttagatgccaaaagcagaaactccccgagatcgaacctgaaattccgctttgacaagctcagccatgccagctctggtgcggtaaggatgcgcctcccacaccccacactccactttctgcagaggcccagccttccttcctgaggccagaggaagagggttcagacatcccagagggggctccccgaaggaggcaggggaagctctggggacgtctggctccagcaggtgcaggccgtgtctccgggttccagccacctttgccacaactcccaaggtggagctacacctctggacacggccaggcccagatgtgaggtgggaggtgctggttcctgggtcccccagtcccttcctgagctctccagactatcgagagctccaggcccagttgtgaggtgggaagggctggttcctgggtcccccagtcccttcctgagctcaccagactatcgagagctccaggtccagatgtgaggtggaaggtgctggttcctgggtcccccagtcccttcctgagctctccagactatcgagagctccaggtccagatgtgaggtggaaggtgctggttcctgggtcccccagtccctttctgagctcgccagactatggagaactccaggtccagatgtgaggtgggaagggctggttcctgggtcccgaatcccttcctgagctcaccagactatcaagagctccaggtccagatgtgaggtgagaaaggctggttcctgggtcccccagtccctttctgagctcgccagactatcgagaactccaggtccagatgtgaggtgggaagggctggttcctgggtcccgaatcccttcctgagctcaccagactatcgagagctccaggtccagatgtgaggtgggaagggctggttcctgggtcccccagtcccttcctgagctctccagactatcgagagctccaggtccagatgtgatgtgggaagggctggttcctgggtcccgaatcccttcctgagctcaccagactatcgagagctccaggtccagatgtgaggtggaaggtgctggttcctgggtcccccagtcccttcctgagctctccagactatcgagagctccaggcccagttgtgaggtgggaagggctggttcttgggtcccgaatcccttcctgagctcttcagactatcgagagctccaggtccagatgtgaggtgggaagggctggttcctgggtcccgaatcccttcctgagctctccagactatcgagagctccaggtccagatgtgaggtgggaagggctggttcccgggtcccccagtccctttctgagctcgccagactatcgagaactccaggtccagatgtgaggtgggaagtgcttgttcctggggtcctgaatcccttcctgagctcaccagactgttgagagctgagtgcacagagccgccgtggaagggacctgtgctgtctggttatttaaactcctgtatggatttttgttgaaacagggtcactaatgtgaaagtggagtccttcgcctgtccaaggtgggttgagtgaatgtcctgctgtggccgtgaggggggacgtgtgtttcttttagatcagggaactagaggccttgtaacctcagaatggccggagagatgccgccagctggggatgtccaaagagtctcctactcgcccctgaagacctgcaatggggaaggaggggcagatggcctgtgtgcggatgggaagggggttcccagtgacactggactagacgtactagttaggcctcccttccaccgatggggtctggttcccgcaggcagaaggggagtcgcccaagcccgcttctgacccaggagggaggagttcctgagggctcccttgctcccctgccctcaggcagctgttccctccttgtgtctttggcggaggccctgggctgaggtgtgttctccctccctgtcgggagtcagcactgtgagggaccaccccaggaggcctcttcccctgcctgctttgagggggcacgtggtttgagcagagtggccgtgggtccagctcgcccccatcaaggcctggatttctgctggggaagtcaccagagacccatctgagctcccagccctctccccacatggggcttcaggggtcagagtcacagctggagccaagaggaggggtacaaccgaacccactctgtgttcaacctgatttatgaaaaagcagaagacaaatgggcatatggaccttcacccccggctcccatcacgcactctggacgccactgcccaccaaagccgtggctatgcgcagcttctcgggccacgcaaggtggggcacccttacatcaggtgccctcctgctcctgagtgtatccagtgagctgtagccatgggcaggcgtgttccccaccccttgctcccgacgtccgcgtcgtcccctccttcctgtacggaatgttcgctcatcgccgcctcctccttgtctcctcagggaatcccctcttctgtcctggaaaaggctcctgtaccagcagtttgggagtgccgtccacgaccctgacagtcccagccctgctgccccatggccacgtgcccacagatgtgctgttggtccaggtgtcccagtctggccacagccctgcctccgccctcacctacatgccctcccagcccctcccatctctggacgaggcctccttcctcaggttcctcctgctcctgacctcccagtgtgatgtccgggtcctttatcatcctattcatcctggagaggaaaagtgtcgggcaaagggggatctggggggagctcagcagtgactggggagctggtctgcctcagagacagagtagggggtgggagcagagcctcggtgagggtcttggccacagggcagtgccttcctgaacgtggcaggctttactaccaggaacgcactcggtggtggaggccccatgttcccaggagccaagattcgtagcatccttgaggccatcctgataaaattcggcgctattgcccccgtagctctggagctctaaaccgtctatctgcttctgtgctgaacgcctttcccatctgctgacgtaggcccagggctgccctgcccctgctgccagtgtaccgtgagcggggctccagccagttcaagctcagagccagagctggacgggccagaactgcgctgcacacttcctggactgaggcggggactttgggtcccacccggtttctcctgattatggctgctgtggggtgaggggagggaggggcagccccgaggcagtctcttccctttgagaagatattttcccacaaaggggtgggaagccaggagtgagaaggaattcagggagagcaaaggagccagtgctgagatgctgctgtgttggttgaggaaaacctcgggcctgagggccaggccggagcccaggtctctgctgacaatgggggttcaaggaagacgtcgttatctcccctccccacttactcgaggagagaggtgagggggggatgacttgcgggttctgatcaggcccctgggtggggaaggggcacagtgtccctcagcagcttacgcccctggagtcttggggggcccagcctggccctggggccttttccagctactgtgcccttgggcagctgcgtctggggctcaaccccccaatcctgttcccctctccagctgcgggtctgtaggcagctgtcacatctgaagggtttctgcaacctggaccccatctgggtgtgggtcagaccctgtgacccacatgccacccccaccctccacagagcccccttgctgggacagccagctcacctccaaggacatcccctcctggcttctcccccttccgagtctgcagcgccgtgggcttctctgccgatgggcccgggttggggttaaggtgggcatcctccaggtacaacgagcctgaagagcccctttcagtgcagacggggctgcagagtgacactggctgggcacctgccccacgaccaatgacaaggatttccagctgaatgctttattcccatagggatctggacctgtgcccaagatataaatactacactttttttttttttttttaactgacattgtgaaattctccctatagcttttgccattcaagcaacattgtgatctttcttccccgccacgtgtgtgggaatgattgagtcctgtttgcaagctggagaggagctctccctttgctagtactttctctaaagtactagtctagtaaaatttattcttgttagaaggtcaacaaaatatctgtttagcttttatgaagagtcaccgtagcagcccccacggctggaaagaggcctgtacgttctggacgcgttttgttggctgggcttctggaggcactggcaaggtcaaactgcatttctttaagaacagttgcaggatctggctcgcctctgtgggaagccggcattacaggtgcttggtggatgggccgtgtcacattgccatctggggtcctttggggtttccaggttgtcaccatgctgtcccatttgggaatcccatacctgcctgtccccactgcgctggctgacccttgctgcctgctgcctcttgggagggctttgtccctgcctctgagctggtgggcaggatggctgggtggcccccagagaagcacagacctgagatggggtctccatgcccggtttgctgttggaatgatctgaacaggaccccaaatgcctcttccctctggtcatgcctcactatctctaggagctccatcctgtggcttccagagtgtgcacttccagcccacccgggcagtgctgagagggaggaggagaacaaggatggcccagcctcccctccctcccctagaccacggggcgggcagctcgggttcctggagggctgtttcccccacgctgtccctacatctgctctgatctaaaatgtctttccttttatgctgcgcccagtcttggggctcaaagatttgcccaaacctcattggccctcgtgactaggctcatctagatggtgctcacgctggtgtttgaggcatttccactgtgatctccacgaggggatgttttccgggacacatctctggctctgggaactgcctgactcactgaagaaactacttttcaggcactgtagggtcacccatatgcctccagctcagttgacgcttaaaaacaggtgcagaaaagctcgcgatggaaggtcttaatgagagtgtctgtctatgccaatcatgtaaaatgacgtttcttgaaaaagattcagtggttcagctttgtcagcatcatctcaacacaagcctgctggctctttttagcatctcatccaaccatgtcatcgtccagatgagaaatcttagcccaggtgaggggagtaacttgcttgaggtcacacagctggctgttggcaaagctgggattagaaccctcaacccagggtcccttcctctgcagcgcctacatggttggttgaataagtggctgcgtttcctggggccctgggttttggggaagccagttagctgctgctttggcactggcatggaggtgagcagtcaaggatgctggtgaggctgcagtttctgctctttttcatcaggggggatagtctctaggatttttcagtgaggacccttgggctttggatgcagcttgaaccaagaaaacgaggagggaaagggattcagtgaactattcctcagtgggatcggttcttcagctcctgatgggggctgtgtaatgggggcagaggccagggaaaaagatgctgttcacccaccctcagcttcccttttcctaaattaagaggaaaagtggtcaaagaaaaactcttcatttctccctgattcttaaacgaaggtggttaatagaaactcaggctcccgtgacaaggcaggacaagagcctgtttcgctttcctccctgaccctgccaggtgccaactcaaacactacctttctcattggtttctaagtcagtagagacagatctgttttaagcagttgggggttcgagtagatctcatgggtacaggaggccagcagggaccaggccagtcagccatgctcaggacccctcggctcctcccccagcctctagctaccctgtatcgaggcaaggggaggccagtaaagtttgccaagcctgatcctgcagcctggtggggctggctggggtattcttttaccaaactctgttttaccgccagccccttgtacaccccaatcccatgtctccctcccttcagctggaccgtgtgcccctttgggaggaagaagacaagccccactagggccaagggcagcagagccctgccgagtgagaggctgtggggcagcggctctgtcctgtgccttaccagccctggggaggggggcatttggctggaagactggaatttaattgccatcgtctttgattttgtgacatttctgcttggaagtgtgaactacccccccccccccgcttcctgctccttagcatgcgtgcagctctctcctgttttgggtgttccccttggacactccagctcggggactgctggcgtgtgaatgtgcagattcccctgtgtggtcgaacctaagaactgtggcttggaagtgatgctccatgtgacgacgactttgctttctttcctcttagtgaggaggtgattcgtagatcccaactgcctatgtaatgtaaataatgtacatttaatttattgctatggtagcacattgtatttgttaatgtacaaaacaaattctaaaaggttgacaaatgtatattttgttgcttaaatgtgtctttgcagaaattgacaataaataacatattttgtgtcca

SEQ ID NO: 17 - DNA, 24989 bp, Homo sapiens
ctgaaattctcactcatttgacttcccgctgtttatcaccgcagattacggttgcaccgtaaaaggagaggttctgttccgtcgcgggatttcgccatggtaagacgtctgcgtcctagctccggatttatctgcctccatcctttgaagaagggccttccatcttggcaagcttttacttttcgggtaccgctgcttggcgggtgggaatgctgctggtgctgcttcaggaaacccgatttggagagcggaggtctgagaagagtgcggctgggggttccgggctggcccttgtgctcggcctgggcgccggtggtgctgttggcacgtgagtcttgttaggaataagcttcctcggctaaccttacaagtccacccttgactccgcagcccagcactggctttttacgcgggttagcttatatccatacgttgaagcagtctcagattcgcttggagagcactgtggacgctgtcttgacagacgccagagagactcgtgaggttgtcaaaggtctgggagttttgcggggtttgttctggagtctggcaggaagtaatatttgctcaaaactgggcgtgaaatagcctggactgtcctttctcctccgatccggtattacccgttagcagttgttacagctgaagataaagacattttactgttaactgagacgagtttctctgaaaaagtttggtgtctttttcaggcccggggccccaagaagcacttgaagcgtgttgcagcgccgaagcattggatgctggataaactaactggtgtatttgtgagtataactgtatttgctttttactcaaaagtgcatgctgtgtacctgtggcttgctatttcgtgggaacactgtttgcttatttatgtgagattttcgttggtgaagacttgctgcacacggaacttgtccttgcactgtaatgaaaaggtccctgagaaaaaagttaggacatcctgtttggaaacagcgggtcgaacagctctctgacctcaactttgagcactattgtggtccataatgtcgctgagaacctgggcttgccatcttttagtaactattgagagcctaatacatgccaggtgttgttatgtgggcccacccttaaggatatgtccgggtacaaaatggttggacaacaaaatctatccctctttcttgttgaagcttacatcctgctgggaggagagggaagttacagtatgttcacaggtgctgaaggctggggggagaaaaaagtagggctgttggaaggatcaatggggttttgagcactgcagttttaaagagtgtgaaataaagaagcctcttacagaagaacagaaagacataagtgagtgaactattggacatgtttggggttttttttttttttttttttgaaactgagtcttggcttgtcaccaggctggagtgctgtggcatgatcttagctcactgcaacctctgcctccgggttcaagcgattctcatgcctcagcctccccagtagctgggatcttttagtcaccacgccgatctaaattttgtatttttagtagataccaagtttcaccctgttggccaagatgttctcaatttcctgaccttctgatccacccgctggtggccactcccacagtgctgggattataagcattagccatggcgcccctcatattttcaaaagagctgttaggctgctgtgttgtgatttattcaaattgtgttatatcatgaacccatttcttgaggcttgtgctctcaaggattaaaaatgccaacagcaacaacaaaacaccaggatgtcaagtcctggtggtctcttttgctgtttgagctctccactttagagggcacttcctgaacccagacctgaggggattaatgaatgtgctaaattccagataagaaagggttcagtgacagtgcactgagtccccattaataataaaatgtatttaatttgaagttaccctttgtttcagagggtggagtagctgctgtttacattgagcccaagatacggttttaacagtaacggctactggggtccatgcaacacaggcaagaaattgcgtgagaaatgcaggagtctcttgaactcaaccttgaagacctggcaggatgaggacagtatgcccagaggcaaaggaggcaagcatctgacaagaggcggactaggcagtttccacattggtggtgtggtaacaatgggagagaggggttgaagccataagaaagtcttgggtcttctgagacagaaagggagccagtgtgaagaagcagacagaagcgaggtgattaagatgccaaaagttttgttgggcaggaataaacatagggcatctaagagaaaataatgcagccctgagggtccacatccacataataggcacttggtaactaacttgatagattacgtagccttttcttgggacttagaactctgaacactgagtagcagaaatttgtcttccttgtcttggcattttcggagagaacatggactctgtgttgtttgcagagctggatttgcaaactttccgtgtcagtttctgcttccaagtcttatctctgctactgccccctagtgtctgacctcccaggttgggcccctgttccctctattgttaagtggatgagcaaggcactctctctctttttttttttttttttttttttttgagacggagtttcagtcttgtttcccaggctggaatgcaatggcacaatcatggctcactgcaacatccgcctcctggattcaagtgattctgctgcctcggcctcccaagtagctgagatcacaggcatgtaccaccaagcccagctgattttgtatttttagtaaagatggggtttctccacattggtcaggctgggtcaaactcctgacctcaggtgatctgcttaccttggccttttaaagtgctgggattacaggggtgagccgctgcacctggtcaaggcactctttttaagaagacttgctgggaacttagtcctcagtcttctgggctccactcttttccccatggcgtcgatggaagtgtgtggttaatgattgagtccattttaagagggataaagctaaataggcatctgtagaaggagctttaagaacagccttcattagaaaggattcctgtgtggcctcagcttaagagataattgaggagtggagttaaaggcaatacagccccagagcttgagacctttacaggtactggtagcaaatagccaaaggatggtataacactaaaactgcaaaagtataggttataggatttattggagtgggaatttgatgacacttaagctggtggcaagcagccaagaaagggaagagcacacagtctgtgttaagaggtggtccagcaatatcggcagggcttgtgtgggactttgaggcctagaatggtgagaaagtagtagaatatgtcttcgtaggttgtgggtaaagcgtaacctacacctgagatacatgggatgtagtattgtattgaagggaggtttgaagaggcagtaccagtgctggtggtgcttggggcagggcaaaatggggagatggttgtgagactggatttgtgaaacaaaggggcacaaaaagagacttccatagttggggttgtgaccttcctaacaagacagacctctctaaattgatgaaataattgccctcttatattcctcttccccaactagttaagttcagctaatgctgaactaaggcaagtcatctactcaatctggttatgtaaggggcggatcttgagagattaggttgcctgccattgtcttctacaggcacctcgtccatcgacaggtcctcacaagctgagggaatgtcttcccctgatagtcttcctcaggaatagactcaagtatgcattgactggagatgaggtaaagaagatatgtatgcaacacttcctcaaaattgatggcaaggttcgagtggacatcacataccctgctggattcataggtaaggaaagagttctttgttttgaagaaggaacaggttgagagaaaaacaaggtgtgaggcttacatgttgccaacgataagcaaaacccaacactgaactttgatttctacatgagttactgctggtcatttcagaaggagaatgagggatagggagagcgtggcaaggcacaagtgaaaagctggaaaggggttggtaatgtaatgggatgagatcagcagtggctgctagctggtggttatcgaagtttggttcctaccctcccaacagagactgggagacagagaagctgtcctcaggtgttggctggaaaaaacagtaaattcttttggttagtcttgagtttgtcaggcaggcactttgaaggggtctgggctcatcttgagtttttagaagccatgttagtggttcagatcttcatagccaaggctgaagctcagccaagaagagggcttagaggagtctggctaatgactggtcaaggagagagaatctttgtcagtgaacagggttttggccctgtcttcccactttctctgttgatgacctaaccatgctggatctccaaggatgcatttgcaccttggtgggagaggagagtggagaagggagagaagggtcacactcgtctagggaaaaagtgtcctgagaaggatggtagggaaaggcactgaggaattctgacctagtggtttgttctctctttctttcatggcgacaggctcaatacttttttttttttcttcattttgtattttgctttctttcttaaaactccaagtcccaagcaaggcaggactcctgataagggaagtcagagtcgtggcggggggtgccaagccattgaccgggcaacctgcagagccttgagccttgtctgcttaaatgtgaggactgcttgttcatttggttttctggtgtgtgtgggtatgcttatgtgtgttttctcctcagcatcctgagtgcattaacccagaacacagtctcaagcagccgttgcacaataacatagaaagtggtagagtagccatatatatagacatttccttttgttggatgatatttactgggacaggaccggggttggttggtttcattcaagcacccccatcaagcgctggggacccctacgctgctaaaatgttctcacattcagcttggcacagagagctccagctgtgcaggccaaagaaactgcattaataatgttccttatacttgtttgtgatcagatgtcatcagcattgagaaaacaggtgagcatttccgcctggtctataataccaagggctgttttgctgttcatcgtatcacagtggaagaggcaaaggtaagtgagctttataatttccagacagataggtctgttgctaaggttctcagacggcatttaagccatattctgggaatagtgcctatctctgcctgtttgtccgggcatttaagccatattctgggaatagtgcctatctctgcctatttgtctggttgttcaattcaggcacgtaggtctaccaacactgatacaaggcagtggattttccagacgaggctgtttagaaacagcgtacagagtaagcagttctctgagggacaagatgtttctgtataggaaaagtctggtattggaaccaggaaggcctgggtaagaatccagaccctgtcattgattaattatgtaaccgtaggcaacagtatgtagaaccttttgtgagccttcattttctctgtaagtggtgataatatgctttcttgccaggtttctgtgactgttagcagcagtggtgcctcgcacttgctagacatagaagattgttgacttcctgaagtctgcctcaaccgttaaactcccccttctccaaatttaatggccaaagtcagtaccatcggggaaacttttcaaggaagttcctttccgtgtggacagcacctgccttttttctgtgtagggaacacctctttggaaaccaggatcacccctcagtcatccattcctcttttccctggatttaaggtcatggggtgacttcttccttatttctcacataacccaatcacctgtacagtgaccaaatgccacctaaatatgagacacattctatagatgaatttcaatgttttatcagacattgtttccactttgtttaatcagcttgcctttttctcagttatttctttgggggaaacacattggagtccctataggaattcacaaatactttcatatctgggtagtttcttaattgatcagttgttggttgtttttaacttctttggtagtgtcccttgatgcagtgtcccttctgtttttgtggattgttcccacaatgaggtgctttgttttaggtggtaggaactaggtctagtgtcctggagagtgttcagttgcccagggtgttggatcctgttgtgtctaaaagctagaaagcacagggaaatctcaaatctgatgactggtttctgcttttgtaaggaatttggatctcaagagacaatgcagattggtagtccctgtgaatttttttttttttttgactgagtctcactctgtcgcccagactggagtgcagtggtgccatctcggctcgctgcaacctccgcctcctgggttcatactaatctgcctcggcatcccaagtagctgggactacaggcatgtgccacccctcccggctaatttttatatttttagtagacatggggtttcaccatattggccaggctggttttgaactcctgacctcgtaatccacctgcctgggccttccaaagtgctgggattacaggcataaaccaccacacgcagccgttgctgtgaatttttaaatggggagagatggagtaggagaaggagatactggagagttgttaatacctagtactggttctactacattggccagtcaccatgtgaaaagcttgtgtccaggtgagtatcacatcgtagccacaggtgccaaatgcctattctgggtttgggttagagtaaggaccttatctttgtgcaagagataagagatttggggaagttttggttgagcttatttgttggctggttgtttctttcgatagctagaaaggtagcattccctgtcacaccccagccagcatgtctagagccacaggttgaagggcacagtgacttcagagtggagagtggtgggctccttggatttcagtgtatcagggacacaccacggagcctttttatgcagattactagtccaccaggtagcacaggttagtggagagacagaacatccaaacggccctccacccttgaaattaaaactagaaaagggatattttatgggtcttgagaaaacagccttatagatttcagacataatttttccctttaacaacttggtattagttgaggaccacagaaatgggagtcattagatttaaggatgggagatgaggtttttgttttgttgttgttgttgttttgtgattgccactacagtggatgggagaaaaggaaagattttgggtgagcccgtgatgagcctgcacatgagtaatgggaactgaggcagtacctgttcccattgcaagttggggtagaggacacaagtatcacctgggagatggcaaaggagacaaagggtttagtgtatgcatcccctgctgtggtagaggggaagaagatgtgggacagggtgactgagtatttggtggtagggtaaggagatggtagctgcagatcttcatgaaatacatggatgcttgagagagttgtggaaggacagtacattaatgctttgggttcagcttgcgttggaactttcaagtagatgatagaaggaagtagatgctgactgaaatagaggactgaaacactgctcagatgagttacaatagaggctgaatagttggcacagaatcctcattgactttgggcagcttgtattcaatgatggatgtgcatggggagagagagatttcataatgcagagggtttatgaacaggatctaggtggtgcaggttctgtttcctgaaaagtagaaaacactggttaaagaaatcagaaagaggaagtcagagagtaaccaaccggagatgtgtttgtggattgtcattcttgaaaattgagaagactgaacctcataaaggtggcagttatacccaaagtagaagatagatggtggtaaatagaggtaactttgttaagagggagtttcttttaagataagaggcgatgtttccccctttttttttttttacacaattggagtctggtgcaaaaggaggtagtggtcaagaccatgaatgtggagactagtgcttttgtggtgggcaaggaaaaagactggcggacaggataggcagttgaagtttcagaaaagatggaacctgggcaattgcatttgtttgtttctaagggaggccaggtagggaaggatttcagactggtttgtgtgggtgttattcaaagggcagtggaaacttgaagcgaacagttctttaatctgcagttcgagagggacagggtagaatgctttcagtggagcctcacatttgacattcactttggagaatgaccaggggcctcaccttgcagtccaggttgtatggaaagggtgttgatggggtaggcatgttgtaataggtggtgatgtgattacaaatcattgctcgtcaagattgctgagcagacaggcagcagagttgaggttttcttttggtagggtgctgtacgacagctacaaatagtctttttctccaaatttcttttaaaaacaataattaaatttaaaaaattgagtagttttttagattcaagtagtttttgggttacacagtggtgaattttgagatattagtgcgcctgtcaccctagtagtgtgtgactgtacgtaacctaatgtacagttatttttattcctggccccctcccaagtctctgaagcccattatatcatttgtatgcttttgcatactcatagcgtagctcccacttacaatcgagaacctaagagttttgattttttccactcctgtgttagttcacttagaataatggcttccagctccattcaaattgctgcaaaagatgtttcgttcattgttgggtggggtcagaagatgatgggggagtcacatctttaaaatctgaaggcagtcttttcagttgtggggcaaaggaaaagtgattggttttttgcagatggttgaggctacccctctggtacaaggtttactcagctggaagttcccctcatgaaatgtccagccatacccttagtgaagctctagtttcctggcaggatgggcctctactaagcaagacgaccccagatctgaatcctgagctgtcttggccacatgaaggtttggtgcttaggtaataaagttgtttgaggtgaatatgaggaaagcctgccatggtgttgtcttttgcaggagcacttctcttaataaaagtgtttagaagtttttagcctgtcttagtcctggtcttaaaagtactgcaaactcggtcagtcagctctgtataaaggttagacagaattgttacctgttaatgtactagcatgcttacaggcattttactcagttatggatagttactgagtgtcatctgtgtttcagtcaagttacctgtggatgcttcaaggactgacatgcatcatgaagcttgggttaatggttccagagtgaacctcagaggatggagggaggccacttggaactggtagcacctttaaagggagaggccatgcctttttcagagggtgtttcatgcctgcgtttaaagacaaaggacctttgggcccaaggtgtcaagtttgatgccatgatgatgctattgctgtcatgaagaaatagtttggttagtgagaggatctgtggaagatacaggagaagagtatttttacttgttttgtttttgctgtctgtctcctgaccgtcagcagtacctgttaactactgtgactcctttagccctgttctcagagtatactacacaggatgtatgtgaaaagtggagggcagcaggtaggctttgaagtgtgaataggccttctatgtgttcacagctatagaacttgcttggacctgggttacctgggatatttggagctaatgagccagggtggaaaggggacagaattagctttcgctggaaacattttagaatccccgagtaggttcaggatgtcacatgcaaaaaatgtgcaggacagttggctgacatgaatgcattcagcaggccatgatgcaaagacttgcctcatgaagttggaggggcagattttattctgaatagggaacagtgattataatagcgatattggtaatagggatcttggtaactgtgtgtagagccatttgagagctagagcatggcatttcagagttcttttctcatgttatcaaggacaggatttcttaaatctagcagggagtagagctggagagattgagaatgtccactagtagccctaggttttgtaatactgctttagtaagtggtcactggaattgcactgtgaaagataaggatttcaaaggcaggagaaaggaggaagggtactgaagatgggatagtaacttttaaaggcaaattgcaagtttcccttctcctaaatggggatggaagagtgaagtcaacagacaggctgttttcaagtctggcctcactggtggcagagtataggctctggagtagtgttctctttcttatgatttggtcccaaggccttaggaagtataagaggaaaacatgttttctctgcctgcttagtcctcagcagctctaggaccttatttactcgaggcttgaacaagcctggattcttggccaatgctctggtgcttatggactgtagcttggtagttttccacttaggagtagaaggcaaagagaacaatgagcttcgataatcatattgtaccccatccacatgtattcacccgaagctggcaggttagtaaccctctgtgcccttagtatgccatttattgtctgaggcgattctgcttggctgctcagtgaatctcaaattcaaattagggatcagggagctaggcagtcttcatttctgtgcttaactccctggccaagaaagctgaaaatgatcttgggtttgtatttgtagtggtggtaaatgtgagctggtgttggtaaacaaactgaccacttactgaagagagtgcctgggggggttgtgtcaactgtgaacttttgaggtagagagaagagagtgcactcattagattgactgcctaggagccaggccttaacatggataagtgggcttggatatgcctggctggtgaattccagatttaccttaactaatagagttaatatggcctaagttccacatgtggagtgtcgtcactgtcttggactgctgggttatattaaatggcctcacatctccatagcgccttgaatagtgttggatcagtagtagcagcagaaataatattagctggcgttaactgctttgctaggtcctttatgttccttcatcttataaatgtattacatctaggactgtgcagttattactcccatcttatcctctgaagcttaaggggacagtatttgaacttggggactttttataggagtggagcccaagatctggctacttttctcaccatgtttctttccacacctcctaggcaggtcaaaagcaatgacagagacaagctggcaactctagtcagtcctgagagcccaaagatgagggagagagtgcaacatctgtagaggaaatgcaggagctgatttagaaaaaaaaaaaaaagtattggctcttggagttcatttattgtgcccttcttggaggttttctctcatcttttcttggggggttttctgttacctggcactctacgtttgtccttgtcattttcacatttacccaaaacttgccctgagaagctttttctcccagcaaagctaaaagaaaacccattttgttacttctgagcagtgacactctgtggggagcccgtggtacataggatgggcagtaacaaccacaaatgggttatgttcatttgagattacgaagtataccatttgaagcccctgaaaattgtttctggaacataatggggcttggctaactgttgggatgatacacgtacttggtatgagacattttgaacagcttctgctgttagatgtcatttgaacagcaccagagctcaaggagctaaggcaagtagataatgggatgtgacccttaaaaatcaggtgaggaagagcagcattgtgtatggaaggtatctagctgcctggaaaagctgtttttacctaacctggtcatcaaagcgtcatgtttttagcagtggtagagttaagtttgttgctagggcaccatgtagccacctttccagagttgcaagatgagagttctctcgggaaaaacatccctgaggagaaagtgatagaccagtcggttgagtctgtgttaccactcagatgtacaggcaacaagcttagcctgtgataaaggaccggaagttagttcagctgagtactcctccaggagccaccagagggttctgaaacagattcccccttggggaggtttcccagatgtctcaattactaaatcagtatggcagaccatcagctctgtgactggttaatatagtttttccaagagcactccctctgactaaggaaatgttgaaaattggtgggattaataatgactgggtgactgctttgggctgagtttgtgtttacatgctaaattggttttccttatgtgtatagtacaagttgtgcaaagtgaggaagattactgtggggacaaagggaattccacacctggtgactcatgatgctcgaaccattcgctacccagatcctctcatcaaggtgaacgatactgtgcagattgatttagggactgggaagataaccagctttatcaaatttgacacaggtaaggttttttttgttgttttttttttcccttgtctgttggccacctcccttgccttttctttttctatcttttctttctattttattctcttttatctgtattaccatcttgactggagagaacacatttggctctccctaagagagtatgttgcctcgtggtctcttgggtttgcagtgggttcttgatgctgaatagtggtgtgacgtccctttgggctacatccaacagcctggcctttttcaagaatgtaaaccatagctgtgtaaactcggtgtccatttggtttgtcatgagaggggaactttgttttaaatgtgtaaattttatgtgtattccttgagttgaagggctgaagttgtccagataacctcaaactagtgatgaggaaaagatgtgtctgcagatttgtttctcctccctacaccccaggctctgactcctgacagctttacacccaagtgcttgctagcatctgatgtgctaatgaagtgaaatattttgcccagtgtgtttaacagaaatttctagaaatgcagaaacactgaaaaaataggataggcacaacaaacaatgacaactcctttttctgcctatctttgatgactttgcacttcgttctgttgcttaagtgcatccccacaatccccacttggaccctgatttaagacccagccaaagtcgtcagttgccttgctgtttaaagaccccaagctggctgtcttgaattcagtactccacacgctgaagctgtctgattgttgtctgacctctatgaccttgtgcctgtgctgcctgaactcctggtatttactgttgaactggaaatgttaggcaagaatgtttggctgtgaaagttgagaggccttcccattaggggaaaacattgagagaggggatattaaactggatgtttcatgcttacgatgtctaaacctgttgatttcagtgtgaccacaaaagagataactagacatcatgcatctcccagtagtggcagtgcacagtaccattcaggaagtattcttgtcaaagaatcaatacaaacttggataaagggagaaaagaaagcatgtatatattggaagaagcttaagacatctagcagtcatctgcagagtgacttagctttttgagaggcttgccaaaatacttcaagttcaaatgatttgatactggccatttgtttctaagtgatccaatgcaggactacatggataaagatgaatcaatgctggccatgagttttcaaatgttttgaaactggagagtggataggtaggagcgtattatgcttgtctgtcaacttttgcatacctttgagaataatttttaaaacggacatggacttcctatctccaattaaatggaatatttgccatttgtttattaaatgaatttccctgttaaaattcaacagattattctcccccacctaactctatttgaaatatatagatctttgttttacatgaaatgcttggtttgcttgtttattacttgcttattaagtttaatcctgggagtttacataaaataatttcacagagccaatatttctggtaagaagaaaccaactgaataagggcaaaggtttctttatagttcttggtttgtttggtttaaaatgcctaagtaatttttaattatgtttaaaaaaaaagatacatcatgaattaccatcttaattatttttaacggtatggatcattagtgttaactatatttacattgttgtgtggcagatctccagaatgcctacatcttgtaaaactgaaactctgcccattaaacaactctgccacttcctcctccccatagcccccaacaaccaccgtcccactctttgcttctgtgaatttgactcctttgggtttgtcttaataagtggaaatcatagtgattgtctttgtttgactagtttactttgcagtgtcctcaaggttcatcatccatgttctggcatgtgacagtatttccttcctctttctgaggcagaataatactaaattgtgtgtacaccacattttgtttatctgttcttctggatgggcatttcggttgccaccacctcttgactattgtgagtaatgttgctgcggacacagctgtgcagataactctcccagatcctgttggatgtttttatgtatatactcagaagtgggattgctggatcatatgtgataattttacaatttttgagtaatttttgtgctgcttttcatagcagccccactgttttacattctccccaacagtgcagaagagtttcagtttctccacattcctgcccatactttgcttttgtttgctttttatatttttttcttttttctttcttgacaaccctgataggcatgaggtcatatctctttagtttttgttgttgttcttttaaatttgggtttctgtgataagtagagatattgagcatctttttgtgtgcttgtatgtctttagagaaaggtctcattcgagccctttgcccagtatttagtcaggttgtttcttggtattattgcattataggagttctttagatattatcagatgtaagatttgcggatattttctctcattcgtttggttgccttttcacccttactgattgtttcctttgattggcaggcaattttgaatttgtgtatttttgcttttggtgtcatatccaagaaatcatgtccctaatatcatgaagcttgtggtcctctgtttttggctgtggtgctttatagtttgaggccttacgttgaatccatttagaattgattttttgtatggtgtaaggtaaagtcttccccatgttgttcttttacatggggacctagtttcaccaacaccatttgttgaagcaactgtcctttctccattgagagttctgggcacccttgttgaagatcatttggccatatacccttaggtttatttctgggctctattttcttccttttgttgtttgtcttttatgctaataaaagactgttggattgctgtcattttcattttgtattgtgtgtcaaatcagaatgtgtgagttacctaactttgtgcctgcctgcctgcctacctgcctgccttctcactctgtgtcatccaggctggagtgcagttgttcgatcactacttactgcagcctcaacttccctaggcttagataattctcctgcctcagtgtcctgagtagctaggaccacaggcacatgccctgccacacctggctaatttttgtattgttgtcatggaaatggggttttgccatgttgtttacattggtcttgaactcctgggctcaggtgatcaacctgcttctgtctcccaaagtgctgtgattacaggcgggagttaccacacccagcctaggttttgtcccttttgttaatcttttttttttttcaaatcaactcttagcttttttccggttttttttttttctcttatgtctgctccaatctttatttaatttccttccttctgctaaccttgggtttttctattctttttctagtttcttgtgatctagttaggttttggtttgaggtcttcttttgtaacataagcatttttgagctgccttgtcttatgtgacagtttttgacttacagtctattttgtctgaccaagtttggtcagcccctgccctcttttggttaccatttgcctggaacatcagctttagtcctacacttttagcctatgtgtgtcattaaatctaaaactggtcttttgttagtagcatataattgtaccttggttggttggttggttttattcatttagctagtctttgtcctaagattggggtggggagttaatttatttatagtcaataattactgttaaggaaggcattagtgtagctctgttgctaactattttctgttatgttctgtagatattttgtccctattttttctcccttattacctgccttttgtgttttaaagaatactttgaatcctttctcattttattgtatctgtccttccttggttattttcttcctggttaccaagggaattacataaattatcttaaattgaaaacaatctgttttcagctgttaattccatctccatacctcctcagaccaactttgttattgatgccacatgttaatctttttctattgtgtacccatttacattggtttatggtggttcttatgctttcatgttttaaattttataccagacttaaaagtgatttgtaaaccattatgattttctatttttctgtatatttacctttaccagagatctttatattttcatatggttttgtgtctaatgtctttttcttggacacttgaaggattcccttcagcatttcttgtagggcaagcctagtgccttttgtttatctgggaaggtcttattttcttcaattttgaaggacagctttgctggaaatggtattcttgtgaggactgaactctgattttaatcttgcctaaattcctatctaaggcgtcttgggaatcatgccctacaaatgggcatgacttatcatcagatgggttttattttaaccctacatatcatgacttactttccagcctgacactggcataacatttcgagacaatgaagaaaattaaaatattttacctcaaagcatgtttctttgccatattttgaaatggccctgcaaaactgttccttgtgagggggaaatctgtatttgtaaagagtctctcttcacgtagctagatctttttcttctaaatcttttcaatcttaaagagattaactaaaatttgaatcggaaacatttgtcatctcttgtctctgagggcagccattataagacttcctcaactttgatctccaccatcttttatcttaactaaaacattccctgtctgtcaatcccaggtctttaggcaaactcaacttagggaaaccagttgccaaccagaaaatgctgaaattcaccaatagcctggaccaccccaccccactttgagttgtccgccctttctggaccaaaccaatgtgtttcttaaatgtatttgatgtctcatgcccttctaaagtgtataaaaccgagctgtgtcctgaccactttgggcacgtgttctcaggacctcctaagagctgtgtcatggaccatggtcgctcgtatttggctcagaataaatctcttcaaatattttacagagttagactcttttcattgacacttgaagtatgtcatccctctatcttctggatggcagagttatcagagattatcagaaaagtgcttatctagcaggagcttccttgtacatgattctttcccagattctttctctgtgatgtgacactttgattatattgtctcttgatgtgtgtctctttgggcttattctagttggagttcagcttcttgaatttctatgtccatcttctttctcccaactggggagtttgggcctctttttttttttttttttttttttttgagatggagtcttgttctattgcccaggctggagtgcagtggctccttctgggttcacgccattctcctgcctcagcctccctagtagctgggactacaggtgcccaccactgcactctgctgattttttgtatttttagtagagatggggtttcaccgtgttagccaggatggtctcaatctcctgacctcgtaatccgcccaccttggcctcccaaaagtgctgggattacaggtgtaagccaccgcacccgggccattattatttttctagaaggccttctgcccctcccgctctgtctcccaaattcccttgtcatattctctgtttctgtctcttctccttctaggactcttgtaatttgtgtattgtcttgtaatttgtgtattgttcctcttgatgttgtctcatactcccttccttaggctcacctttctttgttattttttttctttttgctcctctgacttgttaatttcaatggcctgtcttcaagtttgcaaattcttcctgaacctgtgaatttttcaattcagtttaaaggtattcggctccagtttgattatgggtatttgttgtgggtttcctttactttgttgataactctcatgtttatgcgttgtttttctgattttgtttgtctatctgtgttcccttagtttgatgtgcatctttaagatggttagtttgaattctttttcaggtaactcatagatcatcatttgtttaggcttatttttctagagaaaaacggccacctctcccaatctctaccaggtatcttcatacagggacgatgactttcaccagtcagccaggccagaggttctggggatctctcaactagggacttgggtgtgcgctttcctggttgagcttctgtgaagaccctaatctctttcattccctgatgcctgtctgtgtagtacggcctctctggtgctgtaacaactgtcccgtccccccagcacctgcagatctttgttttttttgtttgtttgttgtttttgaggcacagtcttgctgtgtcacctagcctggagtgtagtggcttaatctcaactgcaacctctgcctcctaggttcaatcattctcctgcctcagactccgaagtaggtggtattccaggcacgcaccaccatgcctacctaattttttgtatttttagttagagacagagtttcaccatattgaccaggctggtctttaaccgctggcctcaagtgatcagtccaccacagcctcccaaagtgctaggattacaggcccgagccaccgcaccccacctgcatgtcttgtcttctttctctgagtccctcagcctgggtgtccaaactaccttccttgtcagtattgactcaggtaagacagaaagcagtttgtcaggcaggttttgaccccttgaaaagccagaatgtcgcatgaatggttcacatttctctttccttcctgtgggagatgccaggattttggatttttttttttttttcccaaatgtgttacgcggtgctggggaagtggaacatgttgtgcaggtaaaatgccacaaatgtttctattggtctagtgctgcttttcttggctttgcactggcctggggtcctgcagcctcttatctgattggtggagtgttcaccaatgcagtttggttgtatatgttattgtgaaatctgtgtgtccagtcggagggagagcctggggcctcctcttgtgccattttgcagatgtctgctgtgttatttttttgacattttagtttttatttgtttccttggtggttttgaaataaagccacatctggttctgttaattttaagtggttgtgctcgtgattacagtgtgcatattgaaaccacccaagctcaggattaaccaccttctttatcctcctctggggcagtagcaggatgtgggtgggaatatgctatctgtttctctccttacctttcttgagatttttgacgggtttcatgcatctgggttggcatcattctagaaaattatgttttcacatactgctttgtccctaaccttcctctcaccttggttttcgggacttgcatttaacttgtattagagcttctcacagtagacccagtcacccggtcttctctgtttttcatcctttgtctttccatggtgcatcatgagcatatcttcccagcaaccttctctttttctgattctctcttcaaccaattgtaggctgtttctttaaacccattcctttccattcttaattttgttcactaaattttcattacttgattttcaaatccactaggtcactctacaaaggtgggcttcttgtgatttacattagttttgttctgttttgttttgcttttgtccttgtagactctttcaaggcagttccaagttctgcatttggtttgatgctgtgttgatgatggtggttctttatcatggtatcttagttccttccatgctagacactatatgtaaagtgttgttagtaagaacaatatgaggtcaattttttttttttttgagacagagtcttgctctgtttggagtgcaatgacccagcctcggcacactacaacctctgcctctcgggttcaagcgattctcctgcctcagccttccgcgaggctgaggtgcccaccaccacactgggctaatttttgtatttgtggtagagatggggtttcaccatgttggccaagcttgtcttgaactcctgtcctcaggtgaaccgcccgcctcaactccccagagtgctgggattacaaacatgagcatttgcgcctggctaaatcctgtattttgttagtaggaaaacagggttgtttttgggctcatgtgtttgtgagggtcctgcctttggggtccatctaatggtgggaagggtctcctgttacagccttcactcaagagactgaacctggggctttgatttctattccactgtctttgtgaggccatcagaaagaaagcagagtctcacaacaaaagtcaacattagtttccactcagtctgtttttctgagggttgtctgatagacataaagaatatatctgacacattcaagaattacagttattcttgtgaagggtcttagctttcaacctacatttactagtgtgccctagtgggaacttttgtaaatgtcaggggctttttattggaacttaacacaccttgaaagaatgagtgttctcatcaatttataccctttcttcacttttagaagcagtgacaaacaagtgaagggaaggaactattaacagtttgaatcttaccgtgattaacttagttctattttttccctatgcatactaagtccatagtgttcccacctaaggactctggaaaatgaactaaaaacctttgtggaccttattattgacataagcagcatgaggcatttctgctgctctttcccaagtactgattttcttttacaggagtctctgcaattgggtcttttctatgaggaacaaaacaccaagctttcactggcatttcatctcacctcttttttgggtgtcatcttctgcttatcacgtagaacaaacatgcattttgttactgagcaggcgtttttatccagatcttcctaaactgccctaaagcatagtgtacaaaagttttttgtaactgagggtgtttggtgctgctcgtttactgtcttctcagtggttgccacaaggaccccaaagaactggccaagtacactgacctaagaagcaaaatcttgggctgtttatgtgatttttcttatatttcagataggggtctgtgggtactttcttgtgacttacctgaacattattgggtatccataccatctggaataaatgcgataccagcacttacacaaaattactttcaaatcacttctctgactctcagtacagttgttaatgctgaggtaaaaccattggtccttttaattcctgtggcttctcaccatgccaaacacatatttcccgctggccctggatttctgttaaaaatctgtattttggatcaacaaatgtctgtggtagggacggtcaaactgcagaaatctctttgttcattggaaatctctttgttcattgtcaaatcgaagaatttttactctgaacataattttaattttcttttatcccagaggcttatctttaagaccctcaggttgagttggtttcttctttttcccattagtttttgagagctcaataagtgtttgtgctcttgatttatgtttttccccttgatttataggttataatttcaaatttatcctggagtattttaggctaggttactagtttgtgttttgttttgttggcattaagacagggctgcattctctggctttggtgtgtcttcattttaaaaaaaaggacgtgtccttgttttttttttccttttttttaaatgtgtcttcacataaaaaagtggacttatggctgagtctttattagcagtggtttgaggaaactttttcttaaaacatgcttattctgtgataaaacttccttgacatggtggcctgtgccctatataggatgcttatattaggtggttatgtcccacaaaaataagtccagatatctgaaatgaacactattcttccaggagccctgtgacagccctcagaacattggaagtttccccctctagagattggattagctagcagtccagttaaaggcctttcgttattgtctagtgtctttctgattagcctgaatttctctagttctccctccctctcagtcaatcattcttctttcttcccacccagtactcttccatgccatctttgtcccccccaaaaatgattatttattcaacctttgaagaattattgttggacaaacagtgcagggaaagcttgtcattggaaaaatccttaggggcttgccttaaaacgctgactgcagtctacttcacaaaaagcatgttcatagtgacaagagttcttgacattacaattttgtaatgatgctccattttttggtcccggtgagcctgtctgtggtaaattggttttaaaggacagcaggcctctatctggttttaaaatgactcctctcctgtttattttcctttccctctaggcaatgtatgtatggtgattgctggagctaacctcggtcgtgttggtgtgatcacaaacagggaaagacatcctggttcttgcgatgtggtacatgtgaaggatgccaacggcaacagctttgccacaaggatttccaacatttttgtcattggcaatgtaagacttgcactctctttactactttctaagaagactcaccctaaaaaatgtaaagacctgcatccactgttggtgtttgtctgtttgttcttgtgtttttcctgtgttaaggtgcacagagtgcagcaagctctgtatttagcctctgaccagaaagaatattagatctagagccttgcgcctgcctctcaaggaggtctgtgtgaggtgccagcactgtcacacaacaaattaagttaaactcagccttgcaacttctgcagggctataccactggtatgtgctggattaaggtcactgtctgccatctcctctgagactacattatatgcctcatcattgaacatgtatttgatgatgaagattgatgtaagggactatgagtgagttgctaatttgagaataagagcatttacaagtcacatactgcttgttagtttcgtttactcattcagaatgaccttgctctgagatcttttgagggcttttcagtgaaggagcacctctggagtcacacagtatcctcacatgagagtctgttaccctgtgacttaaggacgggcaagcttttcatcaagcaattcagccttgggagtggtatcttaacacttgtaccctggcagctatttggtacgtgagagatgatatggtacagaggggaagcctgctgttgcctctttggctgtgtcacttggcagctctatagttgggccatttctcttctcagtgctgaattatgacacctcattctgtacctttgaaaacaggtgtatcatatcatctggtgtttctgaaggaactgaaggactgagtagatgcctgtgaaagctctgtaaagcttatgacagggagctgacagttctccacttcaaaataatgagaagctgaggttaatggcctttttttttttctcagcactgagtgccttatggaaaaagatgttcatgaaaagcttcttgactgattgcttcacacaaaatagaagcaggaagacctgtattcagcagctcagcagtggggagtgggaggaacagtgagagacagacaacctctcaggaaacatgtataaggaaatttttattttgttgggaattttgtttggttgtgttctgttagctgccccttaatgtaaaggaaggtacaaggcatgtgtgttttggtggagtgttgtttttttcctgtctttccctccagctttctttcgtctcctcccttttcatcccttttttatgtacttattttatctccttctcaattacagggtaataaaccttggatttccctgcccaggggaaagggcatccgacttactattgctgaagagagagacaagaggctggctgccaaacagagcagtggctaaattacagtagtggcttattttttt

SEQ ID NO: 18 - DNA, 6928 bp, Homo sapiens
gagcaatggccaatcagaactgggatccggccctcagcccgcctcccaggaactccgagccaatggcggcctggcaccggcgggccaatcccgtgcggcgcgcacaggcaggaggttgcagttgggcgctcagcagctgtggcagccggttgaggtctggcagtagcgttgggctgaagcagcggagttcgccatggtaaggcccgggtcactcccgccccgcagatgcccaggcagacgaagttggcctcgggtggacagagggacgttgttgcgggcctgggcgctgagaggaggccagagaaggacgcagggtctagtgcgggacaggaggacacgggatcgtttcctggatctttgggtcccagggcagggacggcggcttttgttttagatgaagctgccggcctttagtgaacgggaccattgacggtgtcccgtcccccagagagcaaatagtggcgtcgcctcctgaagacgggagggcgctgctcccgcttcacacgtctttgtgctactcgaaacaactgaggagccccaggagccttcggtgacgggggttggggctgtggacattgatcagatgaggaattaaggctcagacgctgctgcaacattgccttgttcacctaaaggcaaccgttaggccaggcgcggcggctcacgcctggaatcccagcccttggggaggtggaggcgggcggatcacctgatgtctggagttcaagatcagcccgaccaacatggcgaaacccagtctctacaaaaaaatacaaaaattacccgggcatggtgatgcgagtctgtggttccagctactcgggaggctgaggtgggaggatcagccgagcctggaactttgaggctgcagtgagtcgtgatggcgccagtgcactccagcctgggccacagagaccctgcctcaaagacacaaacaaaaaaagcagcccattaacataacagattcccaagtcccaagtctgaatagctgtggtttgtcagttatcctttttttcctttctttttctttcttttttttttttgagacagcactcaacaaatgctgtgttgcccaggctggagcacagttgcaggatcacggctccctgcagccttgaacccctggcttccagcagccctcccacctcagccttccgagtagctggtactacaggtgtgtgccaccacacctggctaatttgtagatttttcatagggacagggactcactatgttacccaggctggtctcaaactggtcccaagtgatcctctcacctcagccttctaaagtgctgggattataggaatgagccaccacacccagcttggcagggtttaaagaaaccaccaaaggacagtgcagtgtcccagcactaatgacgtctgggagccattacaggcttcaaggggtagagagagggagtggttacaagaaattgggagggtagttttatgaagagggcagcctgccaaaagtgtggccttgagagggattcaggtcacccacagcagttgagcaggaaggggccaaggagggagtaccctggcactgctttctccagccccccagtatcccactgctgcctgccattgaccaaaccagcaagaagccagagggcgaggaaggcctctgatgctgttctcaagggtcagccttcgagagcacagagcaggtggtgaatgatggacggggtagaactggggggtagagagaggacacacactgagcacctgggcttggaccatggtgacctgggacctactctgtatttccttacccaacccgactaccttatcctttgatcaggacataatcaaaaactgctacatattcttcagagaattactgtgacgggctataatgtggggttgattattgacattacatggcttccaagttttaaaataacctaagttttgtgtagtggcaaacaggttctagggctacctctagaacttactagctagtatggtttacagcaattagttttcacagcgataaagggatcagtcactaaccctcctaggaaatatcgattgtgaaagcgccagatactgaagcagtatataaatattaaattagaatattttgcatgccatatagtttcaagttgccttgaaatgaatgggttcacttttatgttcctgttcacagcgcgagtgtatctctatccacgtggggcaggcgggtgtccagatcggcaatgcctgctgggaactgtactgccttgaacatggaattcagcccgatggccaaatgccaagtgataaaaccattggtggcggggacgactccttcaacacgttcttcagtgagactggagctggcaagcacgtgcccagagcagtgtttgtggacctggagcccactgtggtcggtaggtgcctgggcactggatggcagctttcctgagagggtgggagagcattggtaaagccccgtgtgggctcctttgaatcctcctgctgaaaggatgggatagacaggcatatgcccatggcattgttaggagagaaactgaaaggttcgtgatcaaagtgtctgtgagactcggctcctaatttaggaaaacctgacctacagggaaaagctgctttgccagcagtaagatgggctgtgaagagattccctcgtgcgtgcctcagccctgctcaggtggccctgcctgcagggtgcagtggcattggttccctcccgaatgctgtgcattctcttatgctggtgcactagagtcttgacctgcatcttaggcatagaaggtaagtacagaacagtcatttgcttccttcagattcgcagcctgatgtagtttccaaggagagctacaaagaggcagcacctttcagtggccccccaggagatgacagcatcacctgaaagcctgtgggacccaggtcatccagggtgccctgatgggactgccctgcagaagtcacactgacctggtgactgcccaggttgtaagagtttctaacttacagcctttgatgtagctacacgtaggaaagaattatgtacctgcgtaggagtgccagagcttatttcctttcactgggaactggttgtgctgacatttatacaacaagctgagtttaactttgtagagtcataaattgcatatgcagtttggttatcacacagagacattttctaccagacactgccactgttgacctatgacatgtaggtcatgtactttgaacagcatgtgctctgtagaagtgaacactcctggaatgtgtccatcttggtgagtacaggccttaaaaattcacagcacacactgtctcttttgcagatgaagtgcgcacagggacctacaggcagctcttccacccggagcagctgatcaccgggaaggaagatgcagccaataattacgccaggggccattacaccatcggcaaggagattgttgacctagtcctggaccggatccgcaaactggtaagaagagaaggtttcatgtggccattttcttgcatgggaggggtagttcttggaatgtgaaagggaagtcattttatcaacacttagaccagcatcttggccgggcgcggtggctcacacatgtaatcccagcactttgggaggctaaagcgggtggattacctgaggtcaggagtttgagaccagcctggcctacatggtgaaactctatgtctactaaaaatacaaaaattagctgggtgtgggggcacacacctgtactcccagctacttgagaggctgaggcaggagaattgcttgaacccggaaggcggaggttgcaatgagctgagattgcactactgcactctagcctgggaaacagagcaagattccgtctcaaacaaacaagcaaaaacttagaccagcatcttgagtcctactgagtctgcagtggtgatttgtccgtagatctttgcttttctttgcttcaaagtgtactgcatgtttattatggatgatttgaatccatatcaactctttagaggcaaagagaagcggccctggcttgttggaggttggtggtgtggcttccatgggcattggctcacgttgtgtggtttctctcaggcggatctgtgcacaggactgcagggcttcctcatcttccacagctttgggggcggcactggctctgggttcgcatctctgctcatggagcggctctcagtggattacggcaagaagtccaagctagagtttgccatttacccagccccccaggtctccacagccgtggtggagccctacaactccatcctgaccacccacacgaccctggaacattctgactgtgccttcatggtcgacaatgaagccatctatgacatatgtcggcgcaacctggacattgaacgtcccacgtacaccaacctcaatcgcctgattgggcagatcgtgtcctccatcacagcctccctgcgatttgatggggccctgaatgtggacttgacggaattccagaccaacctagtgccgtacccccgcatccacttccccctggccacctatgccccagtcatctcagctgagaaggcctaccacgagcagctgtctgtggccgagatcaccaatgcctgcttcgagccagccaatcaaatggtcaagtgtgaccctcgccacggcaagtacatggcctgctgcatgttgtacaggggggacgtggtccccaaagacgtcaacgcggccatcgccaccatcaagaccaagcgcaccatccagtttgtggattggtgcccgactggatttaaggtatgactgggtgatgtggaggcctttcagcaagcagcagatgcacaaaataacactggccctgaaggcccacatcctttggggagattatccctgttccatgggctaggcatgtgggcataaattagtgaaccagagttgataattgattcagtgatttctttttttttttttgagacagtcttgctctgtcaaccaggctggagtgcagtggtgcgatctcagctaactgcaacctctgcctcccgggttcaaacaattctctggcctcaccctcccaagtagctgggattacaggtacccgctaccacgcccggctaatttttgtatttttagtagagatggggtttcgccatgttggccaggttggtcttgaactcctgacctcaggtgatctgcctgcctcagcctcccaaagtgctgggattacagtcgtgagccactgcacctagctcagtgatgtcttttgaactctctgtctgagtcatcacactatatatctgtggtgagctttatttatttatttatttattttttgagacagggtcttgctttgtcccccaggctgtagtatagtagtgtgatcttggctcactgcaacctctgcctcccaggctccagcgattctctcacctcagcctcccaagcagctgggaccatagacatgcaacaccatgcccgggtaattttttttttttttttttgagacagagtcttgctctgtcgcccgggttggaatgcagtggcgtgatcttgactcactgcaacctccacctcccgggctcaagcagttctctgcctcagcctcccaagtagctgggattacaggcacctgccaccacgcctggctaatttttgtatttttagtagagatgggattttgccatgttggccaggctggtctcgaactcctggcctcaggtgatccacccgccttagcctcccaagtgctggattacaggcacgagccactgcacccagctaatatttgtatttttagtagagatggggtttcgccatgttggccaggctggtctcaaacccctggcctcacgtgatctgcccacctgtctcccaaagtgctggggtcacaggcttgagccaccacacctggcctgatgttgtcatttatagaacaagtttgctgatccctgctctagttgaccctgtgcactgcggccaggacctcaggtcatgttatgcccgagttctgaaacttggaatgcttcccctttggttaccaccttggaatgtcaccccctacttaggcaggcacatggaccacttcgaccacttcctgctgctgtggtagcagcattcatatgacccttgacccatgatctgctacctttgcatatccacagtggcttgttctgtgggtcagaagtgggtatgatgttccttgtgatagcatggggaagagttgtgtactctgaatctatctgggtggaagaagtttagctacagaatttaattgtaatctacaaagaagacaagcagcatacattttcagagggaagactgtcttcacctgggcacctatcacatgtcacaggtactaggacacagccctttaggtagcttgggatcccaccagggtggctacctccaaggttcctttctctattcctcatctggaactatcaccctgcctggtgcagagaagggcttagtgacgtttgtgaggtgaactgagcattctccgtgtcacctacagggtgtcttctgtttgaggaaaagtagctaccatttctaggtttgatataagcttcatggactgctttctttcccttctctggcaggtgggcattaactaccagccccccacagtggtccccgggggagacctggccaaggtgcagcgggccgtgtgcatgctgagcaacaccacggccattgcggaggcctgggcccgcctggaccataagttcgatctcatgtatgccaagcgggcctttgtgcactggtacgtgggcgaaggcatggaagagggagagttctctgaggcccgcgaggacctggcagctctagagaaggattatgaagaggtgggcgtggattccgtggaagctgaggctgaagaaggcgaagaatactgaggggagggtgtggtgggttctcccctgccacccccgggatggctgcttccaagttgtttgcaattaaaggttctgtataaaaccaa

SEQ ID NO: 19 - DNA, 72329 bp, Homo sapiens
ccccgagcgagccgggagtagctgcggcggtgcccgccccctctctccgcccctccagcggagctggtctccggccgggcaccgtcgcgggcccccctggcccggccacctgggaccgtgctggggagtctgccacttccctctctcccctggcccgcaaagttttggcggagccatcgctggggctgagcgcgcccccggggggagatcggggagcgcccgatgccgggcggccggagccattgacccgggacgccgccgtccgctgagcagccgaccaccccgccgcctccggtgcatggggactggctgaggagccagcatgggcaactgcgtggggagacagcgccgggagaggccggcagccccgggacacccccgcaagcgagcaggtaacgatggggaagggagcagggcctcgggcatcccgccagttgtccccctcctcgcccgagtcctgggcttaccgatggactccccactggtgctggcgcttgggtttccccgatgggctgctccgcagccagagggggccgctccccagcgccgggcggccgggggagctgagttggggcaactgcgagcactgagccggctgcgcgaccaactctctccaactgggtagctcctggtgggggtgggggcaggaaatgtttgcagaccgcagcggggccgacggatcgggaggaggccgggggcgagggcgccgctggcctggcagctccggccggggtcggacgccggcccgtcggggcacggcgcgggcagccaggcgtccccagaactcggagcgagcgaggcgagaacagtcgctccttccaaagactgtgtcattatcgagctgcagatcgtgtctgcgggaatccgacttgcaaagcagcgcaggactctgggaaagaaatctttatttttcccgcaggggtttttagagcctctcggccgtctgggagtctataaaagatggggtgcggggtgagagtcacccttgggattgttgggatccttcccagctttgggagtgagatcgctcgctggtgatcctccaggcccgcgcaacgctttctcactttcatggtacaccccgcctgccctggcatttcgccccgggaagaggtctgtcggtcatttttctgggtcttacactcacttccttctttgagggtgttgcaaggacccgctgggaataatatcgtagacttgagagctcaaacttgtctggattccagatggacccatctcctactctgtgtcaaagcccagatcctgagaggttgaacaccttgtccaaagtcacacagctagttaggagctcacctggggctagaactcagcctcctctcccaccccattgccacatatccccttatgtaagaggagccacaggcagagttgttaatgaagtggaaactctagttggagtttcctgtctcccttgacaccgaaggtgtgttgcttgggttgcggaaactgggaaggaagatgggggaaccaggggaagcagggaaggatgtctgcatggtggacaggatgacttgtggaggcagaaatgtgtttttatgggaaggatgcagtaaaacttattgaaattctcttgtctgaaggtaactctggccattcttctggctgaggagagatgactctcaaaaccaagggctggcttgctttcattcattcatttgttcaacaaatatgtgttcaggccccataattgattttgcagcattttttgctgttgacaactctctcctacgagacattcccccccttcctttcttggcatcagactgtcttggttttcctttctgaacacccctttccaccatcaccttctagcttgggggcacgctggtgcttaagtttgacattctgttttttctctcattacactctctcccagagaaatcttgttcagtcccacaactctttgtccattgggaatacccctatgcttaaacttcagctcttctctcttgaaccccagaaccccatctctagatgcccactggacactgtgatatagatattcccagatttaacacctccaaaaccaggctctgcatcgctccctgtccaccagctttccttctttactcttatgttcttccagctgcctaactttaggctgtgaagagctctttctctcatgactttctctgcttccttgtcgcctgcctctcagccagtcattggggtctgctgggtcttccttccgcgggacttgcaaacctgccccttgccaccctactttgtacccttctcacctcaagtcaacccttgtctcaggctgaagtgaggtaccccccaaaggcaacttcatcttcagtcatcattcagtcctacacacagttgtccccacagaagacatttgttaaattaacttcttccagattttatagttctgtgttcagaatgtttctgtacttggccaggcgtggtggctcatgcctgtaatcccagcactttgggaggccaaggcaggtggatcacctgagatcaggagttcgagaccagcctggccaacatggcaaaaccctgtctctactaaaaatacaaaacttagccaggcatggtggtggcaggcgcctgtaatcccagctactcaggaggctgaggcagggagattgcttgaactggaagtttcgcagaggttgtagtgagctgagattgcgccactgcactccagcctgggtgacagagcgagactctgtctcaaaaaaaaacaaaacaacagcaacaacaacaacaaaacacctttctgcattttcccactcctacaagtactttaactttcaaggctgttcaagtgtgggccagtcctttcttttaagtcctgatttctttcccttctctgacattaagaccaccagtgtttgctcgtgccatttccttcttatcgagagtctttcatcctttgggttcatttcaagtgccgtgccttgtttgaagcaccttgcctgacaagtctgccatttccccctccctccgcaccccaccacacacaccccgtggaagtgattgctccttctgagaactcctgcagacacattatctatgccacttacttaacaattatgtactctgtattattaatcatgtctttgatgtttacagtcttttatcagcaactacattgcaagccttgaagacctgggttctgtcttatccttgtagtatatgtctctctcacgcacacacacacattcagcacttaacacaatgagttgtacagaagtagcactcagtatttgttgattttagaaagcaaactcaacttcatcctaccatctgcatttttcatatatctgcatttttttttttacctgctagtttatcattgctttagttctgtgggtcctactatgaatagctttattcataaagtccaaagccgaggggaactctgtaggatgacaaatttggtacaagggaaggaatccttcttaactccacagtgcacctggcattcctgtaacatctgtggcttttcctttgacaaggacatagttttacgttgtaagactaatgcctaaaactcccccagcgccactgtaactcttaccttcctttggcactaatgtaatgggaagaaagcctcaacagggagctaggacctgagttctagtcctgggcctataactcagtgaccctgggcaagtcatctaacctttctgggtcacactttcaatatttcagaaagggggagggttatacaagatcattagagctgttttatcatcttcacaaaggcagctgtttaaagcgagaaagttattgaggtgaaatctttatggcttgtaatgtcaccctttgtccttagttctgccttcttagtcacttggtagacaaagcagagacacaatactgtctggtcagggattcttgcattagggagaagggagaggtcctctcgtctcatcaagttttgtgattgtcactcatatgtgtgtgtgtgcgtatgtgtgtatacatatatacgtatatatacgtatatatgtatatatatacgtatatatatgtgtgtatatatgtatatatatatttttttttttttgagagagagggtcttgttctctcgctcaggctggagtatggtggtgcagttatagctccctgcagcctttaactcctgagctcaagtgatcctctcccctcagtcttcccagtagctagggctagaggtgtgcaccaccacgcccagctaactttttattttttgtagagatggggtcttgctatgttgcccaggctggtctgaaactcctggcctcaagtaatcttcttatcttggcttccgaaagtgctgggattactggcgtgagccgccacacccagccttaaaaattttttttggattgttactcttaatgcatccccagtaggtctgtgttcttctccttcagatgctgggtggttcttgtatgcttcggagaatacttggggatttactcctttggtgggggctcttgccaccccatacatgtacactaggtagataaatatctctgcccatgaactgggtgaagcagcctctcccccagccactccagggagaggtagaggtggtagaacaggcaagtctcttgcccagctccaccctttgagaatgtggcagggctgaaacccaaatatctgactctgtgatgtgccaggcatatccacttacgttctggaatctcaagctcggggtggacagacccagggccctgtttggggctggttgggcttggcactgtggttgcaagagagtctgcttcttgtgtgggctgtgtggctattcttgagggagtaattgggcaacttctccatttgctcagtaagtatgtactgagtgccaagcaccctgctggctgtgaacagacgtggtccttggccacatggagcttacagtcttgtagggggcagacagtaaacacatagtcatgcaaattacacatgatcatacatagaattatgtagtattatatatgctggtgactcctcccacatttataatttcagcccattctctgcaacttcagccttggatattctgctgcctgctcaccacacctgctgtctaaaaggcttcctagtttaacgtgtccaaaacagaatgaacccccatcccatccctgtacctcccaaagtctttcccatcccagttcatgatgatttcatccttccgcttgccaaggcccctaaaattctcgtcgtccctgacttctccctttctctcacacttcacatccatttaatcaataaatcctgttggttttgccttaaatatgtcccgaacctgactctgaccatctccaccactttcaccctggtctgagctaccactggcctgtgaactcaccttcctgcttcctcccttgtctcccgacagactatttccatcccactagccagcgtgatactctaaactgtaagtcagatttcattactcctttgctcaagcctcctgtgacactgcatctcattcaagacttcttgtgttggtctacaagatatgatatgattttcacctgctcacctttcttaagccatctcatgctctccatcaccttgttcaaccccccgatatctgaatgggtccctctctctccttgtcccagtctcctatttaaggaatcaaaccctcccaggccatttcatttaaaattatccccttccctctatcacctgctctcggcattatgtacctccctttcctgttttattttgttccattgcttatgtcatcctctgatattggttgtctccccttgctccatgttgtcagagatttttatttgttcactctgtgataccaagagcagtgcctggtaaatagttgttggataaaactagagttggtgaagtctatagaaaagcataagtgaacacgtctgattgatctcctaccttagatgggtgttaaggcaggtatcttaatgaagggacttaaactgcaacctcagagtggtgttctatctctgggactggcttctctcttgccccaggcttgcgtaagttcttagatacctgggatatatatgactcctgtggtttgggtgcctcttgctgggagataccagggctgaagcaggagggcaaagtgaagctcactattggggtcctaaccaggcagtagcaccttcttgccattttatgtgtgcacctatgtcagagtggacccccctcttccaggcacacgtgatgtttgtagtccttaactcgcagggcagggatagggtggcctaatagactacaagggaggaagttaggtgatgtggattccaggcatctcttacccatcaacttgctggagaatttttagaatcatagaattttagagctgaaaaggaacctaaagatttctataacctcttttttcttacccagccattagaaagagaacaaaggtatgtctgtcccctgcctagttcacagaaacatggtgcaacctacataaaaactgcatgtgctcctttaagttgtgagtgtgtggaggtcaagatattatagggaagtggttgaggtcaagtgtattcaaaggagaggaggtctagtctctgccactttcttgagtggtaatcttgggcaggtcatttgtttcttcctcagttgatcccccgttttaaaaagataatatttccagtttccttcacagagatgttatggagataaaataagctaatggtggtttaaaaattactttcatggctacacagtgtgctcagatatgaggtcccaacacagagtttcatctggcattggtggaaaatgaagcctggggtctctgctccttcctagttgtttgtgtgactttggacaagcctcttgatctctttgagcctcagtttccccatttgtgccatgaggtgactgccaccctgatcacctttcagagaggttgtaagattaaagtgagaccctggatgaaaagagattttgtgatcttagaaagtttctattattccaagctaccaggatttttacacacaaaagccatagccagtgatttttcccactagatcattgaagcttactcttttttaaggagcaaaactataaaagaaatgtttaaaaactatttttggatgggaatctttctgaaacgaatgatatgcttctgagcaaaatattaatatacagctcagaaagaacctctggtttgggactaggggttgttgagttcataccggtgtgtacagagcgcctgcttggtgagagtgggaccacaaaaggttctttctctcaaaagtgttacctcccaaagaagagacctggggtgggggagggacctagtggtgggcagagggaaattgctgggggagagcccactccgggagtgccctgcctcaaggttccaagtagcaacactggcactgcaggaaggctcttaaatcctgttcaaggctctgagtgggaagagccagtcctacccggtcagttactgtgcttatagtagtgtgaggccacggggcttgtgagactctagggcagtgggccccaaactacgtggttcccagctgttgggctttgggggttcatgtttccacctacaatcattgctgtgtcttctgcctggtagacagtagtcacttctcttttttttctttcctttttctttttttttaagtggttacctagatatgacataaaatttacttgtatgtaacagcaaatttttcagtctatagttttgtagcatgagtacattctttgtatttattgttgtacaaccatcccagtacccatctccagaactttttcattttccccaactgaaactcttttacccattaagcactatccatttcttcatccccccaaccactggcaactgatattctgctttctcttttatgagtttgactactctggatacctcatatgagtggaatcatgtagtatttctccttttgtggctggcttgtttcacttagcataatgttgtcaaggttccatggtgtagcatgtgtcagaatgtccttcctttttaaggctgagtaatattccattgtatgtatataccacattttgcttattcattcctccattgatggacccctgggttgcttccaccttttggctattgtaaataatactgctgtgaacatgggtgtgcaaaccaggagcaaaaggtgaatgctctctgagtctctgctttcagttattttgtgtatatacccagaggtggaatttctggatcaaaaggtaattctatttttacttttttgaataaccccccataacactttcctcagcagctgcaccattttatattctcaccaacagggtgcaagagttcctgtttctctacatcttcaccaacagttgttattttctgctttttgttgattaggtttggattggttttataatagccatcctaatgagtgtgaagtggtttatcatgtagtgatcatttatgctgggctcaaagagcagtccctccaaatctctgggaaaacagacatctgagtgtgttagaattgtgcatagaggctgggcatggtggcctacacctataatcccagcactttgggagaccaaggcaggaggattgcttgaggccaggagttcaagaaaaacccgggccacatagtgagacctcgtctctattaaaaaaaaaaaaaaattggcctgggcacggtggctcatgcctgtaatcccagcactttgggaggctgagccgggcagatcacgaggtcaggagtttgagaccagcctgatcaacatggtgaaaccccgtctctactaaaaatacaaaaaaaattagccgggcatggtggcacgtgcctgtaatcccagctactcaggaggctgaggcaggagaatcgcttgaacctgggaggcggaggttgcagtgagccaagattgcaccactgcactcaagcctaacgacagagcaagactccgtctcaaaaaaaaaaaaaaaaaaaaaaaaaagagaggaacctggcaggaaaggggctggaacaccttctgcaaggtgtggggagggagactgaagggacagggatgactcctcgtttgtatgtttttcctctggaagtcttgggacaaggagcaaagggtgaatggtgcctaggcagccagtcactaaccaagtagcctgaatcttagtttccagcctgcgcacttggagttttgttgtttttaaaggctcagagagatgtaattagcagcagctcacctttgcagggtgtttgccatgtactaggagcatcacgtgcagtatttgggttaattctcacaaccaccctatgggtggattctgttatcaccttttcacagatgaagaagctgagccttagaaaggtaatgtctgctgcctaaggtcacacagcttgtaaactgcagagctgggactggaacccaggtgtctgatctcagagcccacgctttgggccagtgtgtagtttgtcctcatgagaatgggaagaagagaacgcttttttgttttgttttgttttttaatgagtttattattgagcaccttcaggcaccactttgctggatcccttcacaaacatcatctcatttgattctccctattttacctatgggaacatgcctacctattttacatatgggaaagctgatggccaggaaaatgaatggattgccagtggttatgatgctaagagacagagctggaactcagcctgaggatgttgattcattccagtgctcacagctcgttccattgtgctgtgagccctgaccagctcccaccccacccccatggaaagaagctggtaggtcagctgtgaagtctgcaaaactccaaggactatagccactgctttcctttcacattgctgtcccttcttcctttaatttccccacccccagaccaccacctccacacctagaagccatgtgagtccatcatcttggatcaaagtgcttggcacatagtaggtgctcaataaatatgcgttgaatgttgtttgagggctcggtgtgctagaggcaatagaatctcagccaagattgtgttcctaaagagaaacacaagtagaatgcaaatattgttgtttcctcctccttctcccagagcaaacctccgctttccaacacccagatgccagggacttgaagaaaagattgtccttgctctgcaaactttgaattattcccaaattcccaaaggaaaagaggcacagagagtcatgttagcaaagtgcttgcagaatcaggtgtcactcttcgtaattaataagattaacaatctctttcttctctcagcattttgcggttttcaaaatgctttctcaagtattagatatcatttgatctccacagccatcctgttagataggcaaggcaggactcatttttcccgttttataggtgaggacactgagacttggtgaggatgttaagatactcaaggttattgactgaataagtggcagaaatcatagagagggcagcggttccactactttctttgcagagcctcagtttctgcatctgtaaaatggggtaagcatacatcatttagagtagtgaagcgtgaaatgtgatcatgtgtgtgtgatgtgatcagcacagtgcccacacacagcacggcgcccacacacagcacagcggatgcttagatggggaacaacgcaaagctcattgttccactgatgacttatattgtactgacccttgttccacccccacttttagggggagcatagtatagcctccctagtcctccctggtcaccttctgttctggtcaccctctggctcatcccttggagtcagagtgcaatcacaagggctggccatgaatttccttttttttccccccaccctgagacggagtcctgctctgttgctcaggctggagtgcaatggcatgatctcggctcactgcaacttccgcctcctggattcaagcgattctcctacctcagcctcccgagtagctgggattataggcgtacaccatcacactcagctaatttttttgtatttttaggagagacggggtttcaccatgttggccatgctggtcttgaactcctgacctcgtgatccacccacctcagcctcccaaagtgttgggattacaggcatgagccaccatgcctgtgcctggcctttttttttttctttttctttattttagacagagctcactctattgcccaggctggagtgcaatggcacaatctcagctcactgcaatctctgcctcctgggttcaagtgactcttgtgcctcagcctcctgagtagctgggattacaggtgtgtgccaccatacccagctcatttttttgtatttttagtagagatggggtttcactgtgttggccaggctgatctcgaactcctggcctcaagtggtccacccacctcagcctcccaaagtgttggaattacaggcatgagccaccttgcccagccatgaatttcctttgatttgtaaaatctgaggtctgtcaaagagaacatctataagatagttttcctttggtgacaggtcattatgacaaatgttttattcatttagtacaaatttgcattttattatcccagctcctccaactcattagctatgtaacctcgggtaagttattttgaattttgaggcctcagttttcttatctgtgaaatggagataacagtatctactccatagggctgtcataagaattagatgaattactgcacatcaggtcttgagaatggtgcctgggacatattacctactcagtaagcattagttattatttttactattctcgccatgcttgatgctatattatagccagctgcccccagccttacagttccccctacgttgagatatacggccagtgaagttcatgtgcaaaacctgacttcttcagtgtgtcctgggttatctactgttcgacccatttattcaggaaggcaaatccgaagcaagttgcaagatagtgtcattatcatagagatagccttgaatccagcttgaatcaactctcattagtagcaaatcacttgcaacacaccctacatacaattcttgctgatctcagcaacaaccagaggctacttttctaggctatctccacatagatggaaacatttcttgccagtaggtcaaggctgtgagtgccctctgtttgtggtggcccatcttcagcttggcagaacacctccgagtccccagggcttccttcctggagctttgtgtatttctctgatacacattgtcagccgcagatacctcctctgtgaacttccaaggcactgctgataaacttccacatcagagcctctttcgcacttgatgagcatccccgcatacctagattcaaaattgctgttcgatttcttgtatactgctactgattgcacactgattgtgcagtaggcactgtagtaggtacttacacacatctcatctaatcctcctgatagtccactgaggtagagattctcctttaggggagaggttcagtgatgttaactgtgtgtcttgagggggtgggggtacacacagtgagaatgaaatatttgggtcatcagtctcaggttccttccatgcaatacccacctgactgtcaacttcaacaaaggactccctgggccctaaacaggtatctctggtttactgatgtcactgccactcatgactagcaaatagtctacttctgccaattcttgcactatatatccgaatgtgccagaaagtgcactttgtgacaaccttcatggatttgtccctccttccacctcttcctacctcccacgcagtgtctgggacacagaccacactgtcctctgttatatgggatactacacatggcattgatttttttttttaacttagtgaaagcgctctgttcccccaaaatagactgtcacatggatgagcatttcatttcctaagccttcacagcagctccaggaattgccatcactgaaatcagtataatttattaatctcctaccatgtgtgtggtaggcacaccacagtgattcttgacatcactgtttacagttttcacatctaccctgtaagggcaggcctaatttatgtccattttacagatgaggaaactgaggctgtggggggagtgttgagacacttgctcatgagagtggaggagctgctgtttgaatcctgggagttgtatcctggaggcttacaccttagccagtatgggaaactgcctctcaatatttactacatcggccttatcccagctactgtgttggggaggggaacacagcatggagagtcagttcatctcctcaaggagttcagagtgacggactgaataatactggagtttctgtggttggtttttattttttccaaatctatttccacatgtccccatccctggcccctggcccaggcagcagatccaagagtccacacagagacacacagagagccaagggtccaggggagctgaggaggcagttcccggggggacagcagcactttgtaatgtgtgtttacaccccaggctgactcctccatttcctctttgcccttctcccctatactctcatatcagatccacagagccaagagctcatttaggtctggctcagtgtgatagtcctgctgttgcctggtccatgtctggctactgaggagacaggaggccttatttggccataacttattgcttgtatgactttttataaggcccaaatgacatttcttagaaacccacatgctgtatgcactgttatttatgatgtcttcctaaggacagaatgggccagtcttcagggtcagtaggcaaaagcaaagctacattgggcccttgaatctgcagctaacccctcctgtttgcagctgagcctagctgtgtcctgctgtgacacatgtcccatggaagattcagggcctagatgtctgatccatcactgagcaccaagcagtttttctgcagccctggacagaagtgttcagcctgctgcttttgacagtaccattccttgggcatttgtctgtgatggggccatagcccagagcaagtgtgcaaggagagacttccgcccaaaggccctgtccttcatgtgtctggcccaccctctggtgctagtttgggtagggatggatggggaccccttttgcaggctgcacctggggcctcaattctagagattaaatgatctctttttcaaaacttgtgaggttggcaggcttgcacagaatccttccttgccttttaggggaagggaattggtattgctggggaattcagctggaagaacttgggactggttcagaggggtcaagccactgtctgtggtctgctctgcacaggggtggtgctggtatccgatccaggaaatctgactccctttcctgtgccttttctaaaattccaccctgcctcattcctgcaaatgtgtgtgcacatattatacatgtatatctcatcatccagatggcttatggtctacttgggagaggaagcaaagacaaataaaggtgtaataccacttcaaacaagacagcatgtagacaagtgctaagtcatacagtgtagacaagttgagacaaaggcaacatgtagacccttttaacaagagttgggatgagagaggtccctgggagctcgagttacggagggaagatttctgaaggtggtgggactcaagttgctccttgggggattgggataggacagatattggaagtaagtgggcatagtttgtagaagggttagtgatttgaggaagtggtacaggttggagagaagcaagcagtacagtcttctttattgtaaaagttatgtgtgctcatgtaaaaaatgtgaacgatatgagaaagctcaaagaagaaaatctttgtactcttacccagacagagtctccattctcatttggtatttatctgcctgtttctttttatttagagatagggtcttattctgttgcccaggttggagtgcagtggagctattatagttcactgcagccttgaactcctgcgttcaagtgatcctcccatcccacctcctgagtacctaagactacaggtgcgggctaccacacccagctaatttctgtattttttatagagatggggtctcgccgtgttgcccaggctggtctcaaactcctggccacaagcacttctcccaccttggcttcccaaagtgctgggattacaggtgcctctttttcttttctttctttctttttttttttttaaaggcattgagatcaaatctgttgtgtccaccaagattatggaaggtatcgaatagtatatggggacgcttaggtcaaagggagcctctgttgcttcttgctcaaggggtgcagatgaatgtagttgtttgagaagagacactcaacatctgtgagcaggcaggatgggagcctgggacgaagcactggctttaccaccccagacttgggactctttcattacccactgcatgagagtctcaggtttaccattctccactgctgccccaggggctcagagaaataatttctcctgaattgtctcaaaagcttgttccccacctgccaccctcatccctccccatcccccaaattcctctcttttccatttactgcccagtttcttaagcatttctcctcccctagagttgttggggacacagccggttttgccacactgcaaacctttgctgctgcatgaggtcatttcaggggagaaactatatatagcggaggactagcatcaggacagctccacgttgttcaggccggttagcatcgcccttccgctgatgcaggcagggtcacctcggattcagcactcatccagtgggagtgtggtcaggagccccgaggaaccggggcaaggtcgtcttatcttcattgccctctctgtgtaagcccatgaatctctggttcctcatctgagtgatgaaggagttggtctgggaggggaattttgcaccgtttttcaaagctacttgaaccctttctggggtaagcttacaatgtagcttgatatgtacaaccaactgggtactgcactggttgaagccggagagaatggccccccaaagggttccacttatgtcctggggtcctagagggcacacagtttgaaaaccactgagcaagctgatcctctgaggtttctttcagagagtctggcctcgtgcataggatctggcataaataacgcataagcagggttgcaagctctgtgacctttggagacattgatgatcatcttgggtagcctgggggtgtggcatagggacagatctcagggcagagtcttttggagttggggcagctaggccatagcacagtttgcagatgcagttggacttgctggcctgcatgttgaagggctgtttctttttctgcctgctcctgcctgcctttctttttagcactgagttgccccaaagaagagatgaaaatgaggatttaatgcatttcaggcaaggaaagagcatttaatttaagttgtgtgtggctgagttacacattttatagagagagtatttgtcgagcacagtggtgcctttggcagatataggaaagccagaacgtggggccagtttttcttcattcagcaagtatttgtagagcgccagctttgtattcctggagaagcagagaagcgcaagggagatcccagctgtgttagagctccttgattgcaagtaacagaaaccaactgaatccagcttaagcaaaaagggtgatttatgatagggcttcatggaggactcaggaccccacggcagggttgctgcctggccttaagcagggattagaaaaaccctgttagattctccctctctctcatctctgcttctctttgagcttccttcacttctctgcagcctggctttcccctcctgagcccacacggtcccaaatgttcctgctgcagctccagccacactcagatgtactgagatctcccagtccaaagtccatattcccatgggagaaagagagtctggttggcacagcctgggtcacatctctaccctcagtctactcagctccagccaagggatggggtcacacgtgatgaaacaggtctggcaggagccactcctgataccatgcagatcggaggcagctccaaacaggggaactttgacagccacaaagccgggtgctcctcgaggctttgatcaggagctctggtcccagggaggaaactgggtttatgtggaacatttaatagccacataaggagacaatgaaagaagtgaccctcggcagagcccacctgttgccaaatacatggcttttccagttggggctgtcagaccagcgggggccaggggctccccaagcctggtgtcagcaggagcccctccaggttcgctcaggggaaaggggctttgttggaaggattttggcaaggcagcctggcctcctgggagctgaggctggaaggcagtcaggagtggaggtggccctgtctttggggagctgtgtggcctctctgcttttgtctgagcatctgctcctggcctccctcttacagaggacccaggcttctcctcttacatgtcggcgtgttccatggttgaacacacagtgccaccgtggatggcttctctgggtcacaggcagccagtgagggggctggacctcgttgactgggaggctgcccctttcagggctttgggcagggcagacattagaaatccatctcctcggccgggcacggtggctcatgcctgtaatcccagcactttgggaggctgaggcgggtggatcactaggtcaggagatcaagaccatcctggctaacgtggtgaaaccccgtctctactaaaaatataaaaaattagccgggcacggtggcaggcgcctgtagttccagctactcgggaggctgaagcaggagaatggcctgaacccgggaggcagaggttgcagccgagatcgtgccactgcactccagcctgggcaacagagtgagactctgtctcaaaaaaaaaaaagaaacccatctcctcgcatctcctacagtcaggggatgctgtggacactggagagcaacgccttgacagctggggggagtggggaccaacctgcaccaaagccagggtgcagggaggggagggcagtaagaggtggggcctgatggcacctcggatgctgactgcggggcagggccatggaggtgtgaggagccacagggagcctgtgaccagggagaggcagggcacctgggagggcattgctggactccaaggatgacaggggtagctgggaaaggagtagggcaggatagaagacagggagaccacctgggagcctggtggcactccaggcagcaagggagggtcaggagtggaagggcaagaggtatggaagacgctttcaagaaggaggtcccgaactttggcgacagtctggctgaagcagagtgagggtccagtggtaggggctctggggaggggcctggcacaactggggcttgaggaaggagagagatgggcagctagaggagtggagcgccactggagagcctggtggtggtggctgagggtggagagatctggggatgtttacagcaggaagggaagtccctgggtagaggaggagctgctggagaatggctcctgggcccaccagctctgcccctcaggagctgtgacagtggccaagtcgcctcagctccctcatcttcaacgtggggacagtctctgcccagtccccttgccgaggtgtggggaagggctgaggttgtgcatgtcacagggctctgtgcactgggaagtctcgtgcggatgcaggcagccttgtgactgcagtcactcgtggcatggcactgcccggtggccctctgcgggatcagggaggcttcttttctggccctgggatgtgactggacatgggctccactacaacccatctcctgggcatctcaggccggtgaccctgctgccaaccgtgttcccggtccctgggggtgagtagagaacagcaggtgcccaggcctcatgtctgagggtctaggaatgaccaactgcataggcctaggatcccttcacccacactggcttctgagatccctggtggtgctgtgtgtgtgtggagaccagcagcagggctgaggcaggagggaggtggctgtgttctccttcctgggcaagtgaagaggccataggggacgtggttgagtgggggacagacacaccccatttacttcctagtgtggaactggaggggccgctccgagaatggtgttggcctccttggcctgcttcccagggagaaaatcttggagcacttgtttcaaagatgccaggagagtggggaatgctgaaacctgcatcctgttttgctgctggcctagggaagaggacccagatggggacagtagatggtggcagagactggaatactgggtgcatcttggggcccacagagctgggggaagcagatgggggttgaggcgaggacctgaggtcaacaggggagaacctgcggcttccttcctgtttgatgccgacctcgctccatccaggactgcctggcagcctggttctttctccctagctgcccctccccgaggacaaggccctctatcctctgcagccgacatcccacttttcctgtatgagtcatgcctaccggcccgaggctgcctccagctcacctgcagcttcctttctccaggaaggcctggcttctatgtgtgtcttccttgccctccagcccgtttggctatttctgttcattttccctccacggagcatctggcagagctgcctgctctctcccaccccaagccagattttgtcttctcctgcctgctcgtttccaatctcagaccccttggagcattattttttctaaagtgcagcagctgtgcatctccctggtctgcccagctgttcttgtcgttgactggagagtttatgtcacttgtgacaataaataggaaatgagaatgagagggttgccagactgcccttccagctgcctgaattcctctcgggaaacaaggagagaaataagcacaataaggctaacacttagaagtacttcccatgttcacttaatgttttccagatgtagtaccaaaccttttccatgtattatctcatttaatctttgtagtaactcaatgaagtaagttgtatgatcatcctctcacagcagggaacacagaggcccagagaggttgtgtaatttgcccaacatcatcaatgagtaagtagcagaaccagaccagaacctgtatcagtctgactcccagggcactctcctaatcactagaggaggagacggccatgggccaggcatctccggagcccacttgaacttcaagttttcgttttctctagttgcctgttgcaaataataacgtgctcaaaggagacctcatagtgtcattctcagagccatcctttgttctcctttctctgtatcccaaacagcaaaaagaacttttggatggtagaggttgtagtatttctctttgcttggagtccccctaccagcatcccattttatagtcttccgtaaagctttaagaacttcacgacattatccttgcaaataaggggctacagaggaagaaataatagcctaatcttgacttttctctgacgatctttccacttaaatcatgttcccttctctcctgagcatgcttgaaatgccccaagatgcctgttctacacattctgtattgacagggaacatttctgctctttgtggtaaaccttttgtgtgctattattgtccgtgagtggtgattgtcaactggggagagagagggagaatgaatcacagtctctggggattggggcaagtgtgaaatttgaaaagcatattcaggatcataatctcattttagctttggaaaaatatattgttttttaaatgtagacaattaaagaaagtggacttggacaaaatcttgcctgatattgcaggaattctcaagtgaggcatagcagttttaggtgggggtgtatatgggaagcctgtatgttgattaaaagggggtatgtgctttaagaggctaagaagctgtctcccaacaagagactgtatgtgtcctgtcattctgtctcccacagccctgcaggtgtttactggaggtctctgaggatggtgcatactatatggggcatcaaaaaagacccaagggcttggggcttggggcaagtgcactaaacaccactggtttactaactgggaccttgtagcttagtggttaagagcacaggttcggctcagaccatggcagagcttaaatccaagctttactgctttgtggtagtattccttaacctctaaatgtctcagttccttcatctgttacatagatggtggtagtacctaccctatcatgtaactgtggtgattatgtgggataatgcctggcacctggctggtagtcagtgatggtggatgctgtttcttacccatcctacctgctttgtctcagttggatcaaaccctcatggggctctgggtggctgacccaatggctttgtcgaaatgaaagtgttatgtggtccttgaggtcctggttcaaggctaatctgaagcatctgtctgcataaagcccagatgagcattgagtttctccatgcccagtgccgtgcttgatcctgggtgtgcagctgagcaaaatagatacggtccttccctcccaggtcccacagaataacagggaaacacatgatactcaggtaatcaaaatgtaagacatactacaaaggtaagaataaggtactgggagagaattatggggtaggagaaatgaattattttggaatggagggtcaggaagccttccctgaaaaagagacacctacgctgacacctggagactgggactgagggagccgtgtttgtctcatgtgtccccacccctggccagggctgcctgctggtccatgtaccacctttgggtgaattagagaaagatgcctcctctgggcaggggcacagctggagagagaaagggaaataagcaagtggccaccccggtttctgccctgttggggtaaggaggtgttttccctttccaggagaaaggagagagaggccgtgtccaggacactgtccggagctgctaaactggccagcaagtgctcagagtctggttttcatgggctgcagttggtgactgtctgctgtgaccttcttcccatagcagatatctcttccacaatgttctataaagagagaggaccactaggagggcaggagggagagaggagggagatctgctggggaagccgggccacagactgaggccctgggcctgccagctcccatctcgcctccccagcacgagtgcctacttcatgctgagttctgagctaaccttgttatttaatctgtagtgttttgttttgtttgccttctcacctgggacccgcctttcattccacaggtaggggtgatgaactcaatgcaaatgatggttggtaaggtgagactctgctgggtgggcagctccctggctggtggagggcacgcttgaggaagtggcatttgagttcacttctaggtgcttggatgcctggcactcatgagtggaagtttccaggagttacttttctgttccccctgagggagatctcctttcccaaaggagagtggtctgacgtgggaacgggctgcctctgagagcccagcctccaggggtggtgagggtcactcccagggattcttgcgtcagctggggcacacgctgcagagccttccacgacctctctgactccagtgggatctggctctgcaaaagttaagcccttctgccatagcctggtagaggctttttctaaatcaagctgggagggccaccctcaggcaggcaggagcagcagcctccagactaaccagatcctggagctctgtgttctgggtccctgatctccctgaagccccagctacggagtttggtccagatttcccccagcagcagctgggcagcagtgtgtgcctggccccctttggagtgggtcacacacccacctggccaggctctggcatggaggctggcactagaatgggcttcagggatagcatgcacctgttttgtgctgctgttgtcaagtagctggccttgggcttcttggaactacagatgtttgcgtcattggactgattgtcctttgactttttctttgccatactgactttctgtggccatatggttagctttggatacagagaggtgtgaggtggtcccacagtgcctgccacaacatcaagtttctatagatgggagcccttccgtaaacctcagaaggtggcaagagcatgtctgacagtgattggaattgagctctgcaagacatagacaagatcacctcttcaactccagagtgttgtggcagggcaccagagctggaaaagcctgaaaggtcatgtccagctgcccacgcaatgtggggtcgttccacttagcacccttgccaggcattcagccagactttctttgggcgaggctagcttttgaacgcactgaatgcgttggcctgtctctctgtagagtgagtgcctgtgccctgtctcattgcccacaccatggccttgtgagagcagctccctccgatcagtgtgaacttggctgagcccaagtgtgcttcctttgtgtctctcactcactggttctgcctgagaagtttgtttcctttaggtaaagttttcctgttatagctcttggggtttgaattgggtgacttgtcttacagagtggtgaagatcggagacagggtgtgtaacttgcccaggtcatctcaaatttgtggccaggcaggaaacacaaccccagagatgcttgatcttgtcattttgctgctcagacacattctgcctcctttctgacctccagcatgttttatgagcaagattctgagagccctctctaaacagcaagtcagagcttttagcttcctttctctttagattgtacctggctggtgggtgaaggtgagggtggggatagacatgtaggagccatttggtgccaggaataagacaaagcagcttggaagaggggtctggagggagccagggtgtgatggctgagtgccacagaggagggccatagctgcagggccagggccaccctggccactcctgcctgcgtctcctttagaggctttcatctccctgactcctttctttttccgctgtctccttttcctcttctgttgaggcatccctgagcgttccttcccctgcctacctggagatctccagaccttaagatttagtgtccttgacacagcgtatttctttataatgccttcctcttcgggctgtgcacccatatcacttcagagccactcctgcctgcacctgggagcattaacatcagagccttaaccagatgctctggatgctgcctgccagccgcccagaacacttaattatcttttgcgggaagtgacatcttaccccaccgggacattttatagacagtgtcttcaccctgaaggtgggaatttcatgaattgtggcaggtcaacaaggtggccatctgggagcaatagagggaaatgggcatttgcggagtgtcttccatgctccaggcacagactattgtgttctcccagcacctggtggtgtggcatcattcatctccattttacagattggagaactaaagcttgctagggtcaccgggccagttactggttggggtcagaatgagaatcctcttctgcttggctccagagcccaactcctcctggtctttgcagcctgtctgcagggcctgtcttctccactgtttccttgctagcactgagcccagcacctggcatcaacatgaagcgatggttgtagaaggtgggctagagctggcaggcagggacttgagcttggtagagccaggatagttgggaagatgatttgggcacctgggggctggggatgggggcggtatttttcctctgtctttgtaccttctttgggtgtaacttggtggacatcagagttcagagttgaggtggtgcagggtgtagcagacccagaattaaggcaggactgttggtctctgtggcctcgtgagactgctgaagacccgacgtcccttgttcctgctgcttctgtggcagctggagccagtgagatgatgccccttccccatttactgttttctgcagttctgcctccgtgacagccagcaggatgagtgtggggagacccgtaagaggggctagaatgaatgtttgtgtgcatttggttttgtgttcctcagcccttctttagcagcaggacttggcttttaaacctgccatgggctccgaggctgccctcccaccctgatcacagtgcccctgctccttatgggttcctcgctctgtcacccaggctggagtgcagtggcgcgattatggttcactgcagcctctacctcccaggctcaggtgatcctcccactttagcctctagagtagctgggaccataggcatgcgccaccatccctggctaatttttgtatgtttttgtagggatgcgggggggtctcactatgttgcccagactagtctcgaactcttggattcaagcagtccacccacctcagcctcctaaagtgctgggattacaagcatgagccaccaagcccggtcccccatagagtttttaccctgactggcacacctccttcttctagccccctcttcctgatactcccaaatcgtaggggttggctgggaacaggattcaccattcctcctggaggcaccaagacaggtttttgaggactacgatgacttatgtctcattgatgctctgctcaccctatgaaggcaggtgcatttctttgtggaaagctgccctgctgcgttgaaggggtctaatgatacagtggcttaaagaatgaggagtttgtttttctgtctcatgtaatggccctgatgtcctcaacgtgaacagaccaagtgagggggcagctcggctccttgtggtcacctgggatcctgtttttttgaagttgctgccacatcatagaacattgttgtttgcatggttgaagttgggttgcagccatgtctgggctccagccagtggagggggaagaaagggtggaggaggcctgcctaccttccctaggccctggtcctccatggcccatgtgcagcatagtcacatggcctccctggctgcaagcaaggctgagaaatgtctgcctgggctgttgtgtggccatgaagaaggggaaagtggctttgggtaggtaactaacagcctcactacagaagatggagagtattttcacttgtgtgtgctgagagaagaatatgcctccctgctagtcatgtgcccacactctttggcaacttgcacatgtgcccccttccttgggaaacatctgtgtgccagactatgctgcaccaacttaggggaccagaagccaaagaaggcaatttctgccttttagcaactcacagtgtagtctggagagggtgtgtgtggaacccagacaatctgtaaatgccaaaacagagaatctcttttgttgtatgctgggcaccgcagatagagagctaaaagaccacctggggcctccatatgctcgcagttgggtggactggaaaatggaatgaagtgctgagagcagtgtggctgaggaattaggagggcttcacagaagaggtgacattctagctgggcgccgacattttctatttcaaaagatggggtatcttcgggagagaaaaccaatagcaaaggcatggagacttggaagctcatggagggctagtggctcaggtgtggtctgagcctagtggaagtgagtgagagaacaggtcccagctgtctatgcggctcacttctccctccactggcctctgcacccatctccatattagaggccttctctggtcccccattctcaattctaatcactgtatttttctgcttaacttggggatgacatataaatacctgacatactctagatggccttgtgcattgtctgtctctcctgctagaatgtaaactgcgggagagcaaggactttgttttgtatgggtaaatactgggtcctcaaatatttgttgaatgaataaatgaatttatgggaatgtggtaatgtggactgaagatcatatttttggaaagacttgatttccatgctaaggtgtttggcttttatttttaggtagtggggagccatagaaagtttttgagcaggggagtgacataatcactattaacaaggttcctggcagcagcaaggaagatggtcagagtggggagagagtgccacttccctggccctaggtcagctccaaagcaacttaccctgcagactgatgtgccatttgtgtagtctggaagcctattcgcagtcattgtgtttggggcgaagcagaggattcgatctctggcagggcttcatccctaagggtctaacaagcactcttgtgcactgctggtggaagtgaaaattgatagtctttctggaaagcaatttggcaaaaggtaacaagaaccttaaaactatccctgctctttgacctagaaattccacaacaaggactttatcatagagaatgaagccgaagtgtgtgcaaagctttatgcactaagactttgattctagcgtgaaaaatggaaagtctaaatgtgtgactcaaggacttctcaaatccatcctctcatctccatcccactaaaactctgcctaccatgatcgacacaataaaatctgagtccaggcccctgttttttcgctcctcttctaatgcagcagcctcttaactgatcttcctgccttcattcaagactccttaaacccactctccacatggattccagagtgaacaatcaaaaatgcctgccttacatatcatttggggtcaggaattcaagaccagcctggccaacatggtgaaaccccatctctactaaaaatacaaaagtcagccgggcatggtggcatgcaccggtagtcccagctacttgggaggctgaagcaggagaattgcttgcttgaacctgggaggcagaggttgcagtgagccaagatcacgccactgcactccagcctgggtgacagagcaagactccgtctcaaaaaaaaaaaaaaaaaaaagaaatgcctctcttaggccgagcgtggtggctcacacctgtaatcccagcactttgggaggctgagacgggtggattacctgagctcaagagttcaagaccagcctgggcaacataggaaaaccctgtctctactaaaatatgaaaattaaccaggcgtggtgacaggcacctgtaataccagctactcaggaggctgaggcatgagaattgcttgaaccaggaggcggaggttggagtgagccaagatcgtgccactgcactccagcctaggcaacaaagcgaaactcttgtctccaaaaaaaaaaaaaaaaaaaaaaagcctgccttggcaggctgcggtggcttatgcctataatcccatatgcgttgggaggccaacgcaggaggatcacttgagtccaggagtttgagaccagcctgggcaaccctatctatacaaaaaatttcaaaaagaaaaagagtgcctatccttccttggctttgccccttcagaggctctcccatcccttagggcataatgtccaagttgtgtcactggcccagaggccctcactgatctgcccttcttttttatttatttatttatttatttatttttatttttattttatttttttattgatcattcttgggtgtttctcgcagagggggatttggcagggtcataggacaataggagggaaggtcagcagataaacaagtgaacaaaggtctctggttttccaggcagagtgtttgtgtccctgggtacttgagattagggagtggtgatgactcttaacgagcatgctgccttcaagcatctgtttaacaaagcacatcttgcaccacccttaatccatttaaccctgagtggacacagcacatgtttcagagagcacagggttgggggtaaggtcatagatcaacaggatcccaaggcagaagaatttttcttagtacagaacaaaatgaaaagtctcccatgtctacttctttctacacagacacagcaaccatccgatttctcaatcttccacctttcccccttttctattccacaaaaccgccattgtcatcatggcccgttctcaatgagctgctgggtacacctcccagacggggtggtggccgggcagaggggctcctcacttcccagtagaggcggccgggcagaggcgcccctcacctcccggacggggcggctggctgggcggggggctgactcccccacctccctcccggacggggaggctggccgggcggggggctgacccccccacctccctcccggacggggcggctggccgggcggggggctgactcccccacctccctcctggacggggcggctggccgggcagaggggctcctcacttcccagtaggggcggccgggcagaggcgcccctcacctcccggacggggcggctggccgggcagggggctgacccccaacctccctcccggacggggcggctcgcctggcggggggctgacccccccacctccctcccggacagggcggctggccgggcggggggctgactcccccacctccctcccggacggggcggctggccgggcagaggggctcctcacttcccagtaggggcggccgggcagaggtgcccctcacctcccggacggggcggctggccgggcagggggctgacccccaacctccctcccggacggggcggctcgcctggcggggggctcacccccccacctccctcccgaacggggcggctggccgggcggggggctgaacccccacctccctcccggacggggcggctggccgggcggggggctgaccccccccacctccctcccggacggggcggctggccgggcggggggctgaccccccccacctccctcccggacggggcggctggccgggcggggggctgactcccccacctccctcccggacggggcggctggccgggcagaggggctcctcacttcccagtaggggcggccgggcagaggcgcccctcacctcccggatggggcggctggccgggtggggggctgaccccccacctccctcctggatggggcggctggcctggcgggggctgacccccacctccctcccggacagggtggctgccgggcggagacgctcctcacttcccagacggggtggcagccgggcggagggtctcctcacttctcagacagggtggccaggcagagacgctcctcacctcccagacagggtcgcggccggccgaggcactcctcacatcccagacggggcagcggggcagaggcgctccccacatctcagacgatgggcggccgggcagagacgctcctcacttcctagatgggatggcggccgggaagaggcgctcctcacttcctaggtgggatggcggccgggcagagacgctcctcactttccagactgggcagccaggcaaaggggctcctcacatcccagatgatgggcggccaggcagagacgctcctcacttcccagacggggtagcggctgggcagaggctgcaatctcggcactttggggggccaaggcaggcggctgggaggtggaggttgtagcgagccgagatcacgccgctgcactccagcctgggcaccattgagcactgagttaacgagactccgtctgcaatcccggcacctcgggaggccgaggctggcggatcactcgcggttaggagctggagaccagcccggccatcacagcgaaaccccgtctccaccaaaaaaaaaacgaaaaccagtcaggcgtgcaggcactcggcaggctgaggcaggagaatcaggcagggaggttgcagtgagccgagatggcagcagcacagtccagcttcggctcggcatgagagggagaccgtggaaagagagggagagggagaccgtggggagagggagaccgtggggagagggagagggactgggactgatctgcccttctttggcttcattctgaccacctcctgcctcgtgtgatctacctggcagcactgcttgcagctccacaaacctgagcccagagtaggctcacactgcctcctctgtctggcgagcccagcccccttgcccttttgcctggctaactccagcttgttctttggtacttggagcaaactttaagaccttccgcagagggggtgagaccacattcacgtgtccccctgattcctgtgcatatcactccccttgcatgtgtgcattagtttctaacaatctcctgacatgtctgtctccctcactagctctgaccttgagagccttagtgactttgtgtccgtgttccccagcacggggcctggtgcatactagaagctcaatacatgtttcttgaatgaatgaatgaatgaatgaatggatggatgaatcgatgaatgaatgaagaatgatgcaagctctttattataagaaatgcatcctgagctgtgcatggtggcttacacctttaatcccagtgactcaggaggctgaggcagggggaatgctggagcccaggagtttgaggctgcagtgagttacagtcgcgccactgcactccagcctgggctacagagtgagaccccatctcaaaaaaatttttacaaaagcatactttatagtgctcagcacatatttgctcaataaatatttattagatgattctgtgtgaagtaaaaacaggatttttttgaagtgttatatttattctatattttctttatgtcctgagtcgatttctaaggatagaacctagggaagagggggcacaggtaaatccggcaagcagcaggggttgagaaccactggtccagcagctggtttcagattaaaataaaaacaggatcgtggacatcataatggtagaagcttgtacatgccatatgatctcagcaatatgaatgctaattgagaggaacaaaagaaaatgtctcaacatattattgctggttatttgggggtgataggatataggttacttatgtttttcctttttatgtttttattatataatttttattttaaaaattttttaaatttttaaattttttacttttttgagacggagtctggctctgttgcccaggctggagtgcagtggcgcgatctcggctcattaaaagctctgcctcctgggttcatgccattctcctgcctcagcctccggagtagctgggactacaggtgcccgccaccacgcccaactaattttttgtacttttagtagagacggggtttcaccttgttagccaggatggtctccatctcctgacctcgtgatccgccctccttggcctcccaaagtgctgggattacaggcatgagccactgcgcccagcctattttttttaaatttaacatatgccatctttttttttttttttgagatggagtcttgccgtcacccagtctggagtgcagtggcacaatctcggcttgctgcaacctccacctcttgggctcaagtgatcctcctgcctcagcctcctgagcagctgggattacaggcgtgcaccaccacgcctggctaatttttgtattttcgtagaggtgaggtttccgcccagctaatttttgtactttatgtagagacgaggtttcaccatgttggccaggcaggtctcaaactcctgacctcaagtgatctgcctgcctcagcctctcaaagtgctggaattccaagcgtgagtcaccaagcccggccgacatatgtcatcttttaaatgtaaaaaataagaaaagtggttggaccagagactcctgactgtgcttgggatcactgggtcatggagccagtccctgagcttcagcctttggttagtcccccaggggcgattctaggtatcgggtccattcctgaccctctggccctttctgagcaccagcatcctggtgctccgagaaactgtctcgtgcccttggaaactgtgataaacagttcctaggcccacaacagtctcccctgtggtttccaggtccccaggtgagggcggagcatgaggaatgtgacaggccatggtgtaatgggattttgctaagaatttaccaccaggaggtagtctccaaatgggtcccagaatagaaaaactggcctgtggtgtgatgaggagtgggaccacagacctgggggccaagaccagcaggaagactcagcaacaaggcattgtgatcctgggggctgggtagttggccatcctggcaggcagttggaggtgggcagggacagccaggtgggacactgagggttagaaaggtgagagagtcaaggagtagatagtggggggctgactgggccgggagagcagccagtggagggagcaccttgggtcaaggcgctctcagtctgccatctcttggccctggagcaaaccaagcagttggagttgtctgcagggagatttgtaagttcacttgtttgctgtttcatgccatcttcctcccaaagcctttcctgagtctcttcctgtatatgttccacagttaaggcgagctctttttctcctcgaaagctctgttgagctgggcgcagtggctcatgcctgtaatcccagcactttgggaggccgaggcaggcggatctcccgaggtcaggagttcaagaccagcctgaccaacatggagaaaccccgtctttactaaaaatacaaaaaaattagccaggcgaggctagtgcggtggctcacgcctgtaatcccagcactttgggaggccgaggcgggcggatcacaaggtcaagagatcgagaccatcctggccaacatggtgaaaccccgtctctattaaaagtataaaaattagctgggcgtggtggcgggcacctgtagtcccagctacttgggaggctgaggcaggagaatcgcttgagtccgggagacggaggtcgcagtgagccaagttcgtgccactgctctccagcctgggcaacaagagcgcaactgcatctcaaaaaaaaaaagaaagaaagaaagaaagaaagccttgttggtctttggtcttgcctcttatcaccttcatcactttctaatgttgtgctcttatttccggtgtgtctcgggcccctaccaagggcagcctggagtctggcgcatcttcgcagtccatgtgggtaggacagtgcctggcccatggtcagggtccaggggaggaggagtgctttgcatccactttcccagctggaaagctctgttcctggccttgtggctgactcctgcatggtgtttccctgggtcaccacggcgacaagatgctcacttgcaagcaaataggatcccctgcccagggctgccagcctcagcagttcttgacctccagctgagctgaaactgagaggatgccttttccaccagctgggagctgagcccatagggctccctccctgaccctttggtgactgtgctgaaagcagatacctcctgctgccccgggtttgctgccttctcctccccacccactgctagagcctgtctggcatctatgaagggaggacgtttgggccaaaacaggtggtggtctcctagcacacagctaccaactgcatcctgtctgcaagggagacttcttcccggggctttgctttctcctgggtttcagcaccatggaaggccgcctatattctacgccatagcgggtgggagaagggtacgaggaggctgctcttgcctggccttgggctggtggagcgtgtctgagggaatgaggcctgatctgtctgccctccctcttcgcagcatccccctttgccccccacctccaccaagtctgactcagcccttgcttgacacagatcttaagctctgggctgggtgtggtagctcaccctgtaatcccagcactttgggggactgaggcgggcagatcacttgaggtcaggagtttgagaccagcctggccaacatggtgaaacccgtctctactaaaaatacgaaaattagctgggtgtggtggtgcagacctgtagtcccagcttctcaggaggttgaggcaggggaatcacttgaacctgggaggtcgaggttacagtgagctgagatcacgccactgcactgaagcctgcgtgacaaagcaagactccatctcaaaaaaaaaaaaaaaaaaatcttaagccctcatcagactcgccttgggaggggcaggtgatgtgggccacagcccatctgccctaggccagcggggccctgaagccttctactgcctggaaaccttgcaggcaggaccagctgcaaccttttctggccagcttctgccgccttcccctaagacaaaggtctgaggacagcttgccaagggttccactggtttctgcctttccacagggctcctctgttgggccctttcccacttcacccccttcccaggaaaccagagctctcaccacctcccatgtggtccactcgctggttcattctgtcagcttttattgagcacctattgtgtgcggatcattggcctgagccctgggactgagatggggagggcccagccctgcccttacagcttgtttgtggtacaattcgcacaaagcggcttaaatgggagctttgtttgatccaaggcagctagaaacagtctttccttcgaggtaccttgtagaagacactccaagtcctggctaagctttctccactttgtcatgacaaggatcttttactgcgtttccccctaagtctcaagattttctaccacaccacattcaagccaaagcttaaggcactaaggaacacacacgcgcgcgcgcacacacacacacacacacacacacacacacaccacccttactcctaaaaaagctaatacatgcacaaatatatatcctagaatgtgaaaggtccactaccccacttctggggtagaaaaggtggtgtgtgttcctccagattttttcccttgcagatgctaacactgtctttacaaacttgggcccatttgggagctgccagtttgcttgggaggcacacagcctccaagggccaccatctgacccctggcagagactccagcccacacctctgcccagagtagaaatgatgtcaagctctcagtcctccttgcccgcctccccaccaagcggcactcagccagcctttctaaagccctctgttgaaagccctcattggccaggagggggcggcctttctccctgccacccccttgaggcccacactcctctttgcctggaagaagagggtttgtgtgggcagtgcagaaatctcacctggactctggaggctgggggcttctgggcttttctgcccattcttcctcactctggccatatctctcacctcctctgtctcatggccccaagaaaccaagtcacagaggcatcaccatccaggttggccaaagcctcctttctggactggcctgctaccagctccgtgtgaacggctagttcccatatgctgataagacatatcaacagctaggtcttagcatttccattaaacaacagctaggtcttagcatttccattaaaaaaaaattacttggcctggtgtggtggctcacgcctgtaatcccagcactttgggaggccaaggcgggcagatcacgagatcaggaaattgagaccatcctggctaacacagtgaaaccccatatctactgaaaatacaaaaaattagctgggcgtggtggcatgtgcctgtagtcccagctactctggaggctgaggcaggagaatcgcttgaacccaggaggcggaggttgcagtgagcagacattgagccactgcactccagcctgggcaacagagcaagactctgtctcaaaaaagaaaaagaaaaagaaaaaaaaattacttgcagctgtagtggctcatacctataattctggcaccatgggaggatcacttgaagccaggagtttgagatcagcctgggcaacaaagtgagaccccatctctacaaatttttttttttaattagctaggtgcagtggtgcactcctgtagtcctagctactcaggaggctgaggtagaaggatcgcttgatgccaagtgttcaaggcttcagtgagccatgaccgcactactgcactctaatctgggtgacacagcaagatcttgtctcaaaaaaataaaataaaaaattaatgtatcacctacatgtagttggagagaaattattattattattattattattattattattattatttcgagacagaattttgctctagtcacccaggctggagtgcagtggtgcgatctcagctcactgtaacctccgcctcccggattcaagcgattctcctgcctcagcctcccaagtagctgggattacaggctcccgccaccaagcacagctaattttgtatttttagtagagatggggtttcaccatgttggtcaggcttgtctcgaactcctgacctcatgtgatccatccgcctccgcctcccaaagtgctgggattacaggtgagagccaccacacccggccaggagagaaattctttagagacctgagtgaggtggtcatacaaggtcttcgtcatgacacagttgggagttgtcctttagtcccccagtggtggcacggctggtcagaacaggagcctgacagccagggtgaaggagactagagaagaagaaaatggggcaatctgtgggtaccccagctagtgtttgattttaaaatgacccctgcccaccatactgcagacttgtgttcagacatttatgtagacctgactttgtcaatgcagaatgaagaccagtgtctcgtaggaggccagtgggcccaggggcagggtgcccatcagaacttgaagggtctgggccaactcatggggcctcagcttatcctgccggcctgcacactctacccagcctgactccaggccgtagatgcttctgtaccttctactgggaatgactcctacctcaccctctttcaaggccaggatcacaatgtcattcctcctctaggaagtctccccaaatttgttccttccaagccttctgaatctcctttatgccacttcctgcttgtccagtggtggagtcattcggtcatacattcattcattcattcagctcacacaggaggaggcacagggtgcaactgtgagggagagaccagggccctcccttggaggggctgaccttcggagaggtacagagaagtgaggaaatgatggcagaattggagtagacgtgcattcggacaacaaggggtgtggtggggactgagggagcccactttagttaggccagcagggcaggcctgtctgaggaggtgctctttaaaccttgagacacactttaaggtaattagaatgtctccctcattttctcagccccttgagtgcccggcaggatcttaaacacagtgggtacgcaggaattgtgtgttgaaatgaatctaggccatgacacttttgtctgggcctgagcaccctggtaatcatcaccctttcctgctgtaggaccccccagccccacctccagctgtcatttgaccatgaagaattgggttaccttgggggtcgggtggtaggggctgctcccaggccaagcccattagcaccaggggtaggatagctagagagcaggggccagcgacctgcacatagcttggaggatacatgtgacctgtgctcttgcacctggattcttgatcagaaatgcctcacctcccctgtcaccctcattattgcagaaggaaactgaggcgcaaagcttgtatgctgcctctccctccagcagcagcagaggccaaagcagggcaggtcactgtatgtggagagggtgagtgaggtaagaggtctgaaaagagggaggagggtgaggcttgctcccacctgggccctcccagccagccggagcctatttccagagtccttgtcacacagggtcagagctggacatgaccttagagatgagctaacccagctccctccatcccctgcagtagaagcagaaaggaggcctggtctttcagggtgtgtgcttgtaacaggctttctctttttttttttttttttttttttgagacagggtctctctctgtcatccaggctggaatgaagtggtatgatctcaccccactgcaacctctacctcccaggttcaagcgattcttgtgcctcagcctcccaagtagctgggactacaggtgtgtgccaccacacctggctaattttcatattttaagtagagatgggctttcaccatgttggccaggctggtcttgaactcctggcctcaagtaatcctcctgccttggcctcccaaaatgcttggattacaggcaccagccaccatgctcagccccaacagactttccacatacctctactctagcgcataccagtttgcctgcttgttttgctttgtttttaaaatttacatatattggccaggcacagtggctcgcacctgtaatctctgtactttgggaggctgaggtgagaggatcccttgaggctaggggtttaagaccaacctgggcaacacagtgagacctcatccctattttatttttaaaaaagtaaaaatagaaataaaatttaaaaatttacatatattatttattatacatttgtatgtttttaaaatgtaccacagagtaacagattacaaagatttcctaaattacacattcaaatatattcaaaatagtgagcatgaacaaaatgtctgagaaaactaagagggatccttgtgtgtatcatttgtgtgattcagcttcagcccagacagtgatatgagctcgtctggtcagggacttgccatgctcgtctggacgtccaccgtgcctggcactggtagatgacagtgaacattttatgaatgattgtgggaatgatctgagcagtttctactttaacagagtctctgtgggcttatgagagtctcttccttctggatctcaaagctttttttgcacagaatctggtaacccttctgtgtgtatatgtgtgtgtgagtgtgttattgcacatatggtttgctttgcagtttggggcagaggctggggatttttggagggctaggatcttgccttagctgtctttgtggtcctcaggagcgctgcacaggtctttccacaaagtggatgtgagttgagtcttagagctggaacgggccctgggaaccatgttacagatgagtggctccagggagaagacctgcgcagatcacatggtgcattagggccatgcctggcagtgcttgtgttgccctgggcctgaggtgtcccagttcaggcagctgagttgggtgctgcccaggaggtgaaggctgtctaacagcacaagcgggtttctcttgagaggcctgggatgggcagttgtcaggtaggagctgaagctcacatgtcctctggagcctggggtttctggaggtgtcaggagggatgggcaggggaacaacaaccccaaccctgaacagctccactttaccggcctcagataggcttctttcaaagcctttcactaacttcgaaaaaaagttttgggctgggagcagtggctcacacctggaatcccagccctttaggaggctaaggcgggaggatcagttgagctcaggagttcaagaccagtgtgggcaacaaagggagagaccctgtctctacaaaaatttaaaaattagctgggtgtggtgatgcacacttgtggtcccagctactcgggaggctaaggtaggaggatctcttgagcccaggaggtggaggctgcagtgagctgtgattgtgcccgtgcactccagcctgggtgacagagagaggccccatttcaaaaaaaaaaaaagaagttttgctgttttttaaaaaagttcaagactggttgttaacacccaaaacaggcctcacctgcctactccctcaagcctttcttgggggaggggacggcctgcatggagggaagtggggctgtgtttagttgggggtcctgctcttgtggcctggtgggaggctggggatatgatgtgtgggaggacaagaggccctgtctctccctgctccctgtgcagacaccagggccaactcctagaggcagctctgtcaccgttagctcccttccttccagatccacctccttaagcattgccaaatcaaatagctgggatgcctgtgcagcccgaggcccttccaaacaaccacccccagagggctgggtgcagccaaagcctctgaccatttccgccccctctcctgaggggctgccacctcccatctggaaccttctctgaggaagggggaggggcatggcaccaccagggttggggtcatcgcctctcctccagaaatctggatcctgttaccctcctatagagggagcaaggaggctctgttcactgaggtcttgttttttcacatttttttgtgggtttttgctttatatttcacaggaacttcaaataactcagctagactgtacacagaataggacttgttaataagtgctggaaatggaattagatggaaagaggttcattcattgattcatcttagaactgcttcctgagcatcggctagactcccacctacgttctgagcgcttgtgacctaccagtcccctgacactcaggagacgcagtatcttgtgggggtcaggatgggagttccagagccagcccaccacccagctgtgtggcctttggattagatgatgtaatacatatgaagtgtttagaagactgcctggcatatgataagcacttaataaatgttagcagttcttgttcatgtcattcttattaccgtagtgcttgtgctactcctgtaaggtatagttattagccccattttctagatacggaaactgaggttctcagaggttgaataacatgcctaagtcatgcacataagtgcagagccagggttctctctcaggtttggaatctgagccttttggcaacctactggtactgcttatctgggtccaggctaggagctgggtatctagacgtcagcatgaaggagaccacctgctgccttgatgagctcacagcctggcatggaggcagacgtgggcattgccgagtcaatttctggagacaccatgtgggttagaccccagccaggctgtgtgggcggcagggtaggactggccaatggtgtcagctgggccttgtgtcctgggctggaggcagcgctgcttctctgcttgtcagctgcgtgtgtgtccactaggggttggtcttgctgccctggggagttggtaggcatgacggggtctggaacaggcagcaggctgggagtgagaggacctgaaaccactcactggattcctgtcattgcctcagtgtcctcatccgtaaaagaagagtagtcatatttgtcacacagggtcgttacaaggattaagtgaaatgaagcatgtaaaaaaatatcttaccaggcacggtggctcatgcctgtaatcctagcaattcgggaggctgaggcaggaggattgcttgagcccaagaatttgagaccagcttgggcaacacaggcagatctcatctctacaaaaaatctaaaaattgtccaggcgtggtggtatgtgcctgtagtcccagctactttgggaggttgagacgggaggattgcttgagcgcaggaggtcaaggctgcagtgggctatgatcacaccactgcactccagcctggatgacagagcaagaccctgtctcaaaaaaaagacaaaaaactccttataatcataaaactggtatttctacaactagtaagtaattgctaccattttcaagctcctactgtgtgctccacacagcactgcagtcctcactgcagtccctctaggtggatattaggatattattgctcccattttatggatgtggaaactgttccagaggttcagctgttccaggtcacacctgtgagggggtggagttgggagttagacctaggtcctctctgatttttttttttttttttttttttgagatgcaatttcactcttgtcatccaggctggagtgcagtagtgcgatctcggctcactgcaacctccgcctccctagtttaagaaattctcctgcctcagcctcccgagtagctggcattacaggcgcctgccaccacacccagttgattttttgtatttttagtagagatggagtttcaccatgtttaccaggctggtctcgaactcctgacctcaggtgatccacctgcctcggcctcccaaaatgctgggattacaggcatgatccaccacgcccggcctcctctctgattcttaaagccacctctctgtgttccaaagcctctgagttgtcttccctcccagctccgcccctcgctaataagttcctgaagcagctgtggctgttccagggcgggggtcaggctgagagtggtgccccagccaggcccaccacccaggccctgcatctggcggtgggcaggatgcgtcctctacagccagagggatggagggatgggctttacctgcccacagccccgagttatggtggcagcagcaggttcccctcccaaccagtctggcaagccagttttgttggcctgtgagtcacaccagcactgatgagtcaggtttttcccttctttgtgcccagagcagctggggagggagtggggggtttcttaggaaacaggacctccctccctctgctctcccactcatccccttgtcttggagctgctcattttctatctggagggccctggctcagccctggaaaaagaggccttcatgttcccactaaagagagtgtcccatgggccacactgggcaggaaagactgggccccaggctgagtttagtcaggaggcggagggtgaaggggccttccctgttgggaaggagagcagggctgcagtcccaggctgtctgactccgaagcctgtgctcttggccggtcggcttgccctctcctgtctataaagtgggattatcctctgggcagggcagctgggtttccctaagcagagggtcccctgagccacctgcttcttgccttttgaccaccctggctataagggctgtccatatggtcagcctcatgcaggcatagcacaggcatagaaccctcgcagaggcctcattaaacccagccaaagcagccagccagctgggcagcctggttctagatcagcacttctcggccttggccatatgttggaatcacctagagagcttttaaacctctctgctgctcccaaactccagagcaagtaagtcagaatcccagggagcaggctccaggaaccatgtttttggtggaccacactggattgcctctcaagagcctgccctcccagaggtgacagtgaagttgcaagcacagcacaacacccagggaacagtcatgctagagtgcaatgcggaccccgagggtcagaagagacacttggggagagcggggagcgcctggtgggaagagggcttcagtcctgcatcctgaccaggcatggcttgggaaggaaaccagggaggatgctggtctgacagctctggtgagtcatgggccgaggaggaggaagaggaagggatgagtcaggcacagctgcctgcatggcccgagcctggcttgggaggagaatgaatgtgcttctctgttgttccacaaacccagtgttgtggtcctgagccatgccacatgaaggagcgggtgagccttgaaaagatggggttcccaggactcggcatgttaggcatttgtgtgtgcgcttcacacttcgtacagaaattccctggagtattttggcatttctgtaaggcagactgatgagtggcatttgcatttggcagatgtgcttggacagatgaagccccgtgccctggatcacacagcaggtcctgatggaaatggacccaggtcttctgaccccaagttcaccccactgaagacacagacctgaaagacagaaagacagtaacctagagcctgttgctggggtgtggactaaatgaactataaggcttgcaagaattaggaaccacaaccagggtgaaaattatgtaattatgaaaattacggggtcttttctacctccagcccgaacagttgtgggcagatttgctgtggtgtttgctgtggagcagggggctggtgctcagatggagtatgcaggagcccggtggggcctggtgctggatgggccacatctggactgttaagttagttgaaacaaggatgggtgagacggtaaagaatctggagaaaggccaggcacaatggctcatgtctgtaatccgagcactttgagaagccgaggcaggcagatcacctgaggtcaggagttcaagaccagcctggccaacatggtgaaaccccgtctctactaaaaaaatttaaaaaaatacaaaaatagctgggtgtagtggccagcacctgtaatcccagctactcaggaggctgaggcaggagaatctcttgaacctgggaggcagaggttgcagtgagccaagttcacgccattgcacttcaacctgggtgacgagagaaactctgtctcaaaaaaaaaaaaaggaatctggagaaactgcaggagggaatggagatcttcagcctggagagcagaaaagtgtcagataactccactgaagaggctgtgacttgttctgtgttattccagagagcagagctgatggatttcagatcaaaataataatgttaataataatgacaaaagcgactgcagttggcccttgaacaacgcagggttaggaatgctgacccccatgctgttgaaaatccatgtcaaactttctactcctcaaaaacttagctactaatagcctagttttgaccagaagccttactaataacatgaacagttgattaacacatattttgtatattatgtgtattacatactgtattcttacaataaagtaagctagagaaaaaaaaatgttattaagcaaatcatggccgggggcagtggctcatgcgtgtaatcccaacactttgggagactgaggcgggaggatcacttgcacctaggagtttgaagccagcctgggcaacatagtgagaccctgtctccaaataataaataaataaaatcataaggaagagaaaatatatttactattcattaagttgaagtggatcatcataaaaatctttgtccttgtcttcatgttgagtaggctgaggaggaggaaagggaggggttggtcttgctgtctcagtggcagaggtggaagaaaactcgaacccatgttgttcaagggtcaaccgtatgatgacagtaataagtacctactctccggccaagcatggtggctcacacctgtaattctagcactttgggaggctgaggtgggtggatcacgaggtcaggagatcaagaccatcctggctaacgtggtgaaaccccatctctactaaaaatacaaaaaaaaaaaaattacctgggcatggtggtaggcgcctgtagtcccagctactcaggaggctgaggcaggagaatggcatgaacccaggaggcagagcttgcagtgagttgagatccgccactgcactccagcctgggcaacgagcgagactccgtctcaaaaaaaaaaaaaagacctactttctattctctggtaagtatggggctcgtgtgtgtgtgtgtgtgtgtgtgggtgtgggtgtgtgtgtgtgggtgtgtgtgtgtgtgtgtcttaagcaagagccttgtggggcttggtgctaggacatcgcctgggctgttaggtgatttgttctgtgtaataatatataacacgtatgtgttaggtgatttattaggataatcttcttgactatatttgtgtgtatctttaatccccctaatctcccttagatgtgtggctgggaacactccctgcctcctagaagagactagaatgcttaaggcatttgcccaaggtcacttagcgctttagttaatgatgaagctgatgttcaagcccaagtctgcctgaggacagaacctgtgccttcagcacctgcgtgtctctgttctaggcctgccaggtagctcagtaaagggtaactataattactattaacttccttttctttttttgagacagagtctcactgttacccagtctggagtgcagtggcgcaatctcagctcactgcaaccttagccccaaaagtagctgggactacaggcatgtgccaccatgcctggctaatttttgtatttttagtagagatggggtttcaccatgtttgccaggctggtctcaaactcctgatctcaagagatccacccaccttagcctcccaaagtgttgggattacaggcgtgagccaccacacccagccaccattaactttctaaccattagcttcatccaacagtggaataggcttctttgtggcatggtgaacacctcagttcaggaggtgcacagaggctgaattgccccccagctggggtgactgtggggtagttggtgagtctccatcactgagctccaagccagccatgctgaattagagtcttgagctggtgcctaggtgtgtgtttctgtcaggccacaggagggccaggcatggtggctcacacctgtagtcccagcactttgggaggctgaagtgggcggatcacttgagctcaggagttcgagaccagcctggccaacatagtgcaacctcatctctactgaaaatcaaaaaaattagccgaatgtcgtggtgcacacctgtagtcccagctactggggaagctgaggtgggaggattatttgagtccaggagatggaggctgcagtgagcctgatcacccactgcgctccagcctgggtgaccgagtgtgaccctgtctcagaaaaaaaaaaaaaaaaagctgacagaagaccagggcacgcagtcaggtgtggatagcactggcccagctgtcctgggagggctcagctcttagattctgttcctctctagtgggcaatgggaggttggtagctcctcccgccttgctcctgccgcgtgttttccttgctgcttttcccattggcatattcttcagagctgtgcattcagctcctgatattttcatattctagttataattcagcttccactggtggtggagtagtttggcagaaagaatttactgtgccccactgccacctcacacacacactctctctctctctctctgtctgtctctgtctccgtctctctctcgggaaacagctgtcgggtctgggacaagtcacatcacctttcagccttggtttccttgtctgtaaaataaagtggctagggcagaagactttaaggtcgctcccagcttcaggactctgccatactcgggggacatgcccccttggagtggtgcatgtctgagcgctcgtggcagttgacacccagtgggacagagtcccagtgtcagaagtcaggctgtgccgttcgcttctaggcacctggctgccgtgccggtgcccgttgggtcctcatctttaccagcagtgagggaggttggactgctatgtccagcagtaaaaagcacagtggctgagaaaacctacctccccttcctggagtcctgaggtagcaaagggagccagccagatacaggagacctttctagcaacctctggggagttcctgttttatttattagccaccatcctccctcttctgccccaggaaaagtgctgaccctacgctgtgcaaccagcacaaggaggcagacatccatcaagcccactctctgtccctgttgagcttgacctcatttaacccctgcgttctgctgcaccgcgaaataaagaccaagacatccctatggcaggagttttcttttcttttctttttttttgaaacagagtcttgctctgttgcccaggctggagtgcagtggcgtgatcttggctcactgcaacctccacctcctgggttcaagcgattctcttgcctcagcctcctgagtaactgggactacaggcatatgccaccacgcctggctaatttttgtgtttttagtggagatggggtttcaccatgttggccaggctggttttgaactcctgacctcagttgatccacctgccttggcctcccaagtgctgggatcacaggcatgagccatcacgcccagcctcgcagttttcatttttcaaaatcacagcaactttatgaaaaaaaaaaaaagtaacctttaattgtgtaatggttaaagcattactgactcggcttggttaccaatgacaatagctactgtcttttcagcactgggcagagtggtctcacttaatccttacagcagtcccatgaggtgggagttacatgctctttttacagatggaaacaccaaagcttaggttggtgaggtcatccacccgtggtcacaaaggtggttagcagccaaagaaaacccccactgtccatctctgaagcccacatgtgagtagccagattgcagagagaggctacagtgtctttttacacatacataattatccatgatccaggttgccagaaagcacatgtaatcagggttccctccagagctgctaacgctggaactgctcgtattcaagccaggactctggctgcacttgagagcaaacacatcagtacgtggcaaagatgagagtgtgttgactgcaggaaagggacataggtgcttaaaacaagggaagtgcggtaattcccacctatgtcttactctgcttgtgaagtatagtattctctccaaagcagcctcagaaaacatgttagttgcatggcaggatagaaccctagagtcaggctgggcgcagtggctcacgcctataatcccagcactttgaaaggccaaggcaggcggatcacttgaggccaggagttcaagaccagcctggcccatctctactaaaaatacaaaaactagccatggtggcacacgcctgtaatcccagctacttgggaggctggggcaggaaaatcacttgaacccaggaggtggaggttgcagtgagctgagattgcgtcactgtactctggtctgggcaacagagcaagactccgtctcaaaaaaagactaaacgaaaaccctagagttagatcctgaagatttgggggctctgtttgtaattgatatcagataggccagttttcctctggaaatgggtcgggggatggctggtcagtgcccagctctgggagaccacccttccccgagcccggccagatgtggccagggcccccaggctggactcacggaccagagagcagaaaaaggcctgctctccctgagcccagccaggcagccgaccccgtgaatgtgtacgttgtatgcagcaccatgaaagcacaccctgtctcacgcatgtgtgcccccttgtccgtatctgtggctgcccgcacactgaggccttgggtaggtctgtttctcttggctgcaattttgtctctctcatggccacagaggatccgggcctgcctcctccagcaggtttcctcactgtacacctacctcagtgactggttttgtccctcctggactcccacctccacccactccctttctttctgcctcttcctattcagtgaggcttgttcacaaaacatagtcctctgttccccctttgcaggggtttcttgcagacagctctgtctactctcccatctgatctgtgcctcccctctccagctcctccttcttttcctaaactgcctgcccatttcactcgcccgtgcagcatgccaggcattaactctgtctgtaggatcaaaaagatgaactggaggatgtcccagcctcaggcagacaaacaagatcattgcagagaatttctgttgccatgggctgggcatcatcctagagccgagaagggggctctcaggggtgccaccctgccttgatccttcagctctgctcaggaccacctgggacccactgtacctctagagatgcccggtaagaagcctggcccatcacttagcaactggctccacccctttccctccctgagctggggcccgagaggaggaaaggcccacaggcctgtaaagaggccaccaaatcccagagcatgggaggccccagctgaccagagctgggccagcactttcccttcaaaagttacctaggctctgagggtcatctctgctaagtctaactataaatatcgcgcttcctgaagggattacctgggcaccacaccccctggctcccccctccccgcctgggctgatccttcttctgggccctgtgttcttcctgaccccttgttcccgctgccaggtgggacacttcagactacctgtgtttcagctgtgactgctggggtgggaggagagaaacaagagattcgagtctgtatcctggccagagggcccttgccggccagctgttgggacaaggaggctcttgttcctgccttctcccgtctggtgtgagagccgtgtctctcacaccagccagagcaagcccagacttgtcacataatcggtgcatctgggaaggacactgttggccccatccctggagtaagggcctggggacagaacttggtaaccgagtgtggaacagcttggggattgccgcaggtataaatagggctgtttcctggcttgggtggcctgactggggaaatctctgctccctttggctggtctcagatttggtgtcacatcccagtggctcacttattccagtccctgaagtcacaagaaccatctcctggggtctgagatcaagaattgaaggaggggccagcccgctgcagacctctcccctgcctccgcctgcctccctgctgctgcaggagctgtaactcctccacccctccccacctgctcacggcgcctcggtcagttcctttctcaattcagcaggtacttgctgagaaccgcgctgggccaggcactgtgtgaggcagtgggatctattcagctagggtctgccatccttccttgtgtttttggaatctcctcttctgtgtagccatcctgagttcagcagtgtgaattgagtggtgggagtaaacacacacacacgcatacacactcacactcatagatgcacaccagctctgggcaacttggagaggaccttaaatgctctgtctcccactctcctttcggtgccctcccttggggtgatatcaccagacaccattcattattgaggccaaaccacagcatccaccatcattatcctcctccagcccagacgtagtgccctcttgctctcttccctcccaaatcagctctcagcagcacctctggagaccatgtgttgaactgtttgttaagatgtggctgggcatgccatttccactcctgttttgctgtgtttacaaataggttcttaagtcagatcaagtacataccccagcccagcccctgtaactggttccatgggtgtgaggtaggccctgagaatctgtcttttgaaccagcaccccaggagatcctaatacgggaggtttcgacaactctttgggaccctagcctttgcctctatacacagacatatacattctctgctcaatcacaaatgttggccaggcatggtggctcacacctgtaatcctagcacttcgggaggccgagacaggaggatcccttgagcccaggagttcgagaccagcctgggcaacatagggagacctctctattaaaaaaaaaaaaaaagtttaaacaaaaaatgtcttttggtgtcctctgcccagcacaattgcggaaacgcatgctttttgtgggtgtgttgctctgctgcctccccgtgcaggttgtatgcctttgtcagcttcattaaggacaggaaccatttctgttactctgtctttgacctgaagcttatctaggacaggagatgtaagtagaagctactaaatgctcctgctgctgaaaccagcagagcctgcctggccctggacaaagcctccaggagctgtcagtaactgatatcctacagggtatgggcttagcaagtcagcaccaccgtcggctccccaaactcttcccacttttccatggctgcaccccagaactccaagtatcctctttccttattaacaacttttatggtattattcttattattaaagtaatacattcttattgtagaaaacttggaaaatataaaccaagaagaaatcatcggtaactgccaatgaaatataaccactgtttacattttgatataaattcttccagccttttttctcttttaaagaccaggtcttactctgtcgcccagtctggagtatagtggcgtaatcatagctcatcactgcagccttgaccttctgggctcaagttatcctcccgcctcagtctcccaaagtgcgggggttataggtgcgagccactgtgctcagccctcctgtctttttaatatatataattatacagctgagcactttgggaggcagaagaaggaggatcacttgaagacaggaggagtttgagaccagcctgggcaacatggcgagaccccatctctaaaaaaaaaaaaaattttttttaaattatccagtcatggtggtacatgcctataatcacagctcctcaggaggcggaggtgggagcatcgcttgagcccaggaggttgaggctgcagtgagctatgatcacatggcctgagtgatagagccagaccccgtctaaaaacaaacaaaaaataataattatacacccttttttttttttttttttttgaaacacagtctcgttctgtgacccaggctggagtgcagtggtgcaatcttggctcactgcaacctccgcctcctcagttcaagcaattctcctgcctcaagctcccaagtagttgggactgcaggcgcgcaccaccaagcctggctaatttttgtatctttgtatttttgtagagatgggtttttaccatgttgtcccagctggtcttgaactcctcacctcaagtgatctgcctgcctcagcctcccaaagttctgggattacaggggtgaaccaccacacctggccaatacatactttttttgaatcaaaagctggagcactgtgcgcttgctgtttgagaccttttttcactgtatggtggacgttttcccgtgttagcatcctacctcaccatcacagagtggctgccgctgatgcctcgagtggatgcccatattttatgtagcctttctcctggccatgtgcattaggttgttcctagctttaacctgttaaaaaggtgctgagttaaacagctttgtagataagtcttcaccacacacttgtgattattttcttcgaataaattattagaaccaaataggtgagccaaagagatggacatttttaagtttctcagtacctcgcagaggcgtgcaccaatttgtgcagcatatgaatgttcacactttccactgcccaacttttttgactccatacagtatctttttgtttttgttttccatttttctgagatggagtttcactcttgttgcccaggctggagtgcaatggcatgatctcagctcactgcaacctccatctcccgggttcaggcagttctcctgcctcagcctcctgagtagctgggattacaggcatgtgccaccatgcccggctaatttttgtatttttagtagagatgaggtttcaccatgttggtcaggctttctcgaactcctgacctcaggtgatccacctgcctcagcctccaaaagtgctgggattacaggcgtgagccaccgcggccagccaatatctttttaagtaaatgaaattaatatgttcatcatcgacttgtctatatgcttagatgaaaaacttccttttctgtgtttgtctgtatcagtggctaagattgtaagcacccgtgtatagggctgcaaatgtttgggcatgtctcctatacacacttacctctgggcctggagaacttggtgagttgtttttgtacagcgtttgacccactgatgaagagagccaacaccagcccagaggtgctgcggctgccctctgctggctctgaggtgcagtgatgactgagaaggcaacggttggactcctgggctcagcttacattaaccctgcctgccccctccccctcaccagcccattgtaagattttcagccacagaggccctacctggagggtgaggagtttgtcaccgctgtatcctgggtcactgcattaattaggcgctgttaatacttgcagaggctcactcacagtaactgtcagtgggagagaagcatagaagtgactgctagcaaagctggctgctgttgtgtagcggggaggggaccctgaaggctactctgggggagcttgagaggtttgcaagccaaggcagcatccttcaggcacgtgtgtggcctcctgaggtgatgactttgaaaggggccaccatggagctgtgtttattttaaaggtcagttctttagtcttctcaagagaaaatgagatgcatggacacagttacagctcaggtgtccttgtagtcacagtccagcaacctcacttgttgggcatagagcccaaaagtgaacattttatttttttgtttgttttcgtttttttttttttttctgagatggagtctcactcttgtcacccaggctggagtacagtgacatgatctcagctcactgctacctccgtctctggggttcaagtgattctcctgcctcacctccataatagctgggattacaggtgcccaccaccactcccagataatttttgtatttttagtagatatggtgtttttccatgttgaccaggctggtctcgaactcctggactcaagcgatccacctgcctcggcctcccaaagttctgggattacctgcgtgagccactgtgcctgaccatttatttatttatttatttatgagacagggtctcactgtgtcacccaggctggggtgcagtggtgcagtcatagttcactgcagccttgacctcctgggctcaagtgaccctcccatctcagcctcccgagtagctgggactacaggtgcatgccaccacacctggctaattttttttattttttgtagagacgagtggtcttgctttgttgcccaggctgatcgtgacctcctggccttaagtgatccttccacctcagcttcccaaagtgctgggattataggtgtcagccaccatgctggccaaacagtgaacatttttaaatgtcacaaagcctggtctctttcttctgtgggaagcctcttttgtagacagtgctgacagcttggtcgtgccctttctcaacccttggtagattaggagtggtccatgagctgggcctgccctctccccatgttaggagcagcagacagacgagaccagtaagaagtgcaatctggcaaagaggaaggaggcagggaaactgtagaatcagctcaagaatttaaaatgccattgaagctaaacagctgtttagggaagaggcagaagtcccatacccaaggatccctgagggagtcactgtataatgattgtgactcctggtggatcaaagctctcattagggggtcatccctgctaaataatgaaagagaaaaggagtccagaaatcatgaaatggagcaacttccttggtcaaggcataaacacctccaggctaaacttcataaaaaatatctagatgaaattgtaaccttcagtttcttcagtgtctcctttctgtccctcatatttaagcctttgattaacctggttttgatttttgtggctcacgtgaggtggggattggagttcatgtttccatcatagtcccagtgtagcaggacgagccacagacaaaacctctcagacaccgagttgtagaaggaagggctttattcagctgggagcatcggcaagctactgccttaaaatccgagctccccaaatgcacaatttctatcccttttaagggctcacaacactaaagatttcacatgaaagggttgtgattgatttgagcaagcaggtggtacgtgacgggctgcatgcaccggtggtcagagagaaacagaacagggcagggagtttcgcagtgttcttctatacaatgtctggaatctatgaatgacatcggtttctaagttatgagttgagttttaactgctgggtttaggccaggcaggccaggcgtggtttcgggcctggcgctgggctgcctgtctttggttttacttccttgttgttttttcttaaaatgggtactgagtataaaaccatataaaacaatatgagagggtctctctcttccctcatttcccccctttgagactctcactttttattagtgggagttctcactcttatttttgctacttatgtctttttgtgcaatagattgatagtgatttatatagtatgcttgtgctgaagcattttggtgaactaaggtagtgacgaagttttttatcatttggagaaatacaggtatcagacaagggagcagtaagcaggttcctattactattattactcttattataagagttttaaattcttctattgctgggaaccaatttccaaacatggctcccagattgagtccatgccacacttgcatgggggcatgtgccagttttgttatatctttaactatatcctcaactacttgcctgtgatcatctatgtgtagacaacaattagtaaggttaaatttttcacaaacaccttcttcagctgctagcaagtactcaagagctagtctattttgatagatagcatttctcatcagagtctcttgccaggcaagaacagtcaagtcttgaccggttttattagtaataatttctaaaacagcttgtaactgtgtgattcggttgagcatgtagatgggggttcaatatccccatgagccatcttgtgccaaagtggctggtccatagtattatatgattttttcagggggccatttatcatctttccaatcacctatggctatgcttcgtttttcgcgggaagcatagactgggaagcccagaagtttacctgtttttatgggcagtaagaagaaagatgacttaatggtgccaattacacagctacctgtccactgatcaggcagcttagcataagctctgtgtccacatatccagtataacctggcgggggccgtccagtcccagtggaattctgggtgggcccaaacagtctgcaactttggaaatttactgaatggatttctttctgtgtaattggaactccaccatgtaactgtttttgtggtaccattttacagcttttgcccaagacaactaagccgccctacaggatgagtgaatccttttccttctctagctatgcaatactgtccaataattgagacttttagaacccaaaaattgtcagggtggttctttggggctaagaattcatcaggaactgggtctgtaggaactaagtgtcggacttcccatggccattgatctcctgttacggttccaacacaaatataacatgaggtgacttgtagagactgggctacatgtttggctaattgcaaaaataaatttttagtttttcctggaatctcaagtactggcacatttagttcatcatagaaagtctgaaatactgtttctggagagcgtttttgaacctctctttttattaggatgcttacactaggatctagtccttttccatcaatgcctaatgttgcatgttttttttttaattccactttgggtctgaggggtttgtgattatcaattctaaaaggttgcagctcccactcgtgcaggaggggctgacttttcctttttggagctaaacaggatcttttttatcttcttttcaagtagcccaaatgacacaagaccagtactgacacatctcacataaatatgattcttgacagatatacttatttttttttactgtgtaacttttttttccaatttagagaaccgcatcctattctatgctgcttactatcaatagtggcacaagcatcaaattttaaggttacatttttgggacccctctttcttctgttctagctgttaccttacttgtgtcacctagaaaaggaccagtccttaattttattttaaaaactgtgatcatgggaggcttaaaatgggtcataacacacatcaggttggttatttcctgggctacataccttggatagaatagcattatacaaacaagtttcttttagagtcctggtacacttataataatcataaaataataggactgtggcaatcttttgtcttacctcagtgacttgatatatatactggaaacagttctcagtctgagaaaggtcagttgaagtccttactgtacaagtctaaattttaaggaaaatgagtcctgtgatgagtttcctcatgcttcggccgtgcgtggaccagtcagcttctgggtgtgactggagcagggcttgtcgtcttcttcagagtcactttgcaggggttggcgaagctgctcccatccacgtacagctcccagtctactgatgtttaagggtggtcttggtggttgggcctactagaataaactgaatccaatacttctacacagttatgtttaactgggctctctgataccaggagtaaggtggcggggttagggtgttgcaaacttcaatggttatgcggggatcttcacagagcaagctttggtatctagttagtctagcattcgttagctaatgatgtcctttggtatttattaaagtcaccacagcctgggcatactttaggttttgcttaagagttagcttatctgcttcttgtgctaacagggccgttgctaccagggcctttggacgtgggggcagcctttggaaaccccatctagttgttttgagagatagaccactgcccttggccaggaccctacagtctgggttaaaactccaactgccattttttctctttctgacacatagagtgtaaagagttttgtcaagtcaggtagcctcagggctggggccgacatgaatttttttttttttttaactcatgaaaagctcttgctgttgggtgtaatagatgtagtttatctaatttacatttttattgactgtcatttaccaaaatactgacttaaatcttttaactatttgattttaagctttaaattgatctggtattccttgcggggcttcgattgcatctaaatagatgtgagagttgaaagacctataaggggcttctctcgttttacgatgtcttattattttttttcttcctctggttgatgaaatgccagggtgaaagggatagccaaatggactaaagcacaagtgccactctagttattcagcagagtgcccagtaaaggtccaccacaataccaccacgcatccgctcggggatgaacaagggctgactgattgataagctcttgaaaattcttaagcttgctgcatcccttcaggtctccacggaatgctaagtctcctccctgccatgagagacacgaagtgaacttagtgttgggagacggaagctggatggccctcgggggctgacccacagggacttcgggatatagcagagagagcttggcatgacttattactccaggctgtagaattctggaaaagagctaccatgcagcccacgcctggtcgactggaggaccaccttagtggaagggggacaatcagggcctctggcctgccatgtgcacaagcataacaattgcatttgtttaaagtgcagatggaatatttgatccatttcaaccaggcatttgcatcttggtgtgctgtcttaattgccaaagtttgttttaagtctaacttttatgatcctctagtaaaatgaatgtttcctttagcaccaatttttactagtttttagaccaaagaaaactcaacaccattttatatttaataatatttcttgtatgatttttataccagagaagctaaattttacctttatattagtgtgttattaatattaaacttaattttaataaaaccttgtagacatatttatccaatttttcatgtttgaccataaggtaagattttatagactctttttaaccttttataatttttgtaaaagagcaggttgatgcttaaagaaaaacctgttgcatttttactttaatgtccagttcaccgaaaaactggatgatacctttttaactttagctaatatgtttacacacagaattttctttataattaacgttttaaaacttgcttaaacttttaaaacattaatttttttaatcttttaatgtagataaaaatccacatttttatgcccctttataatctttttaccaaaagtatattttacttttctcatacaccttgcacataaactgttttttttaatagtcttcaggaggccttattacttttaaattatacaacattttttgcataaattttttataacattttttctttcatgactttcaccagcaattctttaacatgtttcaactttttgacttgttacaaacattttttttttctttaaacaaccacttaatttatttcaggacaagaatttaccatataacactctttacataaattctgcctcaccctttttttgaagataaccattcctttttttaaagcaaactttctttatgtctttggactagactgtctaaggccacaagattagaagttaccataatacatgttacactgttaacttttagcaaacttcagttttgttgaaaaccttgtaagtttgggatttcaatcatcctttgctattaataagaccttgtttagtctaaattaacttagaattggtatagatggcctttttttctctctgctggtctttacttgcctctgccagctgcttatgctgctgttattttaactactgtggaggggaagggggtctaaaaccagctgtaactatgtatggaaactggtctgggtgccttggcttacaggttaccttgtgtcatacctttgaaacaagggacctgtccaggcttccttctgatcgccaacccacctctaatgctggccagtctatttcacacaaagttctaagttttcctggtgtcacagtagcactgtaatctcccttaaattcttccttgaaattttttttttaacatagttcctagtagggtgggcttatttgtgcctggcccatgcttctttgagacaaaacaccacgcttacaccacacacaccccacaaaacaaaaaacaggtaaaaagggcacacacacacttttgcagtttacaccaaaccaaaatcagagtatccagaaatccaagccaggtcaaaaccaaaaccaaagtatcacacaatctaagtcaagtcaaaaccagaacaaaagtaccaatgcaggcacgtcgtgggtgatcaggccacacttccactcagatggagtggggcaagttccaaagactagtcttaccaagtttcagatgtccggactccaagtaccggttccttcctggtgttcagccactgtgttaatcctccgtgggggcctgctacgtgctgctctggtgaggcgttccaccgggtcaatttcctacccgggagcgctctttggattgcatcactcaggctggccggagttccccacagggatgctccacagggcaggtctaagccgtctgaggggctgcctcagccgtccgtgagttacctcgtttcctggtcagggaaccaagaaatgtagcaggatgagccacagacaaaacctctcagacaccgagttgtagaaggaagggctttattcagctgggagcatctgcaagctactgccttaaaatccgagctccctgaatgcacaatttctgtcccttttaagggctcacaacactaaagatttcacatgaaagggtcgtgattgatttgagcaagcaggcggtatgtgacaggggatgcatgcaccggtggtcagagagaaagagaacagggcagagagtttcacgatgttcttctatacaatgtctggaatctatgaataacatcagtttctaagttatgagttgatttttaactactggttttaggccaggcaggcccaggtctggttttgggcctggcgccgggctgcctgtctttggttttacttccttgttgttttttcttaaaatgggtactgagtataaaaccatataaaacaatatgagagggtctctctcttccctcacgagcatcatttgtcacacatagtcatcttcccctcccacctgcaagaggaatgttccttctcaccacgagcaagttcctgtacacacctggatctctttctggactctctgttctcatttgtcttgtataccaaaaataaaattctaagtcctccaaccagttgaacggacccctcttctcagccaaggggattccaaagaaatctgaaaaacgagttcaggccatgatgggagggggagtcaggcctcattatactctcctcccttcggactgtgtcttcaggcacagctgaccagcattaacattaaaacggtccaggcgtggtggctcacgtctgtaatcctagcactttgggaggctgaggcgggtggatcacctgaggtcatgagttcgagaccaacctggcaacatggtgaaaccccgtttctactacagatacaaaaattagcgaggtgtggtgttacacatctgtaatcccagctactcggtgtcacgcgcatccatgtgaagagaccaccaaacaggctttgtgtgagcaataaagctttttaatcacctgggtgcaggcggcctgggtctgaaaagagagtcagcaaagggtggtggcattatcgttagttcttgtaggtttgggataggtggtggagttaggagcaattttttgtgggcagggggtggatcttacaaagtacattctcaagggaggggagaatattacaaagtaccttcttaagggcaggggaggatattacaaaataccttctcaagggtggggagggtgtatcgtacaaagtaattcacaagggcgggggaatatcacaaagtacattattgcaagggcggggaggctgtattgtcacaaagtcaattgatcagttaggggcaggaacaaatcacaatggtggaatgtcatcagttaaggcaggaactgggctattttcacttcttttgtagatcttcagttccttcaggccatctggatgtatatatgtaggtcacaggacatatgatggcttagcttgggctcagaggcctgacattcctgtcttcttatattaataagaaaaacaaaacaaaatggtggtgaaatgttggggcagcgaaaattttggggggtggtatggagagataatgggcgatgtttctcatggctgcttcgggcgggattaggggcggcgtgggaacctatagtgggagagattaaactgaagaaagatttgggggtaaagggtaatattgtggggttgttagaaggagcatttgtcgtatagaatgattagtgatggcctggatgtggttttgtatgaattgagaaactaaacggaagacacaaggtccaaataaaagaaggagaaaaacaggtattaaaggactaagtattgggagaacccaggacatccaattagagagtgtccaagggggttcagcgtaattatttgcttggttggcgagtttttgggctctatccttgagttttttatgttgtcatataccaagccagattgatttgggtaaaaacactcttcatttaaaaatatacagagttctcctttttcagcaatgagtaaatcgaggcctcgtcagttttggaggaaagagaaatgcaaagccagtaattgtttgttaaagaaggattagaaatggctaggagagagtgagtagattgatagtgtggtggagataggtagggagaggtagagagtgactggagaatgggggcaagtataagagtgagtagaaaagtgaaaaaagggacttcatcagagtgaaagtattggagggtaccccgtcagcaaagatcatctatccactccaagagggagtcaagagtggcggattaggggtagtactaggagatatctgctatgatagtttggaggaaaagtgtaaactggcagggcatttatgagtagttaaaaatggtgaatggggtatgactagacagaagataggagggatgacaagttttcggggtgcagtccgagtgggtggggggtgactgaataaagcctgttgtaaagatagggtaaggaagaatagacctaataaaaatgaaaggatgtattaggcttataaggattactgttatcctttaggaatgcaggtgagtttaagggaagtagggtgagtacttgtgacttccaggaggaagaggagagatcaggctggctgtccgacggacacagctttattctggaacggtgaacccaatggggagggtcctgcaggcggatggcagttggggtactatagatgactaagtagggtccggtccatcgaggttgtagagtttgaggggtcagattcttaacaagaactgatcgtccagctagggtgtcttcatatggctgggaatctgaagtaggcaagagaagattagcagcctggcgagtttcctgtctagcctgctggaggactggaagatagtcgcctagagggctggtgtctgggacaaggttggggccgagcaagaaagtgcgtccatataaaagttcaaatggactgtaccttcaaatggactgtgacatatttcgaaatggccctgcaaaactgtctcttatgggggaagtttacattttctttacagaatcccgttccctttccaggtctttttctgatcctgaagagattagctaaaaatctagcacctgttaaaggtctgaataggaaacatttgccatctattgcctctaagggcagccacctgtgaaatttcatctacataataagaaccttggtctccacaactccttattattattttttttttgaaatggagtttcactctttgttacccaggctggagtgcagtggcacgatctcagctcactgcaacctcagcctcccaagttcaagtgattctcctgcctcagcctcctgagtagctgggattacaggtgcctgctgccacgcccagctaatttttgtatttttagtagagatgggatttcacagtgttggcccagctggtctcgaactcctgacctcaggtgatctgcccaccttggcctcccaaagtgttgggattacaggcatgagccaccacccccagcccacaactccttatcttaacccagacattcctttctgttgattcgaggacttaagataataactctttcaaccaattgccaaccagaacatctttaaatccacctatgacctttaagtccccgccccttcaagttgtcgctcctttccacacaaaccaatgtatatctcacatgtaatgattgatgtcttaaatctccctaaaacatataaaaccaagctgtaatccaactaccttgggcacatgttctcagaacctcttgagactgcatcacaagtcatggccctcacatttggctcagaataaatctcttcaaatattttacggggtttggctttttttgtccaacagtctgtccctgttccagtactgtgccaactgtagctttataattaatgctgatcatggcagcacaacttctcccacctgattcttttctaggaacatctttgttcttctatataaaatttagaatcagtttgccaggttccttgggaaaaaactgacaggaattatattggaattgtattacatttatagatcagtttagggggagtggacatctccatgatttctttgaatgttgcttccttcccattttccctattgtatacttctggaaattcagttcaaaattttagacctagcagggcatagtgtcacctatatagtcccagctgcttgggaggctgctgggggagaataccttgagcccaggagtttgaggctgcagtgagctatgatcacaccaccgcactccagactgggcgacagagtgaccttgtctctcaaacagaaaaaagacatccgaatctcaattatattgtatttttctttatttttattttctttttatttttttgagacagggtctcactttgtcacccaggctggatttggagtgcagtggcatgatcatggctcactgcagcctcaacctttctgggctcaggtgatcctcccacctcagcctcctaaataactgggactacagctgcatgccaccatgcccgactaattttttgtattttttgtagagacaggtttttgccatattgcccaggctgatctcgaattcctgggctcaagtgatccatctgccttgacctcccaaagtgctgggactacaggtgtgagccactaggcctggcctgtatttttaatttttagaagttctatatggttcttttaagatcttcttggttatacctactatgtacccacaaaaattaaacatttttaaaaaatctccttggtcattctttataatctcttattcatatttttaaggccctcatcccttaactcagtatttcataatctatccaaagtctttgcaaatctgattcttttgtctgctgtttttgccagtaaagctcgtactgccttgtttccttgcatattgagatttttttttttttttttaaaactattaccttatttatttttcttggaactttatcttgggaattctttgaggcctggtttgaagttgttttcctccaaagagggtttgcctttccttctgccacctcaccaccccaggaacactttaaattaaatatttggctttagagttttctgcccctacaggtaactgtgaattcagatggtgaactacaggatttagtcagacctgaggtggaaccctcactcacttactatgtgacctggggcaagtcatttaatctctctaaatctgtcatatcacctgtgaaatagcaataataatacctactgcctaaggctactgcaagaatgaaatgggatcatgtatataaataaaggcttgcctggggttctttctcagcggagatcgctgcctgcaattctcttccttgcttccttttgccccagccagtgggagcagcctggtggtggcccccagcctcagttcttccactcactgtaggacctgagttatagtggaagcagagtgcttcacatctcactcctgtggctcactctgcctttagttttgagatgactgagcctccaaaagcctttgagagatacctctgccctcagtcttggctgtggtttggagttgtcttggaggtcacttggagctgggtaacaagaaaaatgacatttgacagaattgttttctttgtcagatgctgcaggaatttttgggggagtttgttggtcatgattgcttaaaaaatcctttttttaagtgggacattagtaacaagatgttaaaattgttaataattttttttttgagacatggtttcgctgtgttgcccaggatggagtgcagtggcatgaccacagctcactgcagcctcaacctcccaggctcaagtgattctcccatctcagcctcccaagtagctggaactagaggagcgtgccatcatgcctggctaatttttaaaatttttttgtagaaacagggttttaccatgttgccctgggtggtctagaactgccgggctcaagcaatcctactgcctcccaaagtgctgggattacaggcgtgagccaccgcgccctgccccacatcatgtgggaagggtgcggtggctcacgcctgtaatcccagtacttcgggaggctgaggcgggtggatcacgaggtcaggagtttgagaccagcctgactaacatggtgaaaccccatctctactaaaaatacaaaaattaatcaggcgtggtggtgggcgcctgtaatcccagctactcgggaggctgaggcaggagagtcgcttgaacccgggaggcggaggttgcagtgagccgaggtcatgccattgcactccagcctgggcaacaagagtgaaactccatctcaaaaacaaaaaacaaaaaacaaaaacaatggtagcgtatgctttgctgacacaattattttatgtccctaggttggttatgtgaagttttctgactcttccctgctatttaggaagggcttcaaagacctgaatacttagtagccagtgcagcagggtttcagggtctggcctggggaggggaggggagggggagggcaggttgcagctcaagtggctttagagatgctgagcctctccttctgtcctgcccaggacgcaatgagcccctgaagaaagagcggcttaagtggaagagcgactaccccatgactgacgggcagctgcggagcaaacgggatgagttctgggacacagcgcctgccttcgagggccgcaaggagatctgggatgccctcaaggctgccgcctatgctgctgaagccaacgaccacgagctggcccaggccatcctggatggagccagcatcaccctgcctcatggtaagtgggcagggccagggctttatccccgctggagctagggggtcaccagcacagtttgagggtgttgaggagtgtggagcggtggggcaggtggttactcacgtattcattcattcaagcaccccttactgagcatggaccaggagtgggtacacaaagaaaaagagacacagtctatgcttgcctaatgacatgacagaaagacaacaaacctgcaaagcagtgtcacaaatgcactttgggaccccagaacatccaaggcactgacctttttattttatttttttttttgagatggagtcttacttgctctgttggctaggctgaggctcagtggtgggatctcggttcactgcatccttcacctcctgagttcaagcaattctcctgcctcagcctcctgagtagctgggattacaggcatgtgccaccatgcctggctaattttcgtatttttagtagagacggggtttcaccatgttggccaggctggtctcaaactcctaagctccagtgatccactggcctcagcctcccaaaggcactgaccttttattgggttgttatgtgctggacaccgaactagaaacttccactgcattagctcacgtaagttcatagcagtcttatggggccatgtaaagcagagggtgacagtggagccctagaatcacagacttgagtttctttttttttgagacggagtttccctcttgttgcccaggctggaatgcagtggagcgatctcggctcaccgcaacctgcgccgcctgggttcaagtgattctcctgtctcagcctcctgagtagctgggattacaggcatgcgccatcacgcccagctaattttgtatttttagtagagacagggtttctccatgttggtcaggctggtctcaaacttccaactgcaggtgatccgcccgccttggcctcccgaagtgctgggattacaggcgtgagccactgcgcctggccacagacctgggtttcagtctgaatgtttccctttcctaactgtcttggctttagcaaggagcttctcgaatttagagcctgactgccttacgactgtaaaggggagatgattattaggattcagtaagatacacataacatcatttagtccagtcccagcacttagtaggtgctcaagagacaataaacatatttctccatgcattacgttttgccagtaaggacactaaggcccatggagagcagagctgtgctatttcattcatccctgtaaccccagcacctggcacatgtgaagaagtgaaaaataatatgccaggatgaacaagccagtacctggtggagctgggatgccagctcaggtcttcctgactccagccctgtacacctggtcatcaggctgtcctagggagatctgactgtggggtggccatggcaggtgtattagtctgctcaggctcctgtaacaaaataccacatgctgggtgacttaatcaagagacatttattttccacagttctggaggctgggaaatccggcatcatggtgctggctggttcaggttttggtgaggactctgttgctggcttgcaggtgtccgtcttcttgctgtgtcctcacatggggagcgagtggagagtgagatagtgctctagtgtctctacaagaactgtaagccagggcagtggagcacacctgtagtctcagctgctcgggaggctgaggtgggaggattgcatgagcccaggagttcgagactagcctaggcaacatagggagatcttgtctcaaaagaaaaaaaaaaaaaggaccatttttcccatcaaggggtcagaaggtcagggccccacgctatgacctcatttaactttatttatttctgtataggccccatgtccaaatacagtcacattgggggttagagtttcaccatatgaatttggggggacccaaacatttaatccatgatagtggatccccaagctgactctgacagccctgcctctcctacaggcaccctctgtgaatgctacgatgagctgggcaatcgctaccagctgcccatctactgcctgtcaccgccggtgaacctgctgctggagcacacggaggaggagagcctggagccccccgagcctccacccagcgtgcgccgtgagttcccgctgaaggtgcgcctgtccacgggcaaggacgtgaggctcagcgccagcctgcccgacacagtggggcagctcaagaggcagctgcacgcccaggagggcatcgagccatcgtggcagcggtggttcttctccgggaagctgctcacagaccgcacacggctccaggagaccaagatccagaaagattttgtcatccaggtcatcatcaaccagcccccaccaccccaggactgatgggcccacggacccctgggaagaggccccgcctggagcactaggcccccaccctgctgctgccttccagtgctgtcattttcttcaggggccctcccctcggtgtggctggtgggtgagccgtgaagggaccctgcctttcagggcactacgcgccaccagttcccggtacccagggagcaggcagccacacacgggccttgcaaccttgtcagagaaaaggcgaacagggccctcaccctgcctgtctcccgaagcaggttcgagccacaagggccaaccaggaggcccctggagcccagatctgtcatctggtgctgccagctgtgctcactctggttttctgctcagggtctgaagcagctgctgtctccctcctctgcccccatcccctggctctcccctgggcacagtgccactcccttggaagggagggaaccacccgtgagccccagggcttgggaagcctgaggcgggcctctgcctctccctgcccccagcacaattggcagagatgaggcgggtggtggacagctgggctgtcgtggcagggtctgcacagggccatgtcctggctgtaacccaggcagtgggaggtctgcagcctggtcatggcctccacagcaggtccctgtggacagacatatctgcatatttatcaataaagccttttgctccttctcgctt
